(19) United States
(12) Patent Application Publication
(10) Pub. No.: US 2009/0191548 A1
(43) Pub. Date: Jul. 30, 2009

(54) METHODS AND NUCLEIC ACIDS FOR THE ANALYSIS OF GENE EXPRESSION ASSOCIATED WITH TISSUE CLASSIFICATION

(75) Inventors: Kurt Berlin, Stahnsdorf (DE); Stephan Beck, Cambridge (GB); Matthias Burger, Berlin (DE); Rene Cortese, Berlin (DE); Florian Eckhardt, Berlin (DE); Carolina Haefliger, Basel (CH); Joern Lewin, Berlin (DE); Fabian Model, Berlin (DE); Alexander Olek, Berlin (DE)

Correspondence Address: DAVIS WRIGHT TREMAINE, LLP/Seattle, 1201 Third Avenue, Suite 2200, SEATTLE, WA, 98101-3045, US

(73) Assignee: Epigenomics AG, Berlin (DE)

(21) Appl. No.: 12/088,384

(22) PCT Filed: Sep. 28, 2006
(86) PCT No.: PCT/EP2006/009454

§ 371 Date: Jul. 2, 2008

(30) Foreign Application Priority Data
Sep. 29, 2005 (EP) 050213313.3
Dec. 23, 2005 (EP) 05090346.7
Jun. 15, 2006 (EP) 06090110.5

(51) Int. Cl. C12Q 1/68; C07H 21/04

(52) U.S. Cl. 435/6; 536/23.1

(57) ABSTRACT

The present application provides methods and nucleic acids the classification of a biological sample. This is achieved by the analysis of the expression status of at least one of the genes selected from Table 1 as disclosed.

### FIELD OF THE INVENTION

[0001] The present invention relates to human DNA sequences that exhibit tissue specific expression patterns. Particular embodiments of the invention provide methods for classifying a biological sample.

### BACKGROUND

[0002] Bisulfite modification of DNA is an art-recognized tool used to assess CpG methylation status. 5-methylcytosine is the most frequent covalent base modification in the DNA of eukaryotic cells. It plays a role, for example, in the regulation of the transcription, in genetic imprinting, and in tumorigenesis. Therefore, the identification of 5-methylcytosine as a component of genetic information is of considerable interest. However, 5-methylcytosine positions cannot be identified by sequencing, because 5-methylcytosine has the same base pairing behavior as cytosine. Moreover, the epigenetic information carried by 5-methylcytosine is completely lost during, e.g., PCR amplification.

[0003] The most frequently used method for analyzing DNA for the presence of 5-methylcytosine is based upon the specific reaction of bisulfite with cytosine whereby, upon subsequent alkaline hydrolysis, cytosine is converted to uracil, which corresponds to thymine in its base pairing behavior. Significantly, however, 5-methylcytosine remains unmodified under these conditions. Consequently, the original DNA is converted in such a manner that methylcytosine, which originally could not be distinguished from cytosine by its hybridization behavior, can now be detected as the only remaining cytosine using standard, art-recognized molecular biological techniques, for example, by amplification and hybridization, or by sequencing. All of these techniques are based on differential base pairing properties, which can now be fully exploited.

[0004] The prior art, in terms of sensitivity, is defined by a method comprising enclosing the DNA to be analyzed in an agarose matrix, thereby preventing the diffusion and renaturation of the DNA (bisulfite only reacts with single-stranded DNA), and replacing all precipitation and purification steps with fast dialysis (Olek A, et al., A modified and improved method for bisulfite based cytosine methylation analysis, Nucleic Acids Res. 24:5064-6, 1996). It is thus possible to analyze individual cells for methylation status, illustrating the utility and sensitivity of the method. An overview of art-recognized methods for detecting 5-methylcytosine is provided by Rein, T., et al., Nucleic Acids Res., 26:2255, 1998.

[0005] The bisulfite technique, barring few exceptions (e.g., Zeschnigk M, et al., Eur J Hum Genet. 5:94-98, 1997), is currently only used in research. In all instances, short, specific fragments of a known gene are amplified subsequent to a bisulfite treatment, and either completely sequenced (Olek and Walter, Nat Genet. 1997 17:275-6, 1997), subjected to one or more primer extension reactions (Gonzalgo and Jones, Nucleic Acids Res., 25:2529-31, 1997; WO 95/00669; U.S. Pat. No. 6,251,594) to analyze individual cytosine positions, or treated by enzymatic digestion (Xiong and Laird, Nucleic Acids Res., 25:2532-4, 1997). Detection by hybridization has also been described in the art (Olek et al., WO 99/28498). Additionally, use of the bisulfite technique for methylation detection with respect to individual genes has been described (Grigg and Clark, Bioessays, 16:431-6, 1994; Zeschnigk M, et al., Hum Mol Genet., 6:387-95, 1997; Feil R, et al., Nucleic Acids Res., 22:695-, 1994; Martin V, et al., Gene, 157:261-4, 1995; WO 97/46705 and WO 95/15373).

[0006] Methylation Assay Procedures. Various methylation assay procedures are known in the art, and can be used in conjunction with the present invention. These assays allow for determination of the methylation state of one or a plurality of CpG dinucleotides (e.g., CpG islands) within a DNA sequence. Such assays involve, among other techniques, DNA sequencing of bisulfite-treated DNA, PCR (for sequence-specific amplification), Southern blot analysis, and use of methylation-sensitive restriction enzymes.

[0007] For example, genomic sequencing has been simplified for analysis of DNA methylation patterns and 5-methylcytosine distribution by using bisulfite treatment (Frommer et al., Proc. Natl. Acad. Sci. USA 89:1827-1831, 1992). Additionally, restriction enzyme digestion of PCR products amplified from bisulfite-converted DNA is used, e.g., the method described by Sadri and Hornsby (Nucl. Acids Res. 24:5058-5059, 1996), or COBRA (Combined Bisulfite Restriction Analysis) (Xiong and Laird, Nucleic Acids Res. 25:2532-2534, 1997).

[0008] Preferably, assays such as “MethyLight™” (a fluorescence-based real-time PCR technique) (Eads et al., Cancer Res. 59:2302-2306, 1999), Ms-SNuPE (Methylation-sensitive Single Nucleotide Primer Extension) reactions (Gonzalgo and Jones, Nucleic Acids Res. 25:2529-2531, 1997), methylation-specific PCR (“MSP”; Herman et al., Proc. Natl. Acad. Sci. USA 93:9821-9826, 1996; U.S. Pat. No. 5,786,146), are used alone or in combination with other of these methods.

[0009] MethyLight™. The MethyLight™ assay is a high-throughput quantitative methylation assay that utilizes fluorescence-based real-time PCR (TaqMan™) technology that requires no further manipulations after the PCR step (Eads et al., Cancer Res. 59:2302-2306, 1999). Briefly, the MethyLight™ process begins with a mixed sample of genomic DNA that is converted, in a sodium bisulfite reaction, to a mixed pool of methylation-dependent sequence differences according to standard procedures (the bisulfite process converts unmethylated cytosine residues to uracil). Fluorescence-based PCR is then performed either in an “unbiased” (with primers that do not overlap known CpG methylation sites) PCR reaction, or in a “biased” (with PCR primers that overlap known CpG dinucleotides) reaction. Sequence discrimination can occur either at the level of the amplification process or at the level of the fluorescence detection process, or both.

[0010] The MethyLight™ assay may be used as a quantitative test for methylation patterns in the genomic DNA sample, wherein sequence discrimination occurs at the level of probe hybridization. In this quantitative version, the PCR reaction provides for unbiased amplification in the presence of a fluorescent probe that overlaps a particular putative methylation site. An unbiased control for the amount of input DNA is provided by a reaction in which neither the primers, nor the probe overlie any CpG dinucleotides. Alternatively, a qualitative test for genomic methylation is achieved by probing of the biased PCR pool with either control oligonucleotides that do not “cover” known methylation sites (a fluorescence-based version of the “MSP” technique), or with oligonucleotides covering potential methylation sites.

[0011] The MethyLight™ process can by used with a “TaqMan®” probe in the amplification process. For example, double-stranded genomic DNA is treated with sodium bisulfite and subjected to one of two sets of PCR reactions using TaqMan® probes; e.g., with either biased primers and TaqMan® probe, or unbiased primers and TaqMan® probe. The TaqMan® probe is dual-labeled with fluorescent “reporter” and “quencher” molecules, and is designed to be specific for a relatively high GC content region so that it melts out at about 10° C. higher temperature in the PCR cycle than the forward or reverse primers. This allows the TaqMan® probe to remain fully hybridized during the PCR annealing/extension step. As the Taq polymerase enzymatically synthesizes a new strand during PCR, it will eventually reach the annealed TaqMan® probe. The Taq polymerase 5′ to 3′ endonuclease activity will then displace the TaqMan® probe by digesting it to release the fluorescent reporter molecule for quantitative detection of its now unquenched signal using a real-time fluorescent detection system.

[0012] Typical reagents (e.g., as might be found in a typical MethyLight™-based kit) for MethyLight™ analysis may include, but are not limited to: PCR primers for specific gene (or bisulfite treated DNA sequence or CpG island); TaqMan® probes; optimized PCR buffers and deoxynucleotides; and Taq polymerase.

[0013] Ms-SNuPE. The Ms-SNuPE technique is a quantitative method for assessing methylation differences at specific CpG sites based on bisulfite treatment of DNA, followed by single-nucleotide primer extension (Gonzalgo and Jones, Nucleic Acids Res. 25:2529-2531, 1997). Briefly, genomic DNA is reacted with sodium bisulfite to convert unmethylated cytosine to uracil while leaving 5-methylcytosine unchanged. Amplification of the desired target sequence is then performed using PCR primers specific for bisulfite-converted DNA, and the resulting product is isolated and used as a template for methylation analysis at the CpG site(s) of interest. Small amounts of DNA can be analyzed (e.g., microdissected pathology sections), and it avoids utilization of restriction enzymes for determining the methylation status at CpG sites.

[0014] Typical reagents (e.g., as might be found in a typical Ms-SNuPE-based kit) for Ms-SNuPE analysis may include, but are not limited to: PCR primers for specific gene (or bisulfite treated DNA sequence or CpG island); optimized PCR buffers and deoxynucleotides; gel extraction kit; positive control primers; Ms-SNuPE primers for specific gene; reaction buffer (for the Ms-SNuPE reaction); and labeled nucleotides. Additionally, bisulfite conversion reagents may include: DNA denaturation buffer; sulfonation buffer; DNA recovery reagents or kit (e.g., precipitation, ultrafiltration, affinity column); desulfonation buffer; and DNA recovery components.

[0015] MSP. MSP (methylation-specific PCR) allows for assessing the methylation status of virtually any group of CpG sites within a CpG island, independent of the use of methylation-sensitive restriction enzymes (Herman et al. Proc. Natl. Acad. Sci. USA 93:9821-9826, 1996; U.S. Pat. No. 5,786,146). Briefly, DNA is modified by sodium bisulfite converting all unmethylated, but not methylated cytosines to uracil, and subsequently amplified with primers specific for methylated versus unmethylated DNA. MSP requires only small quantities of DNA, is sensitive to 0.1% methylated alleles of a given CpG island locus, and can be performed on DNA extracted from paraffin-embedded samples. Typical reagents (e.g., as might be found in a typical MSP-based kit) for MSP analysis may include, but are not limited to: methylated and unmethylated DNA specific PCR primers for specific gene (or bisulfite treated DNA sequence or CpG island), optimized PCR buffers and deoxynucleotides, and specific probes.

[0016] Prior art of several markers. If not stated otherwise, the following information was received from the Entrez database (http://www.ncbi.nlm.nih.gov/entrez/query.fcgi?db=gene) and the OMIM database (http://www.ncbi.nlm.nih.gov/entrez/query.fcgi?db=OMIM).

[0017] Glycoprotein Ib (platelet) beta polypeptide. (GP1BB) Glycoprotein Ib (platelet) beta polypeptide (GP1BB) is subunit of the platelet glycoprotein Ib (GPIb). GPIb is a heterodimeric transmembrane protein consisting of a disulfide-linked 140 kD alpha chain and 22 kD beta chain. It is part of the GPIb-V-IX system that constitutes the receptor for von Willebrand factor (VWF), and mediates platelet adhesion in the arterial circulation. GPIb alpha chain provides the VWF binding site, and GPIb beta contributes to surface expression of the receptor and participates in transmembrane signaling through phosphorylation of its intracellular domain. Mutations in the GPIb beta subunit have been associated with Bernard-Soulier syndrome, velocardiofacial syndrome and giant platelet disorder. The 206 amino acid precursor of GPIb beta is synthesized from a 1.0 kb mRNA expressed in platelets and megakaryocytes. A 411 amino acid protein arising from a longer, unspliced transcript in endothelial cells has been described; however, the authenticity of this product has been questioned. Yet another less abundant GPIb beta mRNA species of 3.5 kb, expressed in nonhematopoietic tissues such as endothelium, brain and heart, was shown to result from inefficient usage of a non-consensus polyA_signal within a separate gene (PNUTL1) located upstream of this gene. In the absence of polyadenylation from its own imperfect site, the PNUTL1 gene uses the consensus polyA_signal of this gene (Entrez database).

[0018] Transcription factor AP-2 alpha. Transcription factor AP-2 alpha (TFAP2A, alias AP-2 AP2TF; TFAP2; AP-2alpha) also known as activating enhancer binding protein 2 alpha is a 52-kD retinoic acid-inducible and developmentally regulated activator of transcription that binds to a consensus DNA-binding sequence CCCCAGGC in the SV40 and metallothionein (MIM 156350) promoters (OMIM database). The loss of transcription factor AP-2alpha expression has been shown to associate with tumorigenicity of melanoma cell lines and poor prognosis in primary cutaneous melanoma. Altogether these findings suggest that the gene encoding AP-2alpha (TFAP2A) acts as a tumor suppressor in melanoma. A failure in post-transcriptional processing of AP-2alpha is a possible inactivation mechanism of AP-2alpha in cutaneous melanoma (Karjalainen et al, 2000). It was shown that the induction of AP-2 mRNA is at the level of transcription and is transient, reaching a peak 48-72 hr after the addition of retinoic acid (RA) and declining thereafter, even in the continuous presence of retinoic acid. AP-2-binding site-mediated cAMP and TPA (12-O-tetradecanoyl-phorbol-13-acetate) responses are not regulated at the level of AP-2 expression but, rather, achieved either by post-translational changes in AP-2 or in conjunction with another protein (Luscher et al, 1989). Decreases in AP2 protein were rapidly reversed by insulin administration. There were no changes in AP2 protein in the absence of changes in AP2 mRNA supporting a pretranslational mechanism of regulation (Melki and Abumrad, 1993). There is a significant up-regulation of AP-2gamma expression in breast cancer specimens (P=0.01). There was also a significant correlation between the presence of the AP-2alpha protein and estrogen receptor expression (P=0.018) and between specimens containing both AP-2alpha/AP-2gamma proteins and ERBB-2 expression (P=0.003). Furthermore, we detected an association (P=0.04) between the expression of AP-2gamma and the presence of an additional signal transduction molecule implicated in breast cancer (Turner et al, 1998). Macrophages deficient in AP2 display alterations in inflammatory cytokine production (Linton and Fazio, 2003). Loss of AP-2 results in up-regulation of MCAM/MUC18 and an increase in tumor growth and metastasis of human melanoma cells (Jean et al, 1998). AP-2alpha was reduced in advanced Dukes's stage adenocarcinomas. Together with reduced AP-2gamma expression in high grade colorectal carcinomas, this might contribute to tumor progression (Ropponen et al, 2001). The developmentally regulated transcription factor AP-2 is expressed at higher levels in human fetal skeletal muscle and rhabdomyosarcoma cells compared to human adult skeletal muscle (Zhang et al, 1998). Through its distinct actions in adipocytes and macrophages, AP2 links features of the metabolic syndrome including insulin resistance, obesity, inflammation, and atherosclerosis (Linton and Fazio, 2003). Chromatin immunoprecipitation analysis demonstrated DNA binding activity of AP-2 in the TbetaRI promoter and of Sp1 in the TbetaRII promoter after treatment with 5-aza-2′-deoxycytidine (Zhang et al, 2005). Site-specific methylation in NF1 gene, involving transcription factor binding sites for SP1, CRE (−10), and AP-2, was observed. One region of the 5′-UTR (untranslated region) overlapping with a putative AP-2 binding site was methylated at 30-100% in 4/20 control samples (Harder et al, 2004). High resolution mapping of methylated cytosines revealed that differential expression of the AP-2 alpha gene in normal human lung fibroblasts and their SV40-transformed counterparts was associated with distinct patterns of cytosine methylation in the AP-2 alpha promoter just 5′ to the transcription initiation site. Site-specific methylation was positively correlated with increased AP-2 alpha gene expression in both transformed cell lines investigated (Zhu et al, 2001). High resolution mapping of methylated cytosines revealed that differential expression of the AP-2 alpha gene in normal human lung fibroblasts and their SV40-transformed counterparts was associated with distinct patterns of cytosine methylation in the AP-2 alpha promoter just 5′ to the transcription initiation site. Site-specific methylation was positively correlated with increased AP-2 alpha gene expression in both transformed cell lines investigated (Zhu et al, 2001).

[0019] Cdc42 effector protein 1. Cdc42 effector protein 1 (CDC42EP1 alias MSE55, CEP1, Borg5, MGC15316) is a member of the Rho GTPase family that regulates multiple cellular activities, including actin polymerization. The protein encoded by this gene is a CDC42 binding protein that mediates actin cytoskeleton reorganization at the plasma membrane. The encoded protein, which is secreted, is primarily found in bone marrow. Two transcript variants encoding different isoforms have been found for this gene (Entrez database). Northern blot analysis demonstrates expression limited to endothelial and bone marrow stromal cells, but not poly(A) RNA from monkey liver, spleen, brain, lung, and kidney. On this basis, this protein was designated MSE55, for marrow/stromal/endothelial cell protein with a molecular mass of 55,000 daltons. Its tissue-specific expression may suggest a functional role in hematopoiesis (Bahou et al, 1992). MSE55 induced the formation of long, actin-based protrusions in NIH 3T3 cells as detected by immunofluorescence and live-cell video microscopy. MSE55-induced protrusion formation was blocked by expression of dominant-negative N17Cdc42, but not by expression of dominant-negative N17Rac. These findings indicate that MSE55 is a Cdc42 effector protein that mediates actin cytoskeleton reorganization at the plasma membrane (Burbelo et al, 1999).

[0020] Glutathione peroxidase 5. Glutathione peroxidase 5 (GPX5) also known as glutathione reductase is part of the hydrogen peroxide scavenging system found within the epididymis in the mammalian male reproductive tract. GPX5 expression is epididymis-specific and the transcript is unique from other GPXs because it contains a deletion resulting in an mRNA that does not contain a selenocysteine (UGA) codon (an unusual amino acid present in other GPXs). This deletion also renders the mRNA incapable of encoding an active GPX isoenzyme. For this reason, GPX5 is selenium-independent and has very little activity towards hydrogen peroxide or organic hydroperoxides. GPX5, which is bound to the acrosome of sperm, may act to protect sperm from premature acrosome reaction in the epididymis (Entrez database). The cDNA of human GPX5 is cloned. Thereby it was shown that the majority of transcripts contain a 118 nt frame-shifting deletion, arising, most likely, from inappropriate excision of exon 3 during processing. Antisera raised against recombinant human GPX5 cross-reacted with rat and macaque (Macaca fascicularis) epididymal proteins of the size expected for full-length, active GPX5. However, no similar reactivity could be demonstrated in any of the human samples tested (Hall et al, 1998). The tissue-restricted polyoma enhancer activator protein (PEA3) of the ETS oncogene family of DNA-binding proteins is a putative modulator of the epididymis-specific glutathione peroxidase 5 gene GPX5 (Drevet et al, 1998). At least part of the androgenic control of the GPX5 expression is exerted at the transcriptional level via an androgen response element localized in the distal promoter region of the GPX5 gene (Lareyre et al, 1997).

[0021] Gamma-parvin. Gamma-parvin (PARVG) is a member of the parvin family, a family of actin-binding proteins associated with focal contacts (OMIM database).

[0022] NKG2D ligand 4 precursor. NKG2D ligand 4 precursor (RAET1E alias NKG2D ligand 4, NKG2DL4, N2DL-4, RL-4, LETAL, bA350J20.7, ULBP4; MGC125308; MGC125309; bA350J20.7) also known as Retinoic acid early transcript 1E, Lymphocyte effector toxicity activation ligand, RAE-1-like transcript 4 is a member of the RAET1 family. The members of this family are major histocompatibility complex (MHC) class I-related genes located within a 180-kb cluster on chromosome 6q24.2-q25.3. RAET1 proteins contain MHC class I-like alpha-1 and alpha-2 domains. RAET1E and RAET1G (MIM 609244) differ from the other RAET1 proteins (e.g., RAET1I, or ULBP1; MIM 605697) in that they have type I membrane-spanning sequences at their C termini rather than glycosylphosphatidylinositol anchor sequences (Radosavljevic et al., 2002). The expression of diverse NKG2D-binding molecules (RAET1E and RAET1G) in different tissues and with different properties is consistent with multiple modes of infection- or stress-induced activation (Bacon et al, 2004). Tissue expression of ULBP4 differs from other members of the family, in that it is expressed predominantly in the skin (Jan Chalupny et al, 2003).

[0023] Oncostatin M precursor. Oncostatin M precursor (OSM alias MGC20461) is a member of a cytokine family that includes leukemia-inhibitory factor, granulocyte colony-stimulating factor, and interleukin 6. This gene encodes a growth regulator which inhibits the proliferation of a number of tumor cell lines. It regulates cytokine production, including IL-6, G-CSF and GM-CSF from endothelial cells. The related members of the interleukin 6 (IL-6) family of cytokines, IL-6, leukemia inhibitory factor (LIF), and oncostatin M, act as major inflammatory mediators and induce the hepatic acute phase reaction. Normal parenchymal liver cells express the receptors for these cytokines, and these receptors activate, to a comparable level, the intracellular signaling through signal transducer and activator of transcription (STAT) proteins and extracellular-regulated kinase (ERK) (Entrez database). OSM stimulates the expression of the immediate early genes c-fos and Egr-1 in Gnv-4 cells, an effect dependent upon the activation of the MAPK Erk1/2 intracellular signaling pathway (Igaz et al, 2005). OSM and macrophage-derived cytokines suppressed proliferation of normal epithelial cells, but reduced inhibition or even stimulated proliferation was noted for preneoplastic cells (Loewen et al, 2005). In human liver, OSM protein is expressed in Kupffer cells, variably in normals but universally in cirrhosis. The differential expression pattern of OSM and its receptors could allow for differential OSM signaling by alternative utilization of receptors to promote hepatocyte proliferation in acute injury and, with its homologue LIF, for the bile ductular reaction in cirrhosis (Znoyko et al, 2005). OSM strongly and specifically affects the expression of many genes, in particular those involved with innate immunity, angiogenesis, adhesion, motility, tissue remodeling, cell cycle and transcription (Finelt et al, 2005). OSM has a strong lipid-lowering effect under in vivo conditions in which the levels of circulating LDL-C are high and liver LDLR transcription is repressed (King et al, 2005). Oncostatin M (OSM), a member of the interleukin-6 family of cytokines, is thought to be expressed mostly by activated T-lymphocytes and monocytes in adult animals. However, specific constitutive tissue expression is reported of OSM in the pancreas, kidney, testes, spleen, stomach, and brain, but not liver or lung, of three adult rodent species (Znoyko et al, 2005). These studies identify S100A9 as a novel OSM-regulated gene through the STAT3-signaling cascade and suggest its involvement in the growth regulation of breast cancer cells (Li et al, 2004). Oncostatin M stimulates the detachment of a reservoir of invasive mammary carcinoma cells (Holzer et al, 2004). Blood neutrophils can be stimulated to express and rapidly release large quantities of OSM. It is proposed that OSM is released from neutrophils as they infiltrate rheumatoid joints and, thus, contribute to the complex cytokine network that characterizes retinoic acid (Cross et al, 2004). Oncostatin-M may contribute to the process of healing after myocardial infarction (Gwechenberger et al, 2004). Oncostatin M expression is upregulated in cirrhosis where it may have a role as a profibrogenic cytokine in hepatic stellate cells (Levy et al, 2000). OSM induces an angiogenic effect on capillary endothelial cells, which could be, at least in part, implicated in pathological processes such as atherosclerosis or tumor growth (Vasse et al, 1999).

[0024] Cytohesin-4. Cytohesin-4 (PSCD4 alias CYT4) also known as Pleckstrin homology, Sec7 and coiled/coil domains 4 (PSCD4) is a member of the PSCD family. Members of this family have identical structural organization that consists of an N-terminal coiled-coil motif, a central Sec7 domain, and a C-terminal pleckstrin homology (PH) domain. The coiled-coil motif is involved in homodimerization, the Sec7 domain contains guanine-nucleotide exchange protein (GEP) activity, and the PH domain interacts with phospholipids and is responsible for association of PSCDs with membranes. Members of this family appear to mediate the regulation of protein sorting and membrane trafficking. The PSCD4 exhibits GEP activity in vitro with both ARF1 and ARF5 but is inactive with ARF6. The PSCD4 and PSCD1 gene structures are very similar (Entrez database).

[0025] Solute carrier family 22 (organic cation transporter) member 1. Polyspecific organic cation transporters in the liver, kidney, intestine, and other organs are critical for elimination of many endogenous small organic cations as well as a wide array of drugs and environmental toxins. Solute carrier family 22 (organic cation transporter) member 1 (SLC22A1 alias OCT1) is one of three similar cation transporter genes located in a cluster on chromosome 6. The encoded protein contains twelve putative transmembrane domains and is a plasma integral membrane protein. Two transcript variants encoding two different isoforms have been found for this gene, but only the longer variant encodes a functional transporter (Entrez database). OCT1 is the main organic cation uptake system in hepatocytes and has common features with organic cation uptake over the basolateral membrane of renal proximal tubules (Grundemann et al., 1994). Together with other 24 membrane transporters OCT1 have potential roles in drug response, as determined by phylogenetic and population-genetics analysis in a large population (Leabman et al., 2003). Changes at evolutionarily conserved positions of OCT1 are strong predictors of decreased function and suggested that a combination of evolutionary conservation and chemical change might be a stronger predictor of function (Shu et al., 2003). hOCT1, which is expressed in the intestine and liver, is likely to play a major role in the intestinal absorption and hepatic disposition of ranitidine and famotidine in humans (Bourdet et al., 2005). OCT1 and OCT2 mediate luminal Ach (acetylcholine) release in human airways and suggest that ACh release is blocked after inhalation of budesonide (Lips et al., 2005). The expression of organic cation transporters rOCT1 and rOCT2 is reduced in experimental diabetes in rats (Grover et al., 2004). When mice were given metformin, the blood lactate concentration significantly increased in the wild-type mice, whereas only a slight increase was observed in Oct1(−/−) mice. The plasma concentration of metformin exhibited similar time profiles between the wild-type and Oct1(−/−) mice, suggesting that the liver is the key organ responsible for the lactic acidosis and the Oct1 gene is involved in lactic acidosis caused by metformin (Wang et al., 2003).

[0026] Tyrosine-protein kinase-like 7 precursor. Tyrosine-protein kinase-like 7 precursor (PTK7 alias CCK4 (Colon carcinoma kinase 4, CCK-4) is a receptor protein tyrosine kinase which transduce extracellular signals across the cell membrane. A subgroup of these kinases lack detectable catalytic tyrosine kinase activity but retain roles in signal transduction. The protein encoded by this gene is a member of this subgroup of tyrosine kinases and may function as a cell adhesion molecule. This gene is thought to be expressed in colon carcinomas but not in normal colon, and therefore may be a marker for or may be involved in tumor progression. Five transcript variants encoding five different isoforms have been found for this gene (Entrez database).

[0027] Cytidine monophosphate-N-acetylneuraminic acid hydroxylase. Cytidine monophosphate-N-acetylneuraminic acid hydroxylase (CMAH) is also known as CMP-N-acetylneuraminate monooxygenase, CMP-NeuAc hydroxylase, CMP-Neu5Ac hydroxylase, CMP-sialic acid hydroxylase (CSAH), CMP-N-acetylneuraminic acid hydroxylase). Sialic acids are terminal components of the carbohydrate chains of glycoconjugates involved in ligand-receptor, cell-cell, and cell-pathogen interactions. The two most common forms of sialic acid found in mammalian cells are N-acetylneuraminic acid (Neu5Ac) and its hydroxylated derivative, N-glycolylneuraminic acid (Neu5Gc). Studies of sialic acid distribution show that Neu5Gc is not detectable in normal human tissues although it was an abundant sialic acid in other mammals. Neu5Gc is, in actuality, immunogenic in humans. The absense of Neu5Gc in humans is due to a deletion within the human gene CMAH encoding cytidine monophosphate-N-acetylneuraminic acid hydroxylase, an enzyme responsible for Neu5Gc biosynthesis. Sequences encoding the mouse, pig, and chimpanzee hydroxylase enzymes were obtained by cDNA cloning and found to be highly homologous. However, the homologous human cDNA differs from these cDNAs by a 92-bp deletion in the 5′ region. This deletion, corresponding to exon 6 of the mouse hydroxylase gene, causes a frameshift mutation and premature termination of the polypeptide chain in human. It seems unlikely that the truncated human hydroxylase mRNA encodes for an active enzyme explaining why Neu5Gc is undetectable in normal human tissues. Human genomic DNA also shows evidence of this deletion which does not occur in the genomes of African great apes. Nonetheless, the CMAH gene maps to 6p21.32 in humans and great apes indicating that mutation of the CMAH gene occurred following human divergence from chimpanzees and bonobos (Entrez database). Studies indicate that the CMAH gene is inactivated shortly before the time when brain expansion began in humankind's ancestry, approximately 2.1-2.2 mya. In this regard, it is of interest that although Neu5Gc is the major sialic acid in most organs of the chimpanzee, its expression is selectively down-regulated in the brain (Chou et al, 2002).

[0028] Solute carrier family 24 (sodium/potassium/calcium exchanger), member 3. Solute carrier family 24 (sodium/potassium/calcium exchanger) member 3 is also known as SLC24A3 or NCKX3. The majority of TM neurones express NCX1, NCX2 and NCKX3 (Sergeeva et al, 2003). The N-terminal region of NCKX3, although not essential for expression, increased functional activity at least 10-fold and may represent a cleavable signal sequence. NCKX3 transcripts were most abundant in brain, with highest levels found in selected thalamic nuclei, in hippocampal CA1 neurons, and in layer IV of the cerebral cortex. Many other tissues also expressed NCKX3 at lower levels, especially aorta, uterus, and intestine, which are rich in smooth muscle (Kraev et al, 2001).

[0029] Somatostatin receptor type 3. Somatostatin receptor type 3 is also known as SS3R, SSR-28 or SSTR3. Somatostatin acts at many sites to inhibit the release of many hormones and other secretory proteins. The biological effects of somatostatin are probably mediated by a family of G protein-coupled receptors that are expressed in a tissue-specific manner. SSTR3 is a member of the superfamily of receptors having seven transmembrane segments and is expressed in highest levels in brain and pancreatic islets. SSTR3 is functionally coupled to adenylyl cyclase (Entrez database). Five SSTR subtypes are variably expressed at the mRNA level in breast tumors with 91% of samples showing SSTR1, 98% SSTR2, 96% SSTR3, 76% SSTR4, and 54% SSTR5. Levels of SSTR mRNA, when corrected for beta-actin levels, were highest for SSTR3 (Kumar et al, 2005). All five SSTRs were differentially expressed as membrane and cytoplasmic proteins in cortical neurons with significant variations in control vs. alzheimer diseased (AD) brain. In AD cortical brain region, somatostatin and neuropeptide-Y-positive neurons decreased (>70%). SSTR3 was the only receptor subtype that increased in AD cortex (Kumar, 2005). SSTR3 is expressed in the HCC cells, but not in the L-02 cells, which suggests a molecular basis for the HCC-selective effects of octreotide (Liu et al, 2004). SSTR3 protein existed in the membrane of gastric cancer cells. In normal gastric mucosa, SSTR3 protein distributed to the cellular membrane and cytoplasm or interstitial tissue in submucosa. The expression of SSTR3 protein was significantly lower in gastric cancer compared with normal mucosa. Moreover, the poor-differentiated adenocarcinoma was lower than the well-differentiated adenocarcinoma, and the similar result in cell lines. Octreotide could inhibit the growth and induce the apoptosis of gastric cancer and normal epithelial cells that expressed SSTR3, but didn't affect the cells with no or weakly expression of SSTR3 (Hu et al, 2004). SSTR3 mRNA is confined to the pituitary, hypothalamus, and spinal cord from early to midgestation (Goodyer et al, 2004). In vitro, octreotide inhibited the proliferation, invasion, and differentiation of HUVECs elicited by VEGF. RT-PCR analysis demonstrated that HUVECs expressed the somatostatin receptor subtype SSTR3. In vivo, octreotide was sufficiently potent to suppress nude mice corneal neovascularization induced by tumor tissues from LCI-D20 (Jia et al, 2003). In renal cell tumors, SSTR3 transcripts were completely absent. In breast cancer tissue, SSTR subtypes were transcribed independently of patient age, menstrual status, diagnosis, histological grade, and levels of estrogen receptor and progesterone receptor (Vikic-Topic et al, 1995).

[0030] Bone morphogenetic protein 7 precursor. Bone morphogenetic protein 7 precursor (BMP-7) is also known as Osteogenic protein 1 (OP-1) or Eptotermin alfa. The bone morphogenetic proteins (BMPs) are a family of secreted signaling molecules that can induce ectopic bone growth. Many BMPs are part of the transforming growth factor-beta (TGFB) superfamily. BMPs were originally identified by an ability of demineralized bone extract to induce endochondral osteogenesis in vivo in an extraskeletal site. Based on its expression early in embryogenesis, the BMP encoded by this gene has a proposed role in early development. In addition, the fact that this BMP is closely related to BMP5 and BMP7 has lead to speculation of possible bone inductive activity (Entrez database).

[0031] Caspase recruitment domain protein 10. Caspase recruitment domain protein 10 (CARD10) is also known as CARD-containing MAGUK protein 3 (CARMA 3). The caspase recruitment domain (CARD) is a protein module that consists of 6 or 7 antiparallel alpha helices. It participates in apoptosis signaling through highly specific protein-protein homophilic interactions. CARDs induce nuclear factor kappa-B (NFKB; MIM 164011) activity through the IKK (e.g., IKBKB; MIM 603258) complex. CARD9 (MIM 607212), CARD10, CARD11 (MIM 607210), and CARD14 (MIM 607211) interact with BCL10 (MIM 603517) and are involved in NFKB signaling complexes. Except for CARD9, these CARD proteins are members of the membrane-associated guanylate kinase (MAGUK) family (OMIM database). CARMA3 physically associate with Ikappa kinase gamma/NFkappaB essential modulator (IkappaKgamma-NEMO) in lymphoid and non-lymphoid cells. Expression of the NEMO-binding region of CARMA3 exerts a dominant negative effect on BCL10-mediated activation of NfkappaB (Stilo et al, 2004). CARD10 is a novel BCL10 interactor that belongs to the membrane-associated guanylate kinase family, a class of proteins that function to organize signaling complexes at plasma membranes. When expressed in cells, CARD10 binds to BCL10 and signals the activation of NF-kappaB through its N-terminal effector CARD domain. It is proposed that CARD10 functions as a molecular scaffold for the assembly of a BCL10 signaling complex that activates NF-kappaB (Wang et al, 2001).

[0032] Neutrophil cytosol factor 4. Neutrophil cytosol factor 4 (NCF-4), also known as Neutrophil NADPH oxidase factor 4 or p40-phox, is a cytosolic regulatory component of the superoxide-producing phagocyte NADPH-oxidase, a multicomponent enzyme system important for host defense. This protein is preferentially expressed in cells of myeloid lineage. It interacts primarily with neutrophil cytosolic factor 2 (NCF2/p67-phox) to form a complex with neutrophil cytosolic factor 1 (NCF1/p47-phox), which further interacts with the small G protein RAC1 and translocates to the membrane upon cell stimulation. This complex then activates flavocytochrome b, the membrane-integrated catalytic core of the enzyme system. The PX domain of this protein can bind phospholipid products of the PI(3) kinase, which suggests its role in PI(3) kinase-mediated signaling events. The phosphorylation of this protein was found to negatively regulate the enzyme activity. Alternatively spliced transcript variants encoding distinct isoforms have been observed (Entrez database).

[0033] Cadherin EGF LAG seven-pass G-type receptor 1 precursor. Cadherin EGF LAG seven-pass G-type receptor 1 precursor (CELSR1, ME2, CDHF9) also known as Flamingo homolog 2 (HFM12, FM12). is a member of the flamingo subfamily, part of the cadherin superfamily. The flamingo subfamily consists of nonclassic-type cadherins; a subpopulation that does not interact with catenins. The flamingo cadherins are located at the plasma membrane and have nine cadherin domains, seven epidermal growth factor-like repeats and two laminin A G-type repeats in their ectodomain. They also have seven transmembrane domains, a characteristic unique to this subfamily. It is postulated that these proteins are receptors involved in contact-mediated communication, with cadherin domains acting as homophilic binding regions and the EGF-like domains involved in cell adhesion and receptor-ligand interactions. This particular member is a developmentally regulated, neural-specific gene which plays an unspecified role in early embryogenesis (Entrez database). Expression of the CELSR/Flamingo homologue, c-fmi1, in the early avian embryo indicates a conserved role in neural tube closure and additional roles in asymmetry and somitogenesis (Formstone and Mason, 2005). Each CELSR is expressed prominently in the developing brain following a specific pattern, suggesting that they serve distinct functions (Tissir et al, 2002).

[0034] Platelet-derived growth factor B chain precursor. Platelet-derived growth factor B chain precursor (PDGF B-chain, PDGFB, SIS, SSV, PDGF2, c-sis) is a member of the platelet-derived growth factor family. The four members of this family are mitogenic factors for cells of mesenchymal origin and are characterized by a motif of eight cysteines. This gene product can exist either as a homodimer (PDGF-BB) or as a heterodimer with the platelet-derived growth factor alpha polypeptide (PDGF-AB), where the dimers are connected by disulfide bonds. Mutations in this gene are associated with meningioma. Reciprocal translocations between chromosomes 22 and 7, at sites where this gene and that for COL1A1 are located, are associated with a particular type of skin tumor called dermatofibrosarcoma protuberans resulting from unregulated expression of growth factor. Two splice variants have been identified for this gene (Entrez database). Medulloblastomas contained the highest amounts of PDGF B-chain, some four to eight times more than that in control brain tissue. Tumors that contained a high level of PDGF B-chain showed high proliferative activity (Nakamura et al, 1993). Trichostatin A (TSA) activates reporter gene constructs driven by the human platelet-derived growth factor B (PDGF-B) gene promoter. This activation showed an inverse correlation with the cell type-specific transcriptional activities of the promoter (Ulleras et al, 2001). Tissue specificity was not clear in the 5′ upstream region alone, and regulation by gene methylation or by elements other than in the 5′ region seemed to be necessary (Takimoto et al, 1993). Platelet-derived growth factor B-chain was also abnormally methylated in 4 of 13 (31%) multinodular goiters (MNG), 17 of 24 (71%) follicular adenomas (FA), and 9 of 13 (69%) papillary carcinomas (PC) (Matsuo et al, 1993). Gene expression of PDGF-A and PDGF-B mRNA were increased 22- and 6-fold, respectively, in biopsies from patients with diabetic nephropathy compared with control tissue (Langham et al, 2003). Adult SPC-PDGFB transgenic mice exhibited lung pathology characterized by enlarged airspaces, inflammation, and fibrosis (Hoyle et al, 1999). The transition between hyperplasia (complete hydatidiform mole) and neoplasia (choriocarcinoma) in these cells correlates with at least a 10- to 20-fold activation of the PDGF-B gene (Holmgren et al, 1993).

[0035] Transmembrane protease serine 6. Transmembrane protease serine 6 (TMPRSS6) is a type II transmembrane serine proteinase that is found attached to the cell surface. The encoded protein may be involved in matrix remodeling processes in the liver (Entrez database).

[0036] Bcl-2 interacting killer. Bcl-2 interacting killer (BIK, BP4, BIP1, BBC1) also known as Apoptosis inducer NBK (NBK) is known to interact with cellular and viral survival-promoting proteins, such as BCL2 and the Epstein-Barr virus in order to enhance programmed cell death. Because its activity is suppressed in the presence of survival-promoting proteins, this protein is suggested as a likely target for antiapoptotic proteins. This protein shares a critical BH3 domain with other death-promoting proteins, BAX and BAK (Entrez database). Human blk is expressed only in B lymphocytes (Drebin et al, 1995). The two human blk RNAs arise from the transcription of the blk gene by two distinct promoters and that these promoters may be subject to regulation by different trans-acting factors (Lin et al, 1995). P55blk and p53/p56lyn may be particularly good candidates for the membrane immunoglobulin-activated tyrosine kinase (Law et al, 1992). There is a role of blk kinase in anti-mu-mediated pathway to cell cycle arrest (Yao et al, 1993). Blk is down-regulated in a clinically distinct aggressive subset of B-CLL completely resistant in vitro to irradiation-induced apoptosis (Vallat et al, 2003). Despite the absence of Blk, the development, in vitro activation, and humoral immune responses of B cells to T-cell-dependent and -independent antigens are unaltered. These data are consistent with functional redundancy of Blk in B-cell development and immune responses (Texido et al, 2000). Expression of constitutively active Blk in the T lineage resulted in the appearance of clonal, thymic lymphomas composed of intermediate single positive cells (Malek et al, 1998).

[0037] PKHD1. PKHD1 stands for polycystic kidney and hepatic disease 1 (autosomal recessive) and is also known as FCYT, ARPKD, TIGM1. The protein encoded by this gene is predicted to have a single transmembrane (TM)-spanning domain and multiple copies of an immunoglobulin-like plexin-transcription-factor domain. Alternative splicing results in two transcript variants encoding different isoforms. Other alternatively spliced transcripts have been described, but the full length sequences have not been determined. Several of these transcripts are predicted to encode truncated products which lack the TM and may be secreted. Mutations in this gene cause autosomal recessive polycystic kidney disease, also known as polycystic kidney and hepatic disease-1 (Entrez database). HNF-1beta mutant mice show decreased expression of Pkhd1, the gene that is mutated in humans with autosomal-recessive polycystic kidney disease (ARPKD) (Igarashi et al, 2005). A total of 263 different PKHD1 mutations (639 mutated alleles) are included in the locus-specific database. Except for a few population-specific founder alleles and the common c.107C>T (p.Thr36Met) missense change, PKHD1 is characterized by significant allelic diversity (Bergmann et al, 2005). Polyductin is part of the group of polycystic kidney disease (PKD)-related proteins expressed in primary apical cilia. It probably serves in other subcellular functional roles. The detection of three different products using two antisera, with evidence for distinct subcellular localizations, suggests that PKHD1 encodes membrane-bound and soluble isoforms (Menezes et al, 2004). Renal cyst formation is accompanied by a drastic defect in the transcriptional activation of Umod, Pkhd1 and Pkd2 genes, whose mutations are responsible for distinct cystic kidney syndromes. In vivo chromatin immunoprecipitation experiments demonstrated that HNF1beta binds to several DNA elements in murine Umod, Pkhd1, Pkd2 and Tg737/Polaris genomic sequences (Gresh et al 2004). During embryogenesis, PKHD1 is widely expressed in epithelial derivatives, including neural tubules, gut, pulmonary bronchi, and hepatic cells. In the kidneys of the pck rats, the rat model of which is genetically homologous to human ARPKD, the level of PKHD1 was significantly reduced but not completely absent. In cultured renal cells, the PKHD1 gene product colocalized with polycystin-2, the gene product of autosomal dominant polycystic disease type 2, at the basal bodies of primary cilia (Zhang et al, 2004). PKHD1 was identified to be mutated in ARPKD (Onuchic et al, 2002).

[0038] Myosin-18B. Myosin-18B, also known as Myosin XVIIIb alias BK125H2.1, may regulate muscle-specific genes when in the nucleus and may influence intracellular trafficking when in the cytoplasm. The encoded protein functions as a homodimer and may interact with F actin. Mutations in this gene are associated with lung cancer (Entrez database). Genetic and epigenetic alterations of the MYO18B gene was analyzed in colorectal cancers. Alleic imbalance at the MYO18B locus was detected in 16 of 43 (40%) informative cases. Mutations of the MYO18B gene were detected in 2 of 11 (18%) cell lines and 1 of 47 (2%) surgical specimens. Nine of 11 (82%) cell lines showed reduced MYO18B expression, which was restored in all 9 by treatment with 5-aza-2′-deoxycytidine and/or trichostatin A (TSA). Although hypermethylation of the promoter CpG island for MYO18B was not detected, a significant correlation was observed between the level of MYO18B expression and the level of acetylation of histones H3 and H4 in 6 cell lines with and without TSA treatment (Nakano et al, 2005). Missense MYO18B mutations were detected in 1 of 4 (25%) ovarian cancer cell lines and in 1 of 17 (5.9%) primary ovarian cancers. MYO18B expression was reduced in all 4 ovarian cancer cell lines and in 12 of 17 (71%) of primary ovarian cancers. MYO18B expression was restored by treatment with 5-aza-2′-deoxycytidine and/or trichostatin A in 3 of 4 cell lines with reduced MYO18B expression, and hypermethylation of the promoter CpG island for MYO18B was observed in 2 of these 3 cell lines. Its hypermethylation was also observed in 2 of 15 (13%) primary ovarian cancers (Yanaihara et al, 2004). MYO18B, located at chromosome 22q12.1 and found that it is frequently deleted, mutated, and hypermethylated in lung cancers (Nishioka et al, 2002).

[0039] GAS2-likeprotein 1. GAS2-like protein 1 (GAS2L1) is also known as Growth arrest-specific 2-like 1 or GAS2-related protein on chromosome 22 (GAR22 protein, GAR22). The protein encoded by this gene, a member of the GAS2 family, is similar in sequence to the mouse protein Gas2, an actin-associated protein expressed at high levels in growth-arrested cells. Expression of the mouse Gas2 gene is negatively regulated by serum and growth factors. Three transcript variants encoding two different isoforms have been found for this gene (Entrez database). Although hGAR22 and mGAR22 mRNAs are expressed nearly ubiquitously, mGAR22 protein can only be detected in testis and brain.

[0040] Furthermore, only the beta isoform is present in these tissues. GAR22beta expression is induced in a variety of cultured cells by growth arrest. The absolute amounts of GAR22beta protein expressed are low (Goriounov et al, 2003). The regulation of Gas2 biosynthesis reflects the pattern of mRNA expression: its relative level is tightly associated with growth arrest. Gas2 seems to be regulated also at the posttranslational level via a phosphorylation mechanism (Brancolini et al, 1992).

[0041] Ras and Rab interactor 2. Ras and Rab interactor 2 (RIN2, RASSF4) The RAB5 protein is a small GTPase involved in membrane trafficking in the early endocytic pathway. The protein encoded by this gene binds the GTP-bound form of the RAB5 protein preferentially over the GDP-bound form, and functions as a guanine nucleotide exchange factor for RAB5. The encoded protein is found primarily as a tetramer in the cytoplasm and does not bind other members of the RAB family (Entrez database). RASSF4 (AD037) shows approximately 25% identity with RASSF1A and 60% identity with RASSF2. RASSF4 binds directly to activated K-Ras in a GTP-dependent manner via the effector domain, thus exhibiting the basic properties of a Ras effector. Overexpression of RASSF4 induces Ras-dependent apoptosis in 293-T cells and inhibits the growth of human tumor cell lines. Although broadly expressed in normal tissue, RASSF4 is frequently down-regulated by promoter methylation in human tumor cells. Thus, RASSF4 appears to be a new member of the RASSF family of potential Ras effector/tumor suppressors (Eckfeld et al, 2004). It was demonstrated that the expression of RASSF4/AD037 was lost in 12.5% (1/8) of NPC cell lines/xenografts. Bisulfite sequencing analysis revealed dense methylation in the promoter region of RASSF4/AD037 in the cell line. Restoration of RASSF4/AD037 mRNA was observed by treatment with a demethylating agent (Chow et al, 2004).

[0042] Forkhead box C1. Forkhead box C1 (FOXC1, FKHL7, IRID1, FREAC3, ARA, IGDA, IHG1) belongs to the forkhead family of transcription factors which is characterized by a distinct DNA-binding forkhead domain. The specific function of this gene has not yet been determined; however, it has been shown to play a role in the regulation of embryonic and ocular development. Mutations in this gene cause various glaucoma phenotypes including primary congenital glaucoma, autosomal dominant iridogoniodysgenesis anomaly, and Axenfeld-Rieger anomaly (Entrez database).

[0043] GRB2-related adaptor protein 2. GRB2-related adaptor protein 2 (GRAP2, Grf40, GrbX, GRBLG, GADS, Mona, P38; GRID; GRPL; GRB2L; GRAP-2) a member of the GRB2/Sem5/Drk family. This member is an adaptor-like protein involved in leukocyte-specific protein-tyrosine kinase signaling. Like its related family member, GRB2-related adaptor protein (GRAP), this protein contains an SH2 domain flanked by two SH3 domains. This protein interacts with other proteins, such as GRB2-associated binding protein 1 (GAB1) and the SLP-76 leukocyte protein (LCP2), through its SH3 domains. Transcript variants utilizing alternative polyA sites exist (Entrez database). GRAP2 and GPR51, were found to respond to low-dose radiation but not to high-dose radiation in G1-arrested normal human skin fibroblasts (Ding et al, 2005). Gads adaptor protein is expressed in many hematopoietic tissues, including bone marrow, lymph node, and spleen. Using intracellular staining, Gads protein was detected in a number of cells, including B cells, T cells, NK cells, monocytes, and plasmacytoid DC, but not in macrophages, neutrophils, or monocyte-derived DC. Gads may have a negative regulatory role in signaling through survival pathways, and is necessary for normal homeostatic proliferation in B cells (Yankee et al, 2005). GRAP genes were up-regulated in salivary glands of the MRL/lpr (an Sjogren's syndrome (SS) mouse model) (Shiraiwa et al, 2004). −2000 to +150 genomic region relative to the Mona gene transcription start site is sufficient to direct specific reporter gene expression in T cell lines, Jurkat, and MOLT-4 and in the immature myeloid cell lines, KG1a and RC2A. Deletion analysis and electrophoresis mobility shift assay identified several cis regulatory elements: overlapping initiator sequences, one interferon response factor-2 (IRF-2)-binding site at position −154, one GC box recognized by Sp1 and Sp3 at position −52, and two acute myeloid leukemia (AML)-1 binding sites at positions −70 and −13 (Guyot and Mouchiroud, 2003). It was reported that a lineage-restricted transcription of the Mona gene is controlled by specific promoters (Guyot et al, 2002).

[0044] RASSF2. RASSF2 stands for Ras association (RalGDS/AF-6) domain family 2 and is also known as KIAA0168 or DKFZp781O1747. This gene encodes a protein that contains a Ras association domain. Similar to its cattle and sheep counterparts, this gene is located near the prion gene. The specific function of this gene has not yet been determined. Three alternatively spliced transcript variants of this gene encoding two distinct isoforms have been reported (Entrez database). Hypermethylation of RASSF2 in at least one of the regions examined was detected in seven (70%) of the 10 gastric cancer cell lines; two (20%) exhibited hypermethylation in all the regions examined including the transcription start site and lost expression of RASSF2 mRNA, which could, however, be restored by 5-aza-2′ deoxycytidine treatment, while the other five (50%) cell lines exhibited hypermethylation at the 5′- and/or 3′-edge, with four of them expressing RASSF2 mRNA. In primary gastric cancers and corresponding non-neoplastic gastric epithelia, frequencies of RASSF2 methylation ranged from 29% (23 out of 78) to 79% (62 out of 78) and 3% (two out of 78) to 60% (47 out of 78), respectively, at different CpG sites examined (Endoh et al, 2005). Aberrant methylation and histone deacetylation of RASSF2 was associated with the gene's silencing in CRC. The activities of RASSF2, which were distinct from those of RASSF1, included induction of morphologic changes and apoptosis; moreover, its ability to prevent cell transformation suggests that RASSF2 acts as a tumor suppressor in CRC. Primary CRCs that showed K-ras/BRAF mutations also frequently showed RASSF2 methylation, and inactivation of RASSF2 enhanced K-ras-induced oncogenic transformation. RASSF2 methylation was also frequently identified in colorectal adenomas (Akino et al, 2005). RASSF2A is frequently inactivated in CRCs by CpG island promoter hypermethylation, and that epigenetic (RASSF2A) and genetic (K-ras) changes are mutually exclusive and provide alternative pathways for affecting Ras signalling (Hesson et al, 2005). RASSF2 binds directly to K-Ras in a GTP-dependent manner via the Ras effector domain. However, RASSF2 only weakly interacts with H-Ras. Moreover, RASSF2 promotes apoptosis and cell cycle arrest and is frequently down-regulated in lung tumor cell lines (Vos et al, 2003).

[0045] Glutamate receptor, ionotropic kainate 2 precursor. Glutamate receptor, ionotropic kainate 2 precursor (GRIK2 RP3-438O4.2 (Vega gene ID)) is also known as Glutamate receptor 6 (GluR-6) or Excitatory amino acid receptor 4 (EAA4). This gene encodes a subunit of a kainate glutamate receptor. Glutamate receptors mediate the majority of excitatory neurotransmission in the brain. This receptor may have a role in synaptic plasticity and may be important for learning and memory. It also may be involved in the transmission of light information from the retina to the hypothalamus. The structure and function of the encoded protein is changed by RNA editing. Alternatively spliced transcript variants encoding distinct isoforms have been described for this gene (Entrez database). Histone methylation marks were studied at proximal promoters of 16 ionotropic and metabotropic glutamate receptor genes (GRIN1,2A-D; GRIA1,3,4; GRIK2,4,5; GRM1,3,4,6,7) in cerebellar cortex collected across a wide age range from midgestation to 90 years old. Levels of di- and trimethylated histone H3-lysine 4, which are associated with open chromatin and transcription, showed significant differences between promoters and a robust correlation with corresponding mRNA levels in immature and mature cerebellar cortex. In contrast, levels of trimethylated H3-lysine 27 and H4-lysine 20, two histone modifications defining silenced or condensed chromatin, did not correlate with transcription but were up-regulated overall in adult cerebellum (Stadler et al, 2005). Maternal transmission disequilibrium of GRIK2 was observed with a significance of p=0.03 (Bah et al, 2004). Deletion data singled out GRIK2 as the gene most frequently affected by deletions of 6q in acute lymphocytic leukemia (ALL). Sequence analysis of GRIK2 in 14 ALL cases carrying heterozygous 6q deletions revealed a constitutional and paternally inherited C to G substitution in exon 6 encoding for an amino acid change in one patient. The substitution was absent among 232 normal alleles tested, leaving open the possibility that heterozygous carriers of such mutations may be susceptible to ALL. Although low in all normal hematopoietic tissues, quantitative reverse transcription-PCR showed higher baseline GRIK2 expression in thymus and T cells than other lineages. Among T-cell ALL patients, 6q deletion was associated with a statistically significant reduction in GRIK2 expression (P=0.0001). By contrast, elevated GRIK2 expression was measured in the myelomonocytic line THP-1 and in one patient with common ALL. Finally, significant levels of GRIK2 expression were detected in prostate, kidney, trachea, and lung, raising the possibility that this gene may be protective against multiple tumor types (Sinclair et al, 2004).

[0046] T-box transcription factor TBX1. T-box transcription factor TBX1 is also known as T-box protein 1, or Testis-specific T-box protein (TBX1, DGS, TGA, CAFS, CTHM, DGCR, DORV, VCFS, TBX1C). This gene is a member of a phylogenetically conserved family of genes that share a common DNA-binding domain, the T-box. T-box genes encode transcription factors involved in the regulation of developmental processes. This gene product shares 98% amino acid sequence identity with the mouse ortholog. DiGeorge syndrome (DGS)/velocardiofacial syndrome (VCFS), a common congenital disorder characterized by neural-crest-related developmental defects, has been associated with deletions of chromosome 22q11.2, where this gene has been mapped. Studies using mouse models of DiGeorge syndrome suggest a major role for this gene in the molecular etiology of DGS/VCFS. Several alternatively spliced transcript variants encoding different isoforms have been described for this gene (Entrez database). Association was demonstrated between variants and haplotypes of remaining TBX1 gene and manifestations of congenital heart defects in 22q11.2 deletion patients (Rauch et al, 2004). Tbx1 haploinsufficiency causes aortic arch abnormalities in mice because of early growth and remodeling defects of the fourth pharyngeal arch arteries (Vitelli et al, 2002). Tbx1 may trigger signals from the pharyngeal endoderm directed to the underlying mesenchyme. Expression patterns of Fgf8 and Fgf10, which partially overlap with Tbx1 expression pattern, are altered in Tbx1 (−/−) mutants (Vitelli et al, 2002). RA could produce an altered Tbx1 expression pattern in zebrafish. In addition, RA could repress Tbx1 expression in a dose-dependant manner (Zhang et al, 2006).

[0047] Cadherin-like 22. Cadherin-like 22 (CDH22, C20orf25 dJ998H6.1 MGC39564 is a member of the cadherin superfamily. The gene product is composed of five cadherin repeat domains and a cytoplasmic tail similar to the highly conserved cytoplasmic region of classical cadherins. Expressed predominantly in the brain, this putative calcium-dependent cell adhesion protein may play an important role in morphogenesis and tissue formation in neural and non-neural cells during development and maintenance of the brain and neuroendocrine organs (Entez database).

[0048] Nuclear factor of activated T-cells cytoplasmic 2. Nuclear factor of activated T-cells cytoplasmic 2 (NFATC2) is also known as T cell transcription factor NFAT1 or NFAT pre-existing subunit (NF-ATP, NFATp). This gene is a member of the nuclear factor of activated T cells (NFAT) family. The product of this gene is a DNA-binding protein with a REL-homology region (RHR) and an NFAT-homology region (NHR). This protein is present in the cytosol and only translocates to the nucleus upon T cell receptor (TCR) stimulation, where it becomes a member of the nuclear factors of activated T cells transcription complex. This complex plays a central role in inducing gene transcription during the immune response. Alternate transcriptional splice variants, encoding different isoforms, have been characterized (Entrez database). The expression levels of the NFAT family members NFAT1, -2, and -4 were normal in the SCID patients' T cells, dephosphorylation and nuclear translocation of these NFAT proteins occurred very transiently and incompletely upon stimulation (Feske et al, 2000). Two of the seven kinase inhibitors, staurosporine (St) and bisindolylmaleimide I (BI), resulted in the dephosphorylation and nuclear localization of NFATp. Treatment of cells with ionomycin resulted in NFATp dephosphorylation and nuclear localization (Feske et al, 2000). NFAT1 mRNA is preferentially expressed in mature CD4(+) single-positive cells (Amasaki et al, 2000). Continued culture in the presence of polarizing cytokines established a selective pattern of histone acetylation on both cytokine genes. This correlated with restricted access of the transcription factor NFAT1 to these gene regulatory regions as well as mutually exclusive gene expression by the differentiated T cells (Avni et al, 2001). The level of NFATc2 binding to NFAT motifs in the CD3gamma gene promoter was greatly increased in the abnormal T cells from hypereosinophilic syndrome (Willard-Gallo et al, 2005).

[0049] MyoD family inhibitor. MyoD family inhibitor (MDFI, I-MF) is also known as Myogenic repressor I-mf. It is a transcription factor that negatively regulates other myogenic family proteins. Studies of the mouse homolog, 1-mf, show that it interfers with myogenic factor function by masking nuclear localization signals and preventing DNA binding. Knockout mouse studies show defects in the formation of vertebrae and ribs that also involve cartilage formation in these structures (Entrez database). I-mfa domain proteins interact with the Axin complex and affect Axin regulation of both the Wnt and the JNK activation pathways (Kusano S and Raab-Traub, 2002). I-mfa is expressed at a low level in an osteoblast-like cell line, MC3T3E1, and a pluripotent differentiation modulator, 1,25-dihydroxyvitamin D(3), specifically enhanced 1-mfa mRNA expression (Tsuji et al, 2001). I-mfa plays an important role in trophoblast and chondrogenic differentiation by negatively regulating a subset of lineage-restricted bHLH proteins (Kraut et al, 1998).

[0050] TGM3. TGM3 alias TGE, MGC126249 or MGC126250 stands for transglutaminase 3 (E polypeptide, protein-glutamine-gamma-glutamyltransferase). Transglutaminases are enzymes that catalyze the crosslinking of proteins by epsilon-gamma glutamyl lysine isopeptide bonds. While the primary structure of transglutaminases is not conserved, they all have the same amino acid sequence at their active sites and their activity is calcium-dependent. The protein encoded by this gene consists of two polypeptide chains activated from a single precursor protein by proteolysis. The encoded protein is involved the later stages of cell envelope formation in the epidermis and hair follicle (Entrez database). Significantly higher levels of keratin (Ker)-14 and -17 mRNAs, combined with lower levels of Ker-4, Ker-13 and transglutaminase 3 (TG-3) transcripts, were observed in OSCC (Oral Squamous Cell Carcinoma) and severely dysplastic tissues, whereas this expression profile was reversed in hyperplasia and in mild to moderate dysplasia (Ohkura et al, 2005). TGM3 plays a important role in the epidermis differentiation in embryogenesis (Zhang et al, 2005). Transglutaminase 1, 2, and 3 could be involved in cross-linking of huntingtin into intranuclear inclusions in HD (Huntington disease). It was suggested that inhibiting transglutaminase should be explored as a potential treatment strategy for HD (Zainelli et al, 2005). Immunostaining for transglutaminase3 was absent or faint throughout almost the entire suprabasal epidermis in NTS (Netherton Syndrome) (Raghunath et al, 2004). It was revealed that genes involved in squamous cell differentiation were coordinately downregulated, including annexin I, small proline-rich proteins (SPRRs), calcium-binding S100 proteins (S100A8, S100A9), transglutaminase (TGM3), cytokeratins (KRT4, KRT13), gut-enriched Krupple-like factor (GKLF) and cystatin A, in human esophageal squamous cell carcinoma (ESCC) (Luo et al, 2004). TGM3 is downregulated in head and neck squamous cell carcinoma (Gonzalez et al, 2003). Immunohistochemical analysis of the skin revealed that the enzyme is present in the cells of the granular and cornified layers consistent with its role in cornified envelope formation. In cultured keratinocytes, TGase 3 was expressed in differentiating cells coincident with profilaggrin and keratin 10 expressions (Hitomi et al, 2003).

[0051] Disheveled associated activator of morphogenesis 2. Disheveled associated activator of morphogenesis 2 (DAAM2, KIAA0381, MGC90515, dJ90A20A.1, RP1-278E11.1) regulates the morphogenetic movements of vertebrate gastrulation in a Wnt-dependent manner through direct interactions with Dsh/Dvl and RhoA (Nakaya et al, 2004). The observed expression patterns in developing central nervous tissues suggested that vertebrate Daam genes were involved in pivotal steps in neuronal cell differentiation and movement (Kida et al, 2004).

[0052] OTTHUMG00000030521, AC000095.4. OTTHUMG00000030521, AC000095.4 (Vega gene ID) alias Em:AC000095.C22.4 putative processed transcript is probably DiGeorge Syndrome gene B (Vega gene Report).

[0053] CAP-binding protein complex interacting protein 1 isoform. CAP-binding protein complex interacting protein 1 isoform (a Source: RefSeq_peptide NP_{—}073622) alias FLJ23588; DJBP; HSCBCIP1; KIAA1672; dJ185D5.1). DJBP mRNA was found to be specifically expressed in the testis. In addition to the binding of DJBP to the COOH-terminal region of DJ-1, DJBP was also found to bind in vitro and in vivo to the DNA-binding domain of the androgen receptor (AR) in a testosterone-dependent manner and to be colocalized with DJ-1 or AR in the nucleus. Furthermore, a co-immunoprecipitation assay showed that the formation of a ternary complex between DJ-1, DJBP, and AR occurred in cells in which DJ-1 bound to the AR via DJBP. It was found that DJBP repressed a testosterone-dependent AR transactivation activity in monkey Cos1 cells by recruiting histone deacetylase (HDAC) complex (Niki et al, 2003). Necropsy tissues from 11 cases were analyzed with 1 tumor specimen found to have HIV integrated in chromosome 22q13.2 and within 300 kb of HSCBCIP1 (CAP-binding protein complex interacting homologue). Tumor-specific primers were then used to screen uninvolved tissue from the same patient, which did not amplify the site-specific region (Killebrew et al, 2004).

[0054] T-box 18. T-box 18 (TBX18). Forty-four transcripts with expression differences higher than 2-fold (T test, P< or =0.05) were detected between forelimb and hindlimb tissues including 38 new transcripts such as Rdh10, Frzb, Tbx18, and Hip that exhibit differential limb expression (Shou et al, 2005). T-box genes have been implicated in early cardiac lineage determination, chamber specification, valvuloseptal development, and diversification of the specialized conduction system in vertebrate embryos. These genes include Tbx1, Tbx2, Tbx3, Tbx5, Tbx18, and Tbx20, all of which exhibit complex temporal spatial regulation in developing cardiac structures (Plageman and Yutzey, 2005). It was demonstrated that maintenance of anterior-posterior-somite polarity is mediated by the T-box transcription factor Tbx18 (Bussen et al, 2004). Given the haploinsufficiency phenotypes reported for other T-box genes, we speculate that allelic imbalance (AI) may influence the function of Tbx18 during osteosarcomagenesis (Rosemann et al, 2004).

[0055] PLA2G3. PLA2G3 is also known as phospholipase A2 group III (GIII-SPLA2, sPLA(2)-III). Human group III secreted phospholipase A(2) (sPLA(2)-III) consists of a central group III sPLA(2) domain flanked by unique N- and C-terminal domains. It was found that the sPLA(2) domain alone was sufficient for its catalytic activity and for its prostaglandin E(2) (PGE(2))-generating functions in various cell types. Immunohistochemistry demonstrated that sPLA(2)-III was preferentially expressed in the microvascular endothelium in human tissues with inflammation, ischemic injury, and cancer. In support of this, sPLA(2)-III was induced in cultured microvascular endothelial cells after stimulation with proinflammatory cytokines. Expression of sPLA(2)-III was also associated with various tumor cells, and colorectal cancer cells transfected with sPLA(2)-III exhibited enhanced PGE(2) production and cell proliferation, which required sPLA(2)-III catalytic activity (Murakami et al, 2005).

[0056] OTTHUMG00000030140. OTTHUMG00000030140, CTA-299D3.6 (Vega gene ID) alias bA262A13.C22.5. Identification of the breakpoint between CTA-299D3 and RP5-925J7 probe, located in 22q13.32. Deletion extent could be estimated to be about 2.5 Mb in a patient with ring chromosome 22 (includes mental retardation with severe language impairment, hypotonia, and dysmorphic facial features) (Battini et al, 2004).

[0057] Solute carrier family 7 (cationic amino acid transporter, y+ system) member 4. Solute carrier family 7 (cationic amino acid transporter, y+ system) member 4 (SLC7A4, CAT4, CAT-4, HCAT3, MGC129976, MGC129977) exhibits significant sequence homology with the SLC7 subfamily of human cationic amino acid transporters (hCATs). Human glioblastoma cells stably overexpressing a fusion protein between SLC7A4 and the enhanced green fluorescent protein (EGFP) did not exhibit an increased transport activity for 1-arginine. The lack of transport activity was not due to a lack of SLC7A4 protein expression in the plasma membrane. The expression of SLC7A4 can be induced in NT2 teratocarcinoma cells by treatment with retinoic acid. However, also for this endogenously expressed SLC7A4, any transport activity for 1-arginine could not be detected. Therefore, SLC7A4 is either not an amino acid transporter or it needs additional (protein) factor(s) to be functional (Wolf et al, 2002). SLC7A4 was mapped to 22q11.2, the commonly deleted region of the velocardiofacial syndrome (VCFS, Shprintzen syndrome). In a patient affected by VCFS, deletion of SLC7A4 was demonstrated by chromosomal FISH. By Northern analysis, an abundant transcript was detected in brain, testis, and placenta (Sperandeo et al, 1998).

[0058] Sushi domain containing 2. Sushi domain containing 2 (SUSD2 alias BK65A6.2, FLJ22778). Neuronal marker proteins are widely used for characterization and identification of normal and tumor tissue of the central nervous system, but the most commonly used neuronal markers have inherent methodological problems. A proteomic approach was used comprising two-dimensional (2-D) gel electrophoresis and subsequent MALDI identification to identify possible new marker proteins in the human cortical neuronal cell line HCN-2. 14 proteins were found, among them BK65A6.2 (Novel Sushi Domain (Scr repeat)) (Peyrl et al, 2003).

[0059] Phosphatidylinositol (4,5) bisphosphate 5-phosphatase, A. Phosphatidylinositol (4,5) bisphosphate 5-phosphatase A (PIB5PA alias PIPP; INPP5; MGC129984 PIPP) hydrolyzes PtdIns(3,4,5)P3 forming PtdIns(3,4)P2, decreasing Ser473-Akt phosphorylation. PIPP is expressed in PC12 cells, localizing to the plasma membrane of undifferentiated cells and the neurite shaft and growth cone of NGF-differentiated neurites. Overexpression of wild-type, but not catalytically-inactive PIPP, in PC12 cells inhibited neurite elongation. Targeted depletion of PIPP using RNA interference (RNAi) resulted in enhanced neurite differentiation, associated with neurite hyper-elongation (Ooms et al 2005).

[0060] Signal peptide-CUB domian-EGF-related 1. Signal peptide-CUB domian-EGF-related 1 (SCUBE1) mRNA is found in several highly vascularized tissues such as liver, kidney, lung, spleen, and brain and is selectively expressed in vascular endothelial cells (EC) by in situ hybridization (Yang et al, 2002). The Scube1 (signal peptide-CUB domain-EGF-related 1) gene was isolated from a developing mouse urogenital ridge cDNA library and is expressed prominently in the developing gonad, nervous system, somites, surface ectoderm, and limb buds (Grimmond et al, 2000). SCUBE1 and SCUBE2 define an emerging family of human secreted proteins that are expressed in vascular endothelium and may play important roles in development, inflammation, and thrombosis (Yang et al, 2000).

[0061] RP3-355C18.2 (Vega gene ID). RP3-355C18.2 (Vega gene ID) alias dJ355C18.C22.2 is similar to AK023960 (according to Vega Report).

[0062] RP1-47A17.8 (Vega gene ID). RP1-47A17.8 (Vega gene ID) alias dJ47A17.C22.8 is similar to AL110226 cDNA DKFZp434H204 (According to Vega Report).

[0063] KB-1323B2.3. Embryonic marker KB-1323B2.3 alias Em:AP000557.C22.3 is similar to Em:AF012872 human phosphatidylinositol 4-kinase 230 (According to Vega Report).

[0064] Breast carcinoma amplified sequence 4. The breast carcinoma amplified sequence 4 (BCAS4 alias FLJ20495, BHLHB4) gene at 20q13.2 encodes a 211 amino acid cytoplasmic protein. In the MCF7 breast cancer cell line, the BCAS3 and BCAS4 genes were co-amplified, and cloning of a highly overexpressed 1.3-kb transcript revealed a rearrangement fusing the last two exons of BCAS3 with BCAS4. The BCAS4-BCAS3 fusion transcript was detected only in MCF7 cells, but the BCAS4 gene was also overexpressed in nine of 13 breast cancer cell lines (Barlund et al, 2004).

[0065] SAM50-like protein CGI-51. SAM50-like protein CGI-51 also known as SAM50_HUMAN (UniProt/Swiss-Prot ID) or sorting and assembly machinery component 50 homolog (S. Cerevisiae) (SAMM50 alias OMP85, SAM50, TOB55, TRG-3, CGI-51, YNL026W). Tob55 is an essential component of the TOB complex in that it constitutes the core element of the protein-conducting pore. The other two components of the TOB complex are Tob38, which builds a functional TOB core complex with Tob55, and Mas37, a peripheral member of the complex. Reduced insertion of the Tob55 precursor in the absence of Tom20 and Tom70 argues for initial recognition of the precursor of Tob55 by the import receptors. Next, it is transferred through the import channel formed by Tom40 (Habib et al, 2005).

[0066] TPX1_testis specific protein 1. TPX1_testis specific protein 1 (probe H4-1 p3-1) (CRISP2 alias TPX1, TSP1, GAPDL5, CRISP-2, MGC111136). TPX1 is a component of the sperm acrosome that remains associated with sperm after capacitation and acrosome reaction, and is relevant for sperm-oocyte interaction (Busso et al, 2004). There is significant difference in the expression levels of TPX-1 between normal (n=29) and motility impaired (n=24) semen samples, indicating that this gene is involved in sperm function (Wang et al, 2004). RT-PCR analysis of RNA isolated from acinar cells of lacrimal glands revealed that they expressed CRISP-1 and CRISP-2 (Haendler et al, 1999).

[0067] Nesprin-1. Nesprin-1 (Nuclear envelope spectrin repeat protein 1) is also known as synaptic nuclear envelope protein 1 (Syne-1), Myocyte nuclear envelope protein 1 (Myne-1) or Enaptin (SYNE1 alias SYNE-1B, KIAA0796, 8B, nesprin-1, enaptin, MYNE1, CPG2). Transgenic mice overexpressing the conserved C-terminal Klarsicht/ANC-1/Syne homology domain of Syne-1 were generated. The transgene acted in a dominant interfering fashion, displacing endogenous Syne-1 from the nuclear envelope. Muscle nuclei failed to aggregate at the NMJ in transgenic mice, demonstrating that localization and positioning of synaptic nuclei require Syne proteins (Grady et al, 2005). Integral membrane protein nesprin-1alpha serves as a receptor for mAKAP on the nuclear envelope in cardiac myocytes (Pare et al, 2005). Syne-1 and KIF3B function together in cytokinesis by facilitating the accumulation of membrane vesicles at the spindle midbody (Fan and Beck, 2004). Syne-1 gene is expressed in a variety of forms that are multifunctional and are capable of functioning at both the Golgi and the nuclear envelope, perhaps linking the two organelles during muscle differentiation (Gough et al, 2003). Nesprin-1 is developmentally regulated in both smooth and skeletal muscle and is re-localized from the nuclear envelope to the nucleus and cytoplasm during C2C12 myoblast differentiation (Zhang et al, 2001).

[0068] FLOT1. FLOT1 is also known as flotillin or 1 ENSG00000137312. Caveolae are small domains on the inner cell membrane involved in vesicular trafficking and signal transduction. FLOT1 encodes a caveolae-associated, integral membrane protein. The function of flotillin 1 has not been determined (Entrez database).

[0069] C6 orf25. C6orf25 is also known as chromosome 6 open reading frame 25; ENSG00000096148; C6orf25; G6b; NG31. This gene is a member of the immunoglobulin (Ig) superfamily and is located in the major histocompatibility complex (MHC) class III region. The protein encoded by this gene is a glycosylated, plasma membrane-bound cell surface receptor, but soluble isoforms encoded by some transcript variants have been found in the endoplasmic reticulum and Golgi before being secreted. Seven transcript variants encoding different isoforms have been described for this gene (Entrez database).

[0070] VARS. VARS is also known as valyl-tRNA synthetase; ENSG00000096171; G7A or VARS2.

[0071] Aminoacyl-tRNA synthetases catalyze the aminoacylation of tRNA by their cognate amino acid. Because of their central role in linking amino acids with nucleotide triplets contained in tRNAs, aminoacyl-tRNA synthetases are thought to be among the first proteins that appeared in evolution. The protein encoded by this gene belongs to class-I aminoacyl-tRNA synthetase family and is located in the class III region of the major histocompatibility complex (Entrez database).

[0072] Major histocompatibility complex, class II, DP beta 1. Major histocompatibility complex, class II, DP beta 1 is also known as OTTHUMG00000031076; HLA-DPB1; HLA-DPB1; DPB1; HLA-DP1 B; MHC DPB1. HLA-DPB belongs to the HLA class II beta chain paralogues. This class II molecule is a heterodimer consisting of an alpha (DPA) and a beta chain (DPB), both anchored in the membrane. It plays a central role in the immune system by presenting peptides derived from extracellular proteins. Class II molecules are expressed in antigen presenting cells (APC: B lymphocytes, dendritic cells, macrophages). The beta chain is approximately 26-28 kDa and its gene contains 6 exons. Exon one encodes the leader peptide, exons 2 and 3 encode the two extracellular domains, exon 4 encodes the transmembrane domain and exon 5 encodes the cytoplasmic tail. Within the DP molecule both the alpha chain and the beta chain contain the polymorphisms specifying the peptide binding specificities, resulting in up to 4 different molecules (Entrez database).

[0073] Major histocompatibility complex, class II, DR beta 5. Major histocompatibility complex, class II, DR beta 5 is also known as OTTHUMG00000031027; HLA-DRB5. HLA-DRB5 belongs to the HLA class II beta chain paralogues. This class II molecule is a heterodimer consisting of an alpha (DRA) and a beta (DRB) chain, both anchored in the membrane. It plays a central role in the immune system by presenting peptides derived from extracellular proteins. Class II molecules are expressed in antigen presenting cells (APC: B lymphocytes, dendritic cells, macrophages). The beta chain is approximately 26-28 kDa and its gene contains 6 exons. Exon one encodes the leader peptide, exons 2 and 3 encode the two extracellular domains, exon 4 encodes the transmembrane domain and exon 5 encodes the cytoplasmic tail. Within the DR molecule the beta chain contains all the polymorphisms specifying the peptide binding specificities. Typing for these polymorphisms is routinely done for bone marrow and kidney transplantation. DRB1 is expressed at a level five times higher than its paralogues DRB3, DRB4 and DRB5. The presence of DRB5 is linked with allelic variants of DRB1, otherwise it is omitted. There are 4 related pseudogenes: DRB2, DRB6, DRB7, DRB8 and DRB9 (Entrez database).

[0074] COL11A2. COL11A2 is also known as collagen, type XI, alpha 2; OTTHUMG00000031036; HKE5; PARP; STL3; DFNA13; DFNB53. This gene encodes one of the two alpha chains of type XI collagen, a minor fibrillar collagen. It is located on chromosome 6 very close to but separate from the gene for retinoid X receptor beta. Type XI collagen is a heterotrimer but the third alpha chain is a post-translationally modified alpha 1 type II chain. Proteolytic processing of this type XI chain produces PARP, a proline/arginine-rich protein that is an amino terminal domain. Mutations in this gene are associated with type III Stickler syndrome, otospondylomegaepiphyseal dysplasia (OSMED syndrome), Weissenbacher-Zweymuller syndrome, and autosomal dominant nonsyndromic sensorineural 13 deafness. Three transcript variants encoding different isoforms have been identified for this gene (Entrez database).

[0075] PRAME. PRAME is also known as melanoma antigen preferentially expressed in tumors; preferentially expressed antigen of melanoma or OPA-interacting protein 4 (OIP4 alias ENSG0000185686; MAPE). This gene encodes an antigen that is predominantly expressed in human melanomas and that is recognized by cytolytic T lymphocytes. It is not expressed in normal tissues, except testis. This expression pattern is similar to that of other CT antigens, such as MAGE, BAGE and GAGE. However, unlike these other CT antigens, this gene is also expressed in acute leukemias. Five alternatively spliced transcript variants encoding the same protein have been observed for this gene (Entrez database).

[0076] FBLN1. FBLN1 is also known as fibulin 1 or ENSG00000077942. Fibulin 1 is a secreted glycoprotein that becomes incorporated into a fibrillar extracellular matrix. Calcium-binding is apparently required to mediate its binding to laminin and nidogen. It mediates platelet adhesion via binding fibrinogen. Four splice variants which differ in the 3′ end have been identified. Each variant encodes a different isoform, but no functional distinctions have been identified among the four variants (Entrez database).

[0077] CYP2D6. CYP2D6 is also known as cytochrome P450, family 2, subfamily D, polypeptide 6 or ENSG00000100197 (alias CPD6; CYP2D; CYP2D@; CYP2DL1; P450C2D; P450-DB1; MGC120389; MGC120390). This gene encodes a member of the cytochrome P450 superfamily of enzymes. The cytochrome P450 proteins are monooxygenases which catalyze many reactions involved in drug metabolism and synthesis of cholesterol, steroids and other lipids. This protein localizes to the endoplasmic reticulum and is known to metabolize as many as 20% of commonly prescribed drugs. Its substrates include debrisoquine, an adrenergic-blocking drug; sparteine and propafenone, both anti-arrythmic drugs; and amitryptiline, an anti-depressant. The gene is highly polymorphic in the population; certain alleles result in the poor metabolizer phenotype, characterized by a decreased ability to metabolize the enzyme's substrates. The gene is located near two cytochrome P450 pseudogenes on chromosome 22q13.1. Alternatively spliced transcript variants encoding different isoforms have been found for this gene (Entrez database).

[0078] AC006548.8 (Vega gene ID). AC006548.8 (Vega gene ID) is also known as Em:AC006548.C22.8. This gene is similar to Em:AB018413 human Gab2 (According to Vega Report).

[0079] Homo sapiens cat eye syndrome critical region 3 (CECR3) gene. Homo sapiens cat eye syndrome critical region 3 (CECR3) gene (According to Vega Report) is also known as topoisomerase (DNA) III beta, OTTHUMG00000030764 or TOP3B. This gene encodes a DNA topoisomerase, an enzyme that controls and alters the topologic states of DNA during transcription. This enzyme catalyzes the transient breaking and rejoining of a single strand of DNA which allows the strands to pass through one another, thus relaxing the supercoils and altering the topology of DNA. The enzyme interacts with DNA helicase SGS1 and plays a role in DNA recombination, cellular aging and maintenance of genome stability. Alternative splicing of the C-terminus of this gene results in three transcript variants which have distinct tissue specificity; however, not all variants have been fully described (Entrez database).

[0080] KB-1269D1.3 (Vega gene ID). KB-1269D1.3 (Vega gene ID) is also known as OTTHUMG00000030694 or Em:AP000344.C22.3. It is similar to Tr:Q13312 human TXBP181 (According to Vega Report).

[0081] GPR24. GPR24 is also known as G protein-coupled receptor 24; ENSG00000128285; SLC1; MCHR1; MGC32129. The protein encoded by this gene, a member of the G protein-coupled receptor family 1, is an integral plasma membrane protein which binds melanin-concentrating hormone. The encoded protein can inhibit cAMP accumulation and stimulate intracellular calcium flux, and is probably involved in the neuronal regulation of food consumption. Although structurally similar to somatostatin receptors, this protein does not seem to bind somatostatin (Entrez database).

[0082] GAL3ST1 GAL3ST1 is also known as galactose-3-O-sulfotransferase 1; ENSG00000128242; CST. Sulfonation, an important step in the metabolism of many drugs, xenobiotics, hormones, and neurotransmitters, is catalyzed by sulfotransferases. The product of this gene is galactosylceramide sulfotransferase which catalyzes the conversion between 3′-phosphoadenylylsulfate+a galactosylceramide to adenosine 3′,5′-bisphosphate+galactosylceramide sulfate. Activity of this sulfotransferase is enhanced in renal cell carcinoma (Entrez database).

[0083] GSTT3-3 similar to Glutathione S-transferases (according to Vega Report). GSTT3-3 similar to Glutathione S-transferases (according to Vega Report) is also known as RP4-539M6.7 (Vega gene ID); OTTHUMG00000030918 or Em:AC004832.C22.7. It is similar to TR:Q9Y2Z7 Homo sapiens CGI-08 PROTEIN (according to Vega Report).

[0084] GALR3GALR3 is also known as galanin receptor 3 or ENSG00000128310. The neuropeptide galanin modulates a variety of physiologic processes including cognition/memory, sensory/pain processing, hormone secretion, and feeding behavior. The human galanin receptors are G protein-coupled receptors that functionally couple to their intracellular effector through distinct signaling pathways. GALR3 is found in many tissues and may be expressed as 1.4-, 2.4-, and 5-kb transcripts (Entrez database).

[0085] IL2RB. IL2RB is also known as interleukin 2 receptor, beta; ENSG00000100385 or P70-75. The interleukin 2 receptor, which is involved in T cell-mediated immune responses, is present in 3 forms with respect to ability to bind interleukin 2. The low affinity form is a monomer of the alpha subunit and is not involved in signal transduction. The intermediate affinity form consists of an alpha/beta subunit heterodimer, while the high affinity form consists of an alpha/beta/gamma subunit heterotrimer. Both the intermediate and high affinity forms of the receptor are involved in receptor-mediated endocytosis and transduction of mitogenic signals from interleukin 2. The protein encoded by this gene represents the beta subunit and is a type I membrane protein (Entrez database).

[0086] DGCR2. DGCR2 is also known as DiGeorge syndrome critical region gene 2; ENSG00000070413; IDD; LAN; DGS-C; SEZ-12; KIAA0163; DKFZp68611730. Deletions of the 22q11.2 have been associated with a wide range of developmental defects (notably DiGeorge syndrome, velocardiofacial syndrome, conotruncal anomaly face syndrome and isolated conotruncal cardiac defects) classified under the acronym CATCH 22. The DGCR2 gene encodes a novel putative adhesion receptor protein, which could play a role in neural crest cells migration, a process which has been proposed to be altered in DiGeorge syndrome (Entrez database).

[0087] TCN2. TCN2 is also known as transcobalamin II; macrocytic anemia; ENSG00000185339 (alias TC2; D22S676; D22S750). This gene encodes a member of the vitamin B12-binding protein family. This family of proteins, alternatively referred to as R binders, is expressed in various tissues and secretions. This plasma protein binds cobalamin and mediates the transport of cobalamin into cells. This protein and other mammalian cobalamin-binding proteins, such as transcobalamin I and gastric intrisic factor, may have evolved by duplication of a common ancestral gene (Entrez database).

[0088] IGLL1. IGLL1 is also known as immunoglobulin lambda-like polypeptide 1 or ENSG00000128322 (alias IGO; 14.1; IGL1; IGL5; IGLL; IGVPB; CD179b; VPREB2; IGLJ14.1). The preB cell receptor is found on the surface of proB and preB cells, where it is involved in transduction of signals for cellular proliferation, differentiation from the proB cell to the preB cell stage, allelic exclusion at the Ig heavy chain gene locus, and promotion of Ig light chain gene rearrangements. The preB cell receptor is composed of a membrane-bound Ig mu heavy chain in association with a heterodimeric surrogate light chain. This gene encodes one of the surrogate light chain subunits and is a member of the immunoglobulin gene superfamily. This gene does not undergo rearrangement. Mutations in this gene can result in B cell deficiency and agammaglobulinemia, an autosomal recessive disease in which few or no gamma globulins or antibodies are made. Two transcript variants encoding different isoforms have been found for this gene (Entrez database).

[0089] APOBEC3B. APOBEC3B is also known as apolipoprotein B mRNA editing enzyme, catalytic polypeptide-like 3B; ENSG00000179750 (alias ARP4; ARCD3; PHRBNL; APOBEC1L; FLJ21201; DJ742C19.2). This gene is a member of the cytidine deaminase gene family. It is one of seven related genes or pseudogenes found in a cluster, thought to result from gene duplication, on chromosome 22. Members of the cluster encode proteins that are structurally and functionally related to the C to U RNA-editing cytidine deaminase APOBEC1. It is thought that the proteins may be RNA editing enzymes and have roles in growth or cell cycle control (Entrez database).

[0090] CRYBB1. CRYBB1 is also known as crystallin, beta B1 or ENSG00000100122. Crystallins are separated into two classes: taxon-specific, or enzyme, and ubiquitous. The latter class constitutes the major proteins of vertebrate eye lens and maintains the transparency and refractive index of the lens. Since lens central fiber cells lose their nuclei during development, these crystallins are made and then retained throughout life, making them extremely stable proteins. Mammalian lens crystallins are divided into alpha, beta, and gamma families; beta and gamma crystallins are also considered as a superfamily. Alpha and beta families are further divided into acidic and basic groups. Seven protein regions exist in crystallins: four homologous motifs, a connecting peptide, and N- and C-terminal extensions. Beta-crystallins, the most heterogeneous, differ by the presence of the C-terminal extension (present in the basic group, none in the acidic group). Beta-crystallins form aggregates of different sizes and are able to self-associate to form dimers or to form heterodimers with other beta-crystallins. This gene, a beta basic group member, undergoes extensive cleavage at its N-terminal extension during lens maturation. It is also a member of a gene cluster with beta-A4, beta-B2, and beta-B3 (Entrez database).

[0091] CRYBA4. CRYBA4 is also known as crystallin, beta A4 or ENSG00000196431. Crystallins are separated into two classes: taxon-specific, or enzyme, and ubiquitous. The latter class constitutes the major proteins of vertebrate eye lens and maintains the transparency and refractive index of the lens. Since lens central fiber cells lose their nuclei during development, these crystallins are made and then retained throughout life, making them extremely stable proteins. Mammalian lens crystallins are divided into alpha, beta, and gamma families; beta and gamma crystallins are also considered as a superfamily. Alpha and beta families are further divided into acidic and basic groups. Seven protein regions exist in crystallins: four homologous motifs, a connecting peptide, and N- and C-terminal extensions. Beta-crystallins, the most heterogeneous, differ by the presence of the C-terminal extension (present in the basic group, none in the acidic group). Beta-crystallins form aggregates of different sizes and are able to self-associate to form dimers or to form heterodimers with other beta-crystallins. This gene, a beta acidic group member, is part of a gene cluster with beta-B1, beta-B2, and beta-B3 (Entrez database).

[0092] APOL4. APOL4 is also known as apolipoprotein L 4 or ENSG00000100336 (alias APOLIV; APOL-IV). The protein encoded by this gene is a member of the apolipoprotein L family and may play a role in lipid exchange and transport throughout the body, as well as in reverse cholesterol transport from peripheral cells to the liver. Two transcript variants encoding two different isoforms have been found for this gene. Only one of the isoforms appears to be a secreted protein (Entrez database).

[0093] SOX10. SOX10 is also known as SRY (sex determining region Y)-box 10 or ENSG00000100146 (alias DOM; WS4; MGC15649). This gene encodes a member of the SOX (SRY-related HMG-box) family of transcription factors involved in the regulation of embryonic development and in the determination of the cell fate. The encoded protein may act as a transcriptional activator after forming a protein complex with other proteins. This protein acts as a nucleocytoplasmic shuttle protein and is important for neural crest and peripheral nervous system development. Mutations in this gene are associated with Waardenburg-Shah and Waardenburg-Hirschsprung disease (Entrez database).

[0094] MGAT3. MGAT3 is also known as mannosyl (beta-1,4-)-glycoprotein beta-1,4-N-acetylglucosaminyltransferase or ENSG00000128268 (alias GNT3; GNT-III). There are believed to be over 100 different glycosyltransferases involved in the synthesis of protein-bound and lipid-bound oligosaccharides. N-acetylglucosaminyltransferase III transfers a GlcNAc residue to the beta-linked mannose of the trimannosyl core of N-linked oligosaccharides and produces a bisecting GlcNAc. Expression of this gene may be controlled by a multiple-promoter system (Entrez database).

[0095] RABL4. RABL4 is also known as RAB member of RAS oncogene family-like 4 or ENSG00000100360 (alias RAYL). This gene encodes a putative GTP-binding protein similar to RAY/RAB1C. The protein is ras-related, but the function is unknown (Entrez database).

[0096] SULT4A1. SULT4A1 is also known as sulfotransferase family 4A, member 1; or ENSG00000130540 (alias NST; BRSTL1; SULTX3; BR-STL-1; MGC40032; DJ388M5.3; hBR-STL-1). Sulfotransferase enzymes catalyze the sulfate conjugation of many hormones, neurotransmitters, drugs, and xenobiotic compounds. These cytosolic enzymes are different in their tissue distributions and substrate specificities. The gene structure (number and length of exons) is similar among family members. This gene encodes a protein that is selectively expressed in brain tissue (Entrez database).

[0097] RPL3. RPL3 is also known as ribosomal protein L3 or ENSG00000100316 alias (TARBP-B; MGC104284). Ribosomes, the complexes that catalyze protein synthesis, consist of a small 40S subunit and a large 60S subunit. Together these subunits are composed of 4 RNA species and approximately 80 structurally distinct proteins. This gene encodes a ribosomal protein that is a component of the 60S subunit. The protein belongs to the L3P family of ribosomal proteins and it is located in the cytoplasm. The protein can bind to the HIV-1 TAR mRNA, and it has been suggested that the protein contributes to tat-mediated transactivation. This gene is co-transcribed with several small nucleolar RNA genes, which are located in several introns of this gene. Alternate transcriptional splice variants, encoding different isoforms, have been characterized. As is typical for genes encoding ribosomal proteins, there are multiple processed pseudogenes of this gene dispersed through the genome (Entrez database).

[0098] APOL2. APOL2 is also known as apolipoprotein L, 2 or ENSG00000128335 (alias APOL-II). This gene is a member of the apolipoprotein L gene family. The encoded protein is found in the cytoplasm, where it may affect the movement of lipids or allow the binding of lipids to organelles. Two transcript variants encoding the same protein have been found for this gene (Entrez database).

[0099] RAC2. RAC2 is also known as ras-related C3 botulinum toxin substrate 2 (rho family, small GTP binding protein Rac2) or ENSG00000128340 (alias Gx; EN-7; HSPC022). The protein encoded by this gene is a GTPase which belongs to the RAS superfamily of small GTP-binding proteins. Members of this superfamily appear to regulate a diverse array of cellular events, including the control of cell growth, cytoskeletal reorganization, and the activation of protein kinases (Entrez database).

[0100] GABRR2. GABRR2 is also known as gamma-aminobutyric acid (GABA) receptor, rho 2 or ENSG00000111886. GABA is the major inhibitory neurotransmitter in the mammalian brain where it acts at GABA receptors, which are ligand-gated chloride channels. GABRR2 is a member of the rho subunit family (Entrez database).

[0101] MOG. MOG is also known as myelin oligodendrocyte glycoprotein or ENSG00000137345 (alias MGC26137). The product of this gene is a membrane protein expressed on the oligodendrocyte cell surface and the outermost surface of myelin sheaths. Due to this localization, it is a primary target antigen involved in immune-mediated demyelination. This protein may be involved in completion and maintenance of the myelin sheath and in cell-cell communication. Alternatively spliced transcript variants encoding different isoforms have been identified (Entrez database).

[0102] ME1. ME1 is also known as malic enzyme 1, NADP(+)-dependent, cytosolic or ENSG00000065833 (alias MES; HUMNDME). This gene encodes a cytosolic, NADP-dependent enzyme that generates NADPH for fatty acid biosynthesis. The activity of this enzyme, the reversible oxidative decarboxylation of malate, links the glycolytic and citric acid cycles. The regulation of expression for this gene is complex. Increased expression can result from elevated levels of thyroid hormones or by higher proportions of carbohydrates in the diet (Entrez database).

[0103] IL20RA. IL20RA is also known as interleukin 20 receptor, alpha or ENSG00000016402 (alias IL-20R1; ZCYTOR7). The protein encoded by this gene is a receptor for interleukin 20 (IL20), a cytokine that may be involved in epidermal function. The receptor of IL20 is a heterodimeric receptor complex consisting of this protein and interleukin 20 receptor beta (IL20B). This gene and IL20B are highly expressed in skin. The expression of both genes is found to be upregulated in Psoriasis (Entrez database).

[0104] ZHX3. ZHX3 is also known as zinc fingers and homeoboxes 3 or OTTHUMG00000032481 (alias TIX1; KIAA0395). This gene encodes a member of the zinc fingers and homeoboxes (ZHX) gene family. The encoded protein contains two C2H2-type zinc fingers and five homeodomains and forms a dimer with itself or with zinc fingers and homeoboxes family member 1. In the nucleus, the dimerized protein interacts with the A subunit of the ubiquitous transcription factor nuclear factor-Y and may function as a transcriptional repressor (Entrez database).

[0105] CHD6. CHD6 is also known as chromodomain helicase DNA binding protein 6 or ENSG00000124177 (alias CHD5; RIGB; KIAA1335). Chromosomal DNA of eukaryotic cells is compacted by nuclear proteins to form chromatin, an organized nucleoprotein structure that can inhibit gene expression. Several multisubunit protein complexes exist to remodel the chromatin to allow patterns of cell type-specific gene expression. The protein encoded by this gene is thought to be a core member of one or more of these complexes. The encoded protein, which is a member of the SNF2/RAD54 helicase family, contains two chromodomains, a helicase domain, and an ATPase domain (Entrez database).

[0106] PTPRG. PTPRG is also known as protein tyrosine phosphatase, receptor type, 6 or ENSG00000144724 (alias PTPG; HPTPG; RPTPG; R-PTP-GAMMA). The protein encoded by this gene is a member of the protein tyrosine phosphatase (PTP) family. PTPs are known to be signaling molecules that regulate a variety of cellular processes including cell growth, differentiation, mitotic cycle, and oncogenic transformation. This PTP possesses an extracellular region, a single transmembrane region, and two tandem intracytoplasmic catalytic domains, and thus represents a receptor-type PTP. The extracellular region of this PTP contains a carbonic anhydrase-like (CAH) domain, which is also found in the extracellular region of PTPRBETA/ZETA. This gene is located in a chromosomal region that is frequently deleted in renal cell carcinoma and lung carcinoma, thus is thought to be a candidate tumor suppressor gene (Entrez database).

[0107] PTPNS1. PTPNS1 is also known as protein tyrosine phosphatase, non-receptor type substrate 1 or ENSG00000198053 (alias BIT; MFR; P84; SIRP; MYD-1; SHPS1; SHPS-1; SIRPalpha; SIRPalpha2; SIRP-ALPHA-1). The protein encoded by this gene is a member of the signal-regulatory-protein (SIRP) family, and also belongs to the immunoglobulin superfamily. SIRP family members are receptor-type transmembrane glycoproteins known to be involved in the negative regulation of receptor tyrosine kinase-coupled signaling processes. This protein can be phosphorylated by tyrosine kinases. The phospho-tyrosine residues of this PTP have been shown to recruit SH2 domain containing tyrosine phosphatases (PTP), and serve as substrates of PTPs. This protein was found to participate in signal transduction mediated by various growth factor receptors. CD47 has been demonstrated to be a ligand for this receptor protein. This gene and its product share very high similarity with several other members of the SIRP family. These related genes are located in close proximity to each other on chromosome 20p13 (Entrez database).

[0108] PCSK2. PCSK2 is also known as proprotein convertase subtilisin/kexin type 2 or ENSG00000125851 (alias PC2; NEC2; SPC2). The protein encoded by this gene belongs to the subtilisin-like proprotein convertase family. The members of this family are proprotein convertases that process latent precursor proteins into their biologically active products. This encoded protein is a proinsulin-processing enzyme that plays a key role in regulating insulin biosynthesis. It is also known to cleave proopiomelanocortin, proenkephalin, prodynorphin and proluteinizing-hormone-releasing hormone. The use of alternate polyadenylation sites has been found for this gene (Entrez database).

[0109] PLAGL2. PLAGL2 is also known as pleiomorphic adenoma gene-like 2 or ENSG00000126003. It is a zinc-finger protein that recognizes DNA and/or RNA (Entrez database).

[0110] GGTL3. GGTL3 is also known as gamma-glutamyltransferase-like 3 or ENSG00000131067 (alias GGTL5; D20S101; dJ18C9.2). Gamma-glutamyltransferase is a membrane-associated protein involved in both the metabolism of glutathione and in the transpeptidation of amino acids. Changes in the activity of gamma-glutamyltransferase may signal preneoplastic or toxic conditions in the liver or kidney. The protein encoded by this gene is similar in sequence to gamma-glutamyltransferase, but its function is unknown. Multiple transcript variants encoding several different isoforms have been found for this gene (Entrez database).

[0111] EPB41L1. EPB41L1 is also known as erythrocyte membrane protein band 4.1-like 1 or ENSG00000088367 (alias KIAA0338; MGC11072). Erythrocyte membrane protein band 4.1 (EPB41) is a multifunctional protein that mediates interactions between the erythrocyte cytoskeleton and the overlying plasma membrane. The protein encoded by this gene is a neuronally-enriched protein that is structurally similar to EPB41. The encoded protein binds and stabilizes D2 and D3 dopamine receptors at the neuronal plasma membrane. Multiple transcript variants encoding different isoforms have been found for this gene, but the full-length nature of only two of them has been determined (Entrez database).

[0112] SDC4. SDC4 is also known as syndecan 4 (amphighlycan, ryudocan) or ENSG00000124145 (alias SYND4; MGC22217). The protein encoded by this gene is a transmembrane (type 1) heparan sulfate proteoglycan that functions as a receptor in intracellular signaling. The encoded protein is found as a homodimer and is a member of the syndecan proteoglycan family. This gene is found on chromosome 20, while a pseudogene has been found on chromosome 22 (Entrez database).

[0113] EYA2. EYA2 is also known as eyes absent homolog 2 (Drosophila) or ENSG00000064655 (alias EAB1; MGC10614). This gene encodes a member of the eyes absent (EYA) family of proteins. The encoded protein may be post-translationally modified and may play a role in eye development. A similar protein in mice can act as a transcriptional activator. Five transcript variants encoding three distinct isoforms have been identified for this gene (Entrez database).

[0114] USP18. USP18 is also known as ubiquitin specific peptidase 18 or OTTHUMG00000030949 (alias ISG43; UBP43). USP18, a member of the deubiquitinating protease family of enzymes, removes ubiquitin adducts from a broad range of protein substrates (supplied by OMIM).

[0115] BCR. BCR is also known as breakpoint cluster region or ENSG00000186716 (alias ALL; CML; PHL; BCR1; D22S11; D22S662). A reciprocal translocation between chromosomes 22 and 9 produces the Philadelphia chromosome, which is often found in patients with chronic myelogenous leukemia. The chromosome 22 breakpoint for this translocation is located within the BCR gene. The translocation produces a fusion protein which is encoded by sequence from both BCR and ABL, the gene at the chromosome 9 breakpoint. Although the BCR-ABL fusion protein has been extensively studied, the function of the normal BCR gene product is not clear. The protein has serine/threonine kinase activity and is a GTPase-activating protein for p21rac. Two transcript variants encoding different isoforms have been found for this gene (Entrez database).

[0116] MAPK8IP2. MAPK8IP2 is also known as mitogen-activated protein kinase 8 interacting protein 2 or ENSG00000008735 (alias IB2; JIP2; PRKM8IPL). The protein encoded by this gene is closely related to MAPK8IP1/IB1/JIP-1, a scaffold protein that is involved in the c-Jun amino-terminal kinase signaling pathway. This protein is expressed in brain and pancreatic cells. It has been shown to interact with, and regulate the activity of MAPK8/JNK1, and MAP2K7/MKK7 kinases. This protein thus is thought to function as a regulator of signal transduction by protein kinase cascade in brain and pancreatic beta-cells. Three alternatively spliced transcript variants of this gene encoding distinct isoforms have been reported (Entrez database).

[0117] MN1. MN1 is also known as meningioma (disrupted in balanced translocation) 1 or ENSG00000169184 (alias MGCR; MGCR1; MGCR1-PEN; dJ353E16.2). Meningioma 1 (MN1) contains two sets of CAG repeats. It is disrupted by a balanced translocation (4;22) in a meningioma, and its inactivation may contribute to meningioma 32 pathogenesis (Entrez database).

[0118] RTDR1. RTDR1 is also known as rhabdoid tumor deletion region gene 1 or ENSG00000100218 (alias MGC16968). This gene encodes a protein with no known function but with slight similarity to a yeast vacuolar protein. The gene is located in a region deleted in pediatric rhabdoid tumors of the brain, kidney and soft tissues, but mutations in this gene have not been associated with the disease (Entrez database).

[0119] Solute carrier family 35 member E4. Solute carrier family 35 member E4 is also known as SLC35E4.

[0120] Glycoprotein Ib (platelet) beta polypeptide. Glycoprotein Ib (platelet) beta polypeptide CTA-243E7.3. CTA-243E7.3 is also known as bK243E7.C22.3.

[0121] CT026_HUMAN. CT026_HUMAN is also known as C20orf26, dJ1178H5.4; DKFZP434K156.

[0122] HIST1H3A. HIST1H3A (histone; H3/A alias H3FA). Histones are basic nuclear proteins that are responsible for the nucleosome structure of the chromosomal fiber in eukaryotes. This structure consists of approximately 146 bp of DNA wrapped around a nucleosome, an octamer composed of pairs of each of the four core histones (H2A, H2B, H3, and H4). The chromatin fiber is further compacted through the interaction of a linker histone, H1, with the DNA between the nucleosomes to form higher order chromatin structures. This gene is intronless and encodes a member of the histone H3 family. Transcripts from this gene lack polyA tails; instead, they contain a palindromic termination element. This gene is found in the large histone gene cluster on chromosome 6p22-p21.3 (Entrez).

[0123] Sorting nexin 5. Sorting nexin 5 (SNX5 alias FLJ10931) is a member of the sorting nexin family. Members of this family contain a phox (PX) domain, which is a phosphoinositide binding domain, and are involved in intracellular trafficking. This protein binds to fanconi anemia complementation group A protein, but its function is unknown. This gene results in two transcript variants encoding the same protein (Entrez).

[0124] Thioredoxin reductase 2 mitochondrial precursor. Thioredoxin reductase 2 mitochondrial precursor (EC 1.8.1.9) (TR3,TR-beta) is also known as selenoprotein Z (SelZ) alias TXNRD2, TR, TR3, SELZ, TRXR2, TR-BETA. Thioredoxin reductase (TR) is a dimeric NADPH-dependent FAD containing enzyme that catalyzes the reduction of the active site disulfide of thioredoxin and other substrates. TR is a member of a family of pyridine nucleotide-disulfide oxidoreductases and is a key enzyme in the regulation of the intracellular redox environment. Three thioredoxin reductase genes have been found that encode selenocysteine containing proteins. Alternative splicing of this gene results in three distinct transcripts encoding different isoforms, one of which has been shown to be located in the mitochondria. This TR gene partially overlaps the COMT gene on chromosome 22.

[0125] RP11-554D15.1. RP11-554D15.1 is also known as bA554D15.1.

[0126] BAI1-associated protein 2-like 2. BAI1-associated protein 2-like 2 is also known as BAIAP2L2 or FLJ22582.

[0127] Smoothelin. Smoothelin (SMTN) encodes a structural protein that is found exclusively in contractile smooth muscle cells. It associates with stress fibers and constitutes part of the cytoskeleton. This gene is localized to chromosome 22q12.3, distal to the TUPLE1 locus and outside the DiGeorge syndrome deletion. Alternative splicing of this gene results in three transcript variants (Entrez database).

[0128] Cadherin-4 precursor. Cadherin-4 precursor (CDH4, CAD4, RCAD, FLJ22202, FLJ40547, MGC126700) is also known as cadherin 4 type 1, Retinal-cadherin or R-cadherin (R-CAD). This gene is a classical cadherin from the cadherin superfamily. The encoded protein is a calcium-dependent cell-cell adhesion glycoprotein comprised of five extracellular cadherin repeats, a transmembrane region and a highly conserved cytoplasmic tail. Based on studies in chicken and mouse, this cadherin is thought to play an important role during brain segmentation and neuronal outgrowth. In addition, a role in kidney and muscle development is indicated. Of particular interest are studies showing stable cis-heterodimers of cadherins 2 and 4 in cotransfected cell lines. Previously thought to interact in an exclusively homophilic manner, this is the first evidence of cadherin heterodimerization (Entrez database).

[0129] Forkhead box protein O3A. Forkhead box protein O3A (FOXO3A, AF6q21, FKHRL1, FKHRL1P2, MGC12739, MGC31925, DKFZp781A0677) belongs to the forkhead family of transcription factors which are characterized by a distinct forkhead domain. This gene likely functions as a trigger for apoptosis through expression of genes necessary for cell death. Translocation of this gene with the MLL gene is associated with secondary acute leukemia. Alternatively spliced transcript variants encoding the same protein have been observed (Entrez database).

[0130] N-acetyllactosaminide beta-1,6-N-acetylglucosaminyl-transferase. The enzyme n-acetyllactosaminide beta-1,6-N-acetylglucosaminyl-transferase (EC 2.4.1.150; GCNT2, II GCNT5, II IGNT, ULG3, AIGnT, BIGnT, CIGnT, GCNT5, NAGCT1, bA421M1.1, bA360019.2) is responsible for the formation of the blood group I antigen. The i and I antigens are determined by linear and branched poly-N-acetyllactosaminoglycans, respectively. During embryonic development in human erythrocytes, the fetal i antigen is replaced by the adult I antigen as the result of the appearance of a beta-1,6-N-acetylglucosaminyltransferase, the I-branching enzyme. This gene encodes the I-branching enzyme that converts the linear form into the branched form. Defects in this gene have been associated with adult i blood group phenotype. Several transcript variants encoding different isoforms have been described (Entrez database).

[0131] Gamma-aminobutyric-acid receptor rho-1 subunit precursor. Gamma-aminobutyric-acid receptor rho-1 subunit precursor (GABRR1) is also known as GABA(A) receptor. GABA is the major inhibitory neurotransmitter in the mammalian brain where it acts at GABA receptors, which are ligand-gated chloride channels. GABRR1 is a member of the rho subunit family (Entrez database).

[0132] OTTHUMG00000030167. OTTHUMG00000030167 is also known as CTA-243E7.3 (Vega gene ID) or bK243E7.C22.3.

[0133] OTTHUMG00000030870. OTTHUMG00000030870 is also known as CTA-503F6.1 (Vega gene ID) or bK503F6.C22.1.

[0134] OTTHUMG00000030991. OTTHUMG00000030991 is also known as LL22NC03-75B3.6 (Vega gene ID), dJ671O14.C22.6 or KIAA1644.

[0135] Pantetheinase precursor. Pantetheinase precursor (EC 3.5.1.-; VNN1 alias Tiff66; MGC116930; MGC116931; MGC116932; MGC116933) is a member of the Vanin family of proteins which share extensive sequence similarity with each other, and also with biotinidase. The family includes secreted and membrane-associated proteins, a few of which have been reported to participate in hematopoietic cell trafficking. No biotinidase activity has been demonstrated for any of the vanin proteins, however, they possess pantetheinase activity, which may play a role in oxidative-stress response. This protein, like its mouse homolog, is likely a GPI-anchored cell surface molecule. The mouse protein is expressed by the perivascular thymic stromal cells and regulates migration of T-cell progenitors to the thymus. This gene lies in close proximity to, and in same transcriptional orientation as two other vanin genes on chromosome 6q23-q24 (Entrez database).

[0136] Mitochondrial glutamate carrier 2. Mitochondrial glutamate carrier 2 is also known as Glutamate/H(+) symporter 2 (GC2) or Solute carrier family 25 member 18 (SLC25A18).

[0137] OTTHUMG00000015693. OTTHUMG00000015693 is also known as RP11-12A2.3 (Vega_gene ID) or bA12A2.3.

[0138] RP5-899B16.1. RP5-899B16.1 is also known as dJ899B16.1.

[0139] Nuclear receptor coactivator 7. Nuclear receptor coactivator 7 (NCOA7 alias ESNA1; ERAP140; MGC88425; Nbla00052; Nbla10993; dJ187J11.3).

[0140] Protein phosphatase 1 regulatory inhibitor subunit 16B. Protein phosphatase 1 regulatory inhibitor subunit 16B (PPP1R16B, KIAA0823) is also known as TGF-beta-inhibited membrane-associated protein (TIMAP, hTIMAP), CAAX box protein TIMAP or Ankyrin repeat domain protein 4 (ANKRD4). The protein encoded by this gene is membrane-associated and contains five ankyrin repeats, a protein phosphatase-1-interacting domain, and a carboxy-terminal CAAX box domain.

[0141] Synthesis of the encoded protein is inhibited by transforming growth factor beta-1. The protein may bind to the membrane through its CAAX box domain and may act as a signaling molecule through interaction with protein phosphatase-1.

[0142] Zinc finger protein SNAI1. Zinc finger protein SNAI1 is also known as Snail protein homolog or Sna protein (SNAI1 alias SNA; SNAH; SLUGH2; dJ710H13.1). The Drosophila embryonic protein snail is a zinc finger transcriptional repressor which downregulates the expression of ectodermal genes within the mesoderm. The nuclear protein encoded by this gene is structurally similar to the Drosophila snail protein, and is also thought to be critical for mesoderm formation in the developing embryo. At least two variants of a similar processed pseudogene have been found on chromosome 2 (Entrez database).

[0143] RP11-216C10.1. RP11-216C10.1 is a novel transcript.

[0144] XXbac-B444P24.7. XXbac-B444P24.7 also known as Em:AC006547.C22.7 is a novel transcript.

[0145] Reticulon 4 receptor precursor. Reticulon 4 receptor precursor is also known as Nogo receptor or Nogo-66 receptor (RTN4R alias NGR; NgR; NOGOR). This gene encodes the receptor for reticulon 4, oligodendrocyte myelin glycoprotein and myelin-associated glycoprotein. This receptor mediates axonal growth inhibition and may play a role in regulating axonal regeneration and plasticity in the adult central nervous system (Entrez database).

[0146] NFAT activation molecule 1 precursor. NFAT activation molecule 1 precursor is also known as Calcineurin/NFAT-activating ITAM-containing protein or NFAT activating protein with ITAM motif 1 (NFAM1 alias CNAIP; FLJ40652). The protein encoded by this gene is a type I membrane receptor that activates cytokine gene promoters such as the IL-13 and TNF-alpha promoters. The encoded protein contains an immunoreceptor tyrosine-based activation motif (ITAM) and is thought to regulate the signaling and development of B-cells (Entrez database).

[0147] RNA-binding protein Raly. RNA-binding protein Raly (hnRNP associated with lethal yellow homolog) D (RALY alias P542; MGC117312). In infectious mononucleosis, anti-EBNA-1 antibodies are produced which cross-react with multiple normal human proteins. The cross-reactivity is due to anti-gly/ala antibodies that cross-react with host proteins containing configurations like those in the EBNA-1 repeat. One such antigen is RALY which is a member of the heterogeneous nuclear ribonucleoprotein gene family (Entrez database).

[0148] Receptor-type tyrosine-protein phosphatase T precursor. Receptor-type tyrosine-protein phosphatase T precursor (EC 3.1.3.48; R-PTP-T alias RPTP-rho; PTPRT; RPTPrho; KIAA0283) also known as protein tyrosine phosphatase receptor type T is a member of the protein tyrosine phosphatase (PTP) family. PTPs are known to be signaling molecules that regulate a variety of cellular processes including cell growth, differentiation, mitotic cycle, and oncogenic transformation. This PTP possesses an extracellular region, a single transmembrane region, and two tandem intracellular catalytic domains, and thus represents a receptor-type PTP. The extracellular region contains a meprin-A5 antigen-PTP (MAM) domain, Ig-like and fibronectin type III-like repeats. The protein domain structure and the expression pattern of the mouse counterpart of this PTP suggest its roles in both signal transduction and cellular adhesion in the central nervous system. Two alternatively spliced transcript variants of this gene, which encode distinct proteins, have been reported (Entrez database).

[0149] RP11-191L9.1. RP11-191L9.1 is also known as bA191L9.C22.1.

[0150] RP11-410N8.3. RP11-410N8.3 is also known as bA410N8.3.

[0151] Lactosylceramide 4-alpha-galactosyltransferase. Lactosylceramide 4-alpha-galactosyltransferase (EC 2.4.1.228; A4GALT alias P1; PK; A14GALT; A4GALT1) catalyzes the transfer of galactose to lactosylceramide to form globotriaosylceramide, which has been identified as the P(k) antigen of the P blood group system. The encoded protein, which is a type II membrane protein found in the Golgi, is also required for the synthesis of the bacterial verotoxins receptor (Entrez database).

[0152] Histone H2A. Histone H2A (H1ST1H2AA alias H2AFR; bA317E16.2). Histones are basic nuclear proteins that are responsible for the nucleosome structure of the chromosomal fiber in eukaryotes. Nucleosomes consist of approximately 146 bp of DNA wrapped around a histone octamer composed of pairs of each of the four core histones (H2A, H2B, H3, and H4). The chromatin fiber is further compacted through the interaction of a linker histone, H1, with the DNA between the nucleosomes to form higher order chromatin structures. This gene is intronless and encodes a member of the histone H2A family. Transcripts from this gene contain a palindromic termination element (Entrez database).

[0153] Phosphatase and actin regulator 2. Phosphatase and actin regulator 2 is also known as PHACTR2 alias C6orf56; KIAA0680; DKFZp686F18175.

[0154] Pannexin-2. Pannexin-2 (PANX2 alias hPANX2; MGC119432) belongs to the innexin family. Innexin family members are the structural components of gap junctions. This protein and pannexin 1 are abundantly expressed in central nerve system (CNS) and are coexpressed in various neuronal populations. Studies in Xenopus oocytes suggest that this protein alone and in combination with pannexin 1 may form cell type-specific gap junctions with distinct properties (Entrez database).

[0155] Membrane protein MLC1. Membrane protein MLC1 (MLC1 alias VL; LVM; MLC; KIAA0027) has a sofar unknown function. However, homology to other proteins suggests that it may be an integral membrane transporter. Mutations in this gene have been associated with megalencephalic leukoencephalopathy with subcortical cysts, an autosomal recessive neurological disorder. Two transcript variants encoding the same protein but differing in the 5′ UTR have been noted for this gene (Entrez database).

[0156] RP11-318C17.1. RP11-318C17.1 is also known as bA318C17.1.

[0157] Immunoglobulin lambda constant 2. Immunoglobulin lambda constant 2 (IGLC2 alias IGLC; MGC20392; MGC45681) is also known as Ig light-chain partial Ke-Oz- polypeptide C-term or immunoglobulin lambda constant region 2 (Kern-Oz- marker).

[0158] Potassium voltage-gated channel Shab-related subfamily member 1. Potassium voltage-gated channel, Shab-related subfamily, member 1 (KCNB1 alias DRK1; KV2.1; h-DRK1). Voltage-gated potassium (Kv) channels represent the most complex class of voltage-gated ion channels from both functional and structural standpoints. Their diverse functions include regulating neurotransmitter release, heart rate, insulin secretion, neuronal excitability, epithelial electrolyte transport, smooth muscle contraction, and cell volume. Four sequence-related potassium channel genes—shaker, shaw, shab, and shal—have been identified in Drosophila, and each has been shown to have human homolog(s). This gene encodes a member of the potassium channel, voltage-gated, shab-related subfamily. This member is a delayed rectifier potassium channel and its activity is modulated by some other family members (Entrez database).

[0159] Serine/threonine-protein kinase 19. Serine/threonine-protein kinase 19 (EC 2.7.1.37; STK19 alias D6S60; D6S60E; HLA-RP1; MGC117388) is also known as RP1 protein (RP1) or G11 protein (G11). This gene encodes a serine/threonine kinase which localizes predominantly to the nucleus. Its specific function is unknown; it is possible that phosphorylation of this protein is involved in transcriptional regulation. This gene localizes to the major histocompatibility complex (MHC) class III region on chromosome 6 and expresses two transcript variants.

[0160] Tubulin alpha-8 chain. Tubulin alpha-8 chain is also known as Alpha-tubulin 8 (TUBA8 alias TUBAL2).

[0161] AP000357.3. AP000357.3 is also known as Em:AP000357.C22.3 and might be a pseudogene.

[0162] High mobility group protein HMG-I/HMG-Y. High mobility group protein HMG-I/HMG-Y (HMG-I(Y)) is also known as High mobility group AT-hook 1 or High mobility group protein A1 (HMGA1 alias HMG-R; HMGIY; MGC4242; MGC4854; MGC12816). This gene encodes a non-histone protein involved in many cellular processes, including regulation of inducible gene transcription, integration of retroviruses into chromosomes, and the metastatic progression of cancer cells. The encoded protein preferentially binds to the minor groove of A+T-rich regions in double-stranded DNA. It has little secondary structure in solution but assumes distinct conformations when bound to substrates such as DNA or other proteins. The encoded protein is frequently acetylated and is found in the nucleus. At least seven transcript variants encoding two different isoforms have been found for this gene (Entrez database).

[0163] Arylsulfatase A precursor. Arylsulfatase A precursor (EC 3.1.6.8; ASA) is also known as Cerebroside-sulfatase (contains: Arylsulfatase A component B; Arylsulfatase A component C) (ARSA alias MLD). The protein encoded by this gene hydrolyzes cerebroside sulfate to cerebroside and sulfate. Defects in this gene lead to metachromatic leucodystrophy (MLD), a progressive demyelination disease which results in a variety of neurological symptoms and ultimately death (Entrez database).

[0164] RP11-146I2.2. RP11-146I2.2 is also known as bA146I2.2.

[0165] Cold shock domain protein C2. Cold shock domain protein C2 is also known as RNA-binding protein PIPPin (CSDC2_HUMAN alias PIPPIN).

[0166] Chromosome 6 open reading frame 190. Chromosome 6 open reading frame 190 is also known as C6orf190; C6orf207; FLJ40584; bA325O24.3 or bA325O24.4.

[0167] Metalloproteinase inhibitor 3 precursor. Metalloproteinase inhibitor 3 precursor is also known as Tissue inhibitor of metalloproteinases-3 or MIG-5 protein (TIMP3 alias TIMP-3; SFD; K222; K222TA2; HSMRK222). This gene belongs to the TIMP gene family. The proteins encoded by this gene family are inhibitors of the matrix metalloproteinases, a group of peptidases involved in degradation of the extracellular matrix (ECM). Expression of this gene is induced in response to mitogenic stimulation and this netrin domain-containing protein is localized to the ECM. Mutations in this gene have been associated with the autosomal dominant disorder Sorsby's fundus dystrophy (Entrez database).

[0168] Protein C22orf13. Protein C22orf13 is also known as Protein LLN4 or CV013_HUMAN.

[0169] HARS2. HARS2 is also known as DUEB; C20orf88; MGC41905; MGC119131; bA379J5.3; bA555E18.1 and is probable a D-tyrosyl-tRNA(Tyr) deacylase (EC 3.1.-.-). The protein encoded by this gene is similar in sequence to histidyl-tRNA synthetase, which hydrolyzes D-tyrosyl-tRNA(Tyr) into D-tyrosine and free tRNA(Tyr). The encoded protein is found in the cytoplasm (Entrez database).

[0170] RP4-695O20_B.9. RP4-695O20_B.9 is also known as dJ695O20B.C22.9.

[0171] Cat eye syndrome critical region protein 1 precursor. Cat eye syndrome critical region protein 1 precursor (CECR1 alias IDGFL) is member of a subfamily of the adenosine deaminase protein family. The encoded protein may act as a growth factor and have adenosine deaminase activity. It may be responsible for some of the phenotypic features associated with cat eye syndrome. Two transcript variants encoding distinct isoforms have been identified for this gene (Entrez database).

[0172] Transcription factor 19. Transcription factor 19 is also known as Transcription factor SC1 (TCF19_HUMAN or SC1).

### SUMMARY OF THE INVENTION

[0173] The present invention provides novel and efficacious methods and nucleic acids for the classification of biological samples.

[0174] The subject matter of the invention has specific utility in the fields of medicine and/or molecular biology. In a particular aspect the utility of the present invention is to provide molecular markers and methods for the analysis thereof that may be considered an alternative to traditional histological or pathological analysis. Said molecular biological markers accordingly offer an alternative to current means such as staining and microscopic analysis.

[0175] In a particular aspect, the present invention is of particular use in determining the presence or absence of specific organ, tissue or cell types in a biological sample. Wherein said sample is heterogeneous in nature, the method according to the present invention may be used for the identification of a population or subpopulation of specific organs, tissue or cell types.

[0176] In a particular aspect, the present invention has further utility in the detection and/or classification of a cell proliferative disorder, for example but not limited to cancer.

[0177] In a particular aspect, the method of the present invention has a further alternative utility in the analysis of cellular differentiation, for example in the field of tissue engineering.

[0178] In a particular aspect, the invention solves this longstanding need in the art by providing genes, genomic sequences and/or regulatory regions thereof according to Table 1 (or to one or more of those), the expression thereof being indicative of the class of biological sample.

[0179] In a particularly preferred aspect, the methylation status of CpG positions of genes, genomic sequences and/or regulatory regions thereof according to Table 1 is used in the classification of a biological sample.

[0180] According to the invention, the provided markers, in particular the genes, genomic sequences, regulatory regions, and corresponding mRNAs, cDNAs, proteins or peptides have a particular utility in the following aspects. Thereby a single marker is used either alone or in combination with other marker or markers herein provided or not.

[0181] The herein provided markers have utility (i) for the characterization of the marker corresponding tissue or cell, (ii) for the identification of marker corresponding tissue or cell, (iii) for the isolation of marker corresponding tissue or cell, (iv) for the purification of the corresponding tissue or cell, or (v) combinations thereof. Therefore known methods, so far unreported methods, or combinations thereof are useable. Said application is useful in the field of research, diagnostics as well as therapeutics.

[0182] In addition, the herein provided markers have utility for the prospective profiling, retrospective profiling, or both of donors and/or recipients in organ transplantation procedures. The correct characterization, identification, or both of the donor and/or the recipient is mandatory during organ transplantation procedures to assure the success of the intervention. The use of the markers of the invention enables the profiling of both, donor and recipient, form which prospective or retrospective observations or conclusions about the feasibility of the procedure are drawn.

[0183] In addition, the herein provided markers have utility for histological, chemical and/or immunohistochemical analysis. Accordingly, they have utility in the fields of research as well as diagnostics, in particular for histological or pathological analysis.

[0184] In addition, the herein provided markers have utility for phylogenetic profiling of species or tissues.

[0185] The ontogenetic origin or the developmental lineage is then determined by comparison of the determined profiles.

[0186] In addition, the herein provided markers have utility for quality control of a genetically modified organism, tissue, group of cells or cell.

[0187] In addition, the herein provided markers have utility for controlling side effects in in vivo gene therapy procedures wherein genetically modified organism, tissue, group of cells or cell is used.

[0188] In addition, the herein provided markers have utility for the characterization, identification, or labelling of corresponding tissue or combinations thereof. This is of particular utility in the field of tissue bank storage and proliferation. Furthermore it has utility in a prospective as well as in a retrospective manner. The provided markers allow the individualization of samples by a precise molecular method. This is mandatory in storing biological material from patients or healthy individuals. In addition, this also advantageous for isolation or purification of tissues cells.

[0189] In addition, the herein provided markers have utility for controlling cell differentiation in stem-cell research and/or therapeutics. Cells undergo many genetic and/or epigenetic changes throughout differentiation. These changes influence the physiology of the cell and their control is mandatory in any procedure involving stem-cell in research and/or therapeutics. The provided markers allow to control this changes by giving a reference of the adult (completely differentiated) and embryonic (partially differentiated) status of the cells.

[0190] CD4+ and CD8+ lymphocytes: The herein provided markers of Table 8A and Table 9A have utility for the quantification of lymphocytes, in particular in peripheral blood. The said markers enable the identification of CD4+ and CD8+ lymphocytes among other cells in blood samples. A low number of leucocytes in blood (leucopenia) may indicate bone marrow failure (for example, due to infection, tumor, fibrosis); presence of cytotoxic substance; collagen-vascular diseases (such as lupus erythematosus); disease of the liver or spleen; or exposure to radiation. A high number of leucocytes in blood (leucocytosis) may indicate infectious diseases; inflammatory disease (such as rheumatoid arthritis or allergy); leukemia; severe emotional or physical stress; tissue damage (for example, burns); or anemia.

[0191] In addition, the herein provided markers of Table 8A and Table 9A have utility for the study of CD4 and/or CD8 T-lymphocyte infiltration in other tissues healthy or diseased. Infiltration of lymphocytes in healthy or diseased tissues is an indication of several diseases such immunological malignances or even in tumor development. The said markers represent a target for the development of molecular probes that coupled to any detection method (e.g. Fluorescent dye) allow the identification of these cells in histological preparations.

[0192] In addition, the herein provided markers of Table 8A and Table 9A have utility for identification, isolation and/or purification of CD4 T-lymphocytes and/or CD8 T-lymphocytes, in particular from surrounding tissue infiltrated by the T-lymphocytes; from blood; and/or from other body fluids.

[0193] In addition, the herein provided markers of Table 8A and Table 9A have utility for the identification of an individual. Thereby at least two samples are used. One sample is obtained from an individual and another sample is a forensic sample, in particular traces of body cells, tissues or fluids, for example but not limited to, traces of blood and/or body fluids. This is of particular utility in the field of forensic medicine or of legal medicine. As constituent of blood or body fluids, CD4 T-lymphocytes and CD8 T-lymphocytes are part of the mentioned traces. The said markers have the advantage of being stable over time because they are DNA based. In addition said markers have the advantage that they enable a highly detailed and accurate characterization of samples. Through this an unambiguous identification of an individual is enabled.

[0194] In addition, the herein provided markers of Table 8A and Table 9A have utility for diagnosing the presence or absence of a disease. Thereby the number of CD4 T-lymphocytes, CD8 T-lymphocytes or both is quantified in normalized samples of healthy individuals. The determined number of CD4 T-lymphocytes, CD8 T-lymphocytes or both are then considered as indicative for healthy condition or a diseased condition with respect to an individual. Preferably, large amount of normalized samples are considered to generate reference values of CD4 T-lymphocytes, CD8 T-lymphocytes or both for a healthy condition and/or for one or more diseased conditions. The diseased condition can be any kind of diseased condition. Preferably, the diseased condition is a disease which causes a immune reaction. For example but not limited to the diseased condition is a cancer disease, a cell proliferation disease, or HIV invection. Preferably the total number of cells present in a sample is determined. The number of CD4 T-lymphocytes, CD8 T-lymphocytes or both are then normalized to the total number of cells.

### Embryonic:

[0195] The herein provided markers of Table 8B, Table 8C, Table 9B and Table 9C have utility for the study, identification and/or quantification of fetal cells or fetal DNA circulating in maternal blood and/or amniotic fluid. During pregnancy cells and DNA from the fetus are continuously brought to the maternal blood stream as well as the amniotic fluid. Fetal cells and fetal DNA have a diagnostic potential in monitoring the health status of the fetus as reviewed by Bianchi D, 2004 (Bianchi D W. Circulating fetal DNA: its origin and diagnostic potential-a review. Placenta. 2004 April; 25 Suppl A:S93-S101).

[0196] In addition, the herein provided markers of Table 8B, Table 8C, Table 9B and Table 9C have utility for the study, identification and/or quantification of fetal cells or fetal DNA from amniocentesis and/or chorionic villus sampling. This is of particular utility in the field of prenatal diagnosis. Prenatal diagnosis procedures involve the study of fetal cells obtained by amniocentesis and chorionic villus biopsies.

### Skin:

[0197] The herein provided markers of Tables 8D, G, I and Tables 9D, F, H have utility for identifying individuals from traces of skin and/or adjacent tissues (such as hair, nail pieces, etc). This is of particular utility in forensic medicine and/or legal medicine. Skin or skin adjacent tissue is usually used as study material in forensic and legal medicine. The markers provided in Table 8G and 9F have a particular utility because of the following reason: Keratinocytes constitute the external layer of the skin and therefore are the first cell type to be de-attached and a high number of these cells is expected in skin traces. Variations of one marker alone or in combination with other markers herein provided or not enable the accurate assessment of identity.

[0198] In addition, the herein provided markers of Tables 8D, G, I and Tables 9D, F, H have utility for characterizing the skin, hair, nail, or adjacent tissue of an individual.

[0199] In addition, the herein provided markers of Tables 8D, G, I and Tables 9D, F, H have utility for determining the composition of the skin, hair, nail, or adjacent tissue of an individual. Said composition being dependent from the content of at least one of the three major constituting cell types of the skin (fibroblasts, keratinocytes and melanocytes).

[0200] In addition, the herein provided markers of Tables 8D, G, I and Tables 9D, F, H have utility in the field of drugs. They have particular utility for the development of drugs as well as for the treatment with drugs. The skin, hair, nail or adjacent tissue of an individual can be characterized by means of the provided markers of Tables 8D, G, I and Tables 9D, F, H. This information can then be used to develop new drugs or to access already existing drugs with regard to skin, hair, nail etc. of an individual or to subgroups of individuals. These subgroups are for example but not limited to be characterized by a disease and/or a defined type of skin or hair, etc. The efficiency of said drugs i.e. the presence or absence of the desired effect is also characterized or monitored by means of the provided markers of Tables 8D, G, I and Tables 9D, F, H.

[0201] In addition, the herein provided markers of Tables 8D, G, I and Tables 9D, F, H have utility as prognostic and/or diagnostic markers for wound healing, in particular in the field of surgery procedures wherein the skin is affected.

### Liver:

[0202] The herein provided markers of Tables 8H and Tables 9G have utility for deducing the presence of absence of an event which affects the liver. For example but not limited to it, said event is at least one select from the group comprising liver cirrhosis; liver cancer; hepatitis A; hepatitis B; hepatitis C; healthy condition, recently or longer chemical, physical or biological exposure; recently or longer exposure to a drug, or alcohol; or treatment procedures. In the case the event is adverse, said event affecting the liver leads to the death of liver cells. In the case the event is benign, said event leads to a reduction of liver cell death. The genomic DNA of dead liver cells can then be found in the body fluids in particular in the blood of a affected individual.

[0203] In addition, the herein provided markers of Tables 8H and Tables 9G have utility for deducing the sensitivity of an individual to alcohol. Alcohol consumption may change the DNA methylation status as reviewed by Poschl et al, 2004 (Poschl G, Stickel F, Wang X D, Seitz H K. Alcohol and cancer: genetic and nutritional aspects. Proc Nutr Soc. 2004 February; 63(1):65-71.).

### Heart Muscle:

[0204] The herein provided markers of Tables 8E, Table 8F and Tables 9E have utility for deducing the presence of absence of an event or condition affecting the heart. For example but not limited to it, said event or condition is at least one select from the group comprising heart failure; heart attack; athletic capacity; healthy condition; recently or longer chemical, physical or biological exposure; recently or longer exposure to a drug; or treatment procedure. In the case the event is adverse, said event or condition affecting the heart leads to death of heart cells. In the case the event is benign, said event leads to a reduction of heart cell death. The genomic DNA of dead heart cells can then be found in the body fluids in particular in the blood of an affected individual.

### Placenta:

[0205] The herein provided markers of Table 8J and Table 9I have utility for the study, monitoring, identification and/or quantification of placental cells or placental DNA circulating in maternal blood and/or amniotic fluid. In this respect, the said markers have also utility for the isolation or purification of placental cell or placental genomic DNA. Placenta constitute an extra-embryonic fetal tissue and as such, it shares many genetic characteristics with the fetal tissue. Therefore, cells from the placenta as well as DNA from placental cells can surrogate fetal cells and fetal DNA for diagnostic means. Fetal cells and fetal DNA have a diagnostic potential in monitoring the health status of the fetus as reviewed by Bianchi D, 2004 (Bianchi D W. Circulating fetal DNA: its origin and diagnostic potential-a review. Placenta. 2004 April; 25 Suppl A:S93-S101). During pregnancy placenta cells are de-attached and brought to the maternal blood stream as well as the amniotic fluid.

[0206] In addition, the herein provided markers of Table 8J and Table 9I have utility for the monitoring of embryonic development or the monitoring of placental development, in particular of extra-embryonic tissue or of interaction of extra-embryonic tissue with maternal placental tissue.

[0207] In addition, the herein provided markers of Table 8J and Table 9I have utility for the study, monitoring, identification and/or quantification of placental cells in regenerative medicine, in particular in the field of tissue engineering. Corresponding methods for the study, monitoring, identification and/or quantification of placental cells are applied in particular before and after storage, before and after cell differentiation, before and after cell proliferation, before and after cell culture expansion, and before and after tissue expansion as well as before and after transplantation.

### Sperm:

[0208] The herein provided markers of Table 8L have utility for diagnosing a male infertility related disease. A major cause of male infertility is either a low amount of sperm cells (spermatozoa) in the ejaculate (oligospermia) or a complete lack of sperm cells (spermatozoa) in the ejaculate (azoospermia). Thus, methods for the quantification of sperm cells are widely useable in diagnosing male infertility.

[0209] In addition, the herein provided markers of Table 8L have utility as a tool to access the viability of the sperm cells.

[0210] In addition, the herein provided markers of Table 8L have utility for increasing the fertility of a male individual. As said above male fertility is often limited by the amount of sperm cells in the ejaculate. Thus, male fertility can be enhanced by enriching, isolating or purifying sperm cells.

[0211] In addition, the herein provided markers of Table 8L have utility for assisted fertilization procedures. Assisted fertilization procedures are for example but not limited to intracytoplasmic sperm injection (ICSI) or in vitro fertilization (IVF). All assisted fertilization procedures require the management of sperm cells prior to the procedure. Such management comprises at least the characterization, identification, quantification, enrichment, isolation, purification of sperm cells or combinations thereof.

[0212] In addition, the herein provided markers of Table 8L have utility in the fields of forensic and/or legal medicine. By use of the said markers it is possible to determine the presence or absence of sperm in a sample. Furthermore, it is possible to identify an individual by use of said markers.

### Skeletal Muscle:

[0213] The herein provided markers of Table 8F, 8K and Table 9J have utility for characterizing the efficiency of skeletal muscle cells. This utility is of particular value in the field of sports medicine.

[0214] In addition, the herein provided markers of Table 8F, 8K and Table 9J have utility for identifying fully differentiated muscle cells in cell culture. This is of particular utility in the field of tissue engineering. Muscle cells are generate in cell culture by cultivation and differentiation of muscle cell progenitor cells. Fully differentiated skeletal muscle cells can be identified by means of the provided markers of Table 8F, 8K and Table 9J.

[0215] In addition, the herein provided markers of Table 8F, 8K and Table 9J have utility for diagnosing muscle cell associated diseases, in particular disease which are characterized by a death of muscle cells like muscular distrophy. The DNA of dead muscle cells is found in body fluids such as blood or urine. This DNA can be identified by means of the herein provided markers of Table 8F, 8K and Table 9J.

### CD8 T-Lymphocytes:

[0216] The herein provided markers of Table 8A specific only for CD8 T-lymphocytes have utility for quantifying CD8 T-lymphocytes, in particular for monitoring the immune system of individuals infected with HIV. The periodically determining of the number of CD8 T-lymphocytes for patients infected with HIV is a standard procedure in the art. It is necessary to decide whether and when a drug or treatment is necessary, whether a drug or treatment is still effective, and which drug or treatment can be selected. The said is necessary with respect to the HIV infection itself but also with respect to secondary infection.

### CD4+ Lymphocytes:

[0217] The herein provided markers of Table 8A specific only for CD4 T-lymphocytes have utility for quantifying CD4 T-lymphocytes, in particular for monitoring the immune system of individuals infected with HIV. The periodically determining of the number of CD4 T-lymphocytes for patients infected with HIV is a standard procedure in the art. It is necessary to decide whether and when a drug or treatment is necessary, whether a drug or treatment is still effective, and which drug or treatment can be selected. The said is necessary with respect to the HIV infection itself but also with respect to secondary infection.

[0218] It is particularly preferred that said biological sample is classified according to at least one parameter selected from the group consisting of the cell, organ or tissue type of said biological sample or features thereof such as disease state.

[0219] To enable this analysis the invention provides a method for the analysis of biological samples for genomic methylation associated with the classification of biological samples. Said method is characterized in that at least one nucleic acid, or a fragment thereof, from the group consisting of SEQ ID NO: 413 to SEQ ID NO: 824 is/are contacted with a reagent or series of reagents capable of distinguishing between methylated and non methylated CpG dinucleotides within the genomic sequence, or sequences of interest.

[0220] It is particularly preferred that the method and nucleic acids according to the invention are utilised for at least one of histological analysis, pathological analysis, detection and/or characterization of cell proliferative disorders and monitoring of cellular or tissue differentiation.

[0221] The DNA source may be any suitable source. Preferably, the source of the DNA sample is selected from the group consisting of cells or cell lines, histological slides, biopsies, surgical samples, tissue samples, body fluids, sputum, stool, nipple aspirate, cerebrospinal fluid, ejaculate, urine, serum, plasma, whole blood, saliva, fluids from the pleural or peritoneal cavity, cerebrospinal fluid or a smear from a epithelial surface and combinations thereof.

[0222] Furthermore, said sample may be fresh or archived and can be treated by any means standard in the art, for example but not limited to fresh-frozen, paraffin-embedded or formalin-fixed sample.

[0223] Specifically, the present invention provides a method for classifying a biological sample, comprising: obtaining a biological sample comprising genomic nucleic acid(s); contacting the nucleic acid(s), or a fragment thereof, with one reagent or a plurality of reagents sufficient for distinguishing between methylated and non methylated CpG dinucleotide sequences within a target sequence of the subject nucleic acid, wherein the target sequence comprises, or hybridizes under stringent conditions to, a sequence comprising at least 16 contiguous nucleotides of a gene or genomic sequence selected from Table 1 said contiguous nucleotides comprising at least one CpG dinucleotide sequence; and determining, based at least in part on said distinguishing, the methylation state of at least one target CpG dinucleotide sequence, or an average, or a value reflecting an average methylation state of a plurality of target CpG dinucleotide sequences. Preferably said target sequences are selected from Table 3, which provides particularly preferred regions of the sequences of Table 1. Preferably, distinguishing between methylated and non methylated CpG dinucleotide sequences within the target sequence comprises methylation state-dependent conversion or non-conversion of at least one such CpG dinucleotide sequence to the corresponding converted or non-converted dinucleotide sequence within a sequence selected from the equivalent converted sequence selected from Table 1, and contiguous regions thereof corresponding to the target sequence. It is further preferred that said converted sequences are selected from Table 3, which provides particularly preferred regions of the genes according to Table 1 (converted sequences thereof provided in Table 2).

[0224] Additional embodiments provide a method for the classification of a biological sample, comprising: obtaining a biological sample having subject genomic DNA; extracting the genomic DNA; treating the genomic DNA, or a fragment thereof, with one or more reagents to convert 5-position unmethylated cytosine bases to uracil or to another base that is detectably dissimilar to cytosine in terms of hybridization properties; contacting the treated genomic DNA, or the treated fragment thereof, with an amplification enzyme and at least two primers comprising, in each case a contiguous sequence at least 9 nucleotides in length that is complementary to, or hybridizes under moderately stringent or stringent conditions to a converted sequence selected from Table 1 and complements thereof, wherein the treated DNA or the fragment thereof is either amplified to produce an amplificate, or is not amplified; and determining, based on a presence or absence of, or on a property of said amplificate, the methylation state of at least one CpG dinucleotide sequence of a gene or genomic sequence selected form Table 1, or an average, or a value reflecting an average methylation state of a plurality of CpG dinucleotide sequences thereof.

[0225] Preferably, determining comprises use of at least one method selected from the group consisting of: hybridizing at least one nucleic acid molecule comprising a contiguous sequence at least 9 nucleotides in length that is complementary to, or hybridizes under moderately stringent or stringent conditions to a converted sequence selected from Table 2 and complements thereof, hybridizing at least one nucleic acid molecule, bound to a solid phase, comprising a contiguous sequence at least 9 nucleotides in length that is complementary to, or hybridizes under moderately stringent or stringent conditions to a converted sequence selected from Table 2, and complements thereof; hybridizing at least one nucleic acid molecule comprising a contiguous sequence at least 9 nucleotides in length that is complementary to, or hybridizes under moderately stringent or stringent conditions to a sequence selected from a converted sequence selected from Table 2 (SEQ ID NO: 1650 to SEQ ID NO: 4120), and complements thereof, and extending at least one such hybridized nucleic acid molecule by at least one nucleotide base; and sequencing of the amplificate.

[0226] Further embodiments provide a method for classifying a biological sample, comprising: obtaining a biological sample having subject genomic DNA; extracting the genomic DNA; contacting the genomic DNA, or a fragment thereof, comprising one or more sequences selected from the group consisting of SEQ ID NO: 413 to SEQ ID NO: 824 or a sequence that hybridizes under stringent conditions thereto, with one or more methylation-sensitive restriction enzymes, wherein the genomic DNA is either digested thereby to produce digestion fragments, or is not digested thereby; and determining, based on a presence or absence of, or on property of at least one such fragment, the methylation state of at least one CpG dinucleotide sequence of one or more sequences selected from the group consisting of SEQ ID NO: 413 to SEQ ID NO: 824, or an average, or a value reflecting an average methylation state of a plurality of CpG dinucleotide sequences thereof. Preferably, the digested or undigested genomic DNA is amplified prior to said determining.

[0227] Additional embodiments provide novel genomic and chemically modified nucleic acid sequences, as well as oligonucleotides and/or PNA-oligomers for analysis of cytosine methylation patterns within sequences from the group consisting of SEQ ID NO: 413 to SEQ ID NO: 824.

### BRIEF DESCRIPTION OF THE DRAWINGS

[0228] FIG. 1.1 to 1.403 provide the results of bisulphite sequencing as carried out in Example 2. Each individual matrix represents the sequencing data for an individual amplificate. Each of the discrete blocks of the matrix represent a single sample type and are labeled ‘A’ through ‘L’, said letters representing in each case the following tissue/cell types: A: Melanocytes; B: Heart Muscle: C: Skeletal muscle; D: Liver; E: Sperm; F: Embryonic skeletal muscle; G: Embryonic liver; H: Placental; I: Fibroblast; J: Keratinocytes; K: CD8; L: CD4. The SEQ ID NO: of the genomic region of each amplificate is shown to the left of the matrices. This may be cross referenced in Table 4 to determine the amplificate and primer sequences. Each row of a matrix represents a single CpG site within the amplificate (according to the corresponding SEQ ID NO: from Table 4) and is numbered accordingly, each column represents a single pooled DNA sample. The degree of methylation is represented by the shade of each position within the column from black representing 100% methylation to light gray representing 0% methylation. White positions represented a measurement for which no data was available.

[0229] FIG. 2: Example of RT-PCR results. Studied samples are arranged in columns and genes in rows. High DNA methylation correlates with gene silencing in MYO18B, SLC22A1 and PLG. SERPINB5 expression has been previously reported as silenced by DNA methylation (Futscher et al, 2002). ACTIN B1 is a housekeeping gene and its expression in all analyzed samples confirms the feasibility of the assay. + Control is the amplification of cDNA produced from a pool of total RNAs from several tissues. − RT is a negative control, where no reverse transcriptase was added to the cDNA synthesis reaction.

### DETAILED DESCRIPTION OF THE INVENTION

### Definitions

[0230] As used herein the term “classification” shall be taken to mean the action or process of categorising an object according to pre-determined parameters. Said categorization may be performed by humans means or by means of a computer or computer implemented means. It is particularly preferred that said parameters are phenotypic parameters, accordingly it is particularly preferred that said categorization is the assignment of a biological sample to a particular phenotypic class. In one embodiment of the method said phenotypic parameter or class is selected from the group consisting cell type, organ type, tissue type and disease status.

[0231] As used herein the term “expression” shall be taken to mean the transcription and translation of a gene. The level of expression of a gene may be determined by the analysis of any factors associated with or indicative of the level of transcription and translation of a gene including but not limited to methylation analysis, loss of heterozygosity (hereinafter also referred to as LOH), RNA expression levels and protein expression levels.

[0232] Furthermore the activity of the transcribed gene may be affected by genetic variations such as but not limited genetic mutations (including but not limited to SNPs, point mutations, deletions, insertions, repeat length, rearrangements and other polymorphisms).

[0233] The term “Observed/Expected Ratio” (“O/E Ratio”) refers to the frequency of CpG dinucleotides within a particular DNA sequence, and corresponds to the [number of CpG sites/(number of C bases×number of G bases)].

[0234] The term “CpG island” refers to a contiguous region of genomic DNA that satisfies the criteria of (1) having a frequency of CpG dinucleotides corresponding to an “Observed/Expected Ratio” >0.6, and (2) having a “GC Content” >0.5. CpG islands are typically, but not always, between about 0.2 to about 1 kb, or to about 2 kb in length.

[0235] The term “methylation state” or “methylation status” refers to the presence or absence of 5-methylcytosine (“5-mCyt”) at one or a plurality of CpG dinucleotides within a DNA sequence. Methylation states at one or more particular CpG methylation sites (each having two CpG dinucleotide sequences) within a DNA sequence include “unmethylated,” “fully-methylated” and “hemi-methylated.”

[0236] The term “methylation level” or “level of methylation” refers to the degree of 5-methylcytosine (“5-mCyt”) at one or a plurality of CpG dinucleotides within a DNA sequence wherein one or more DNA molecules are considered.

[0237] The term “hemi-methylation” or “hemimethylation” refers to the methylation state of a palindromic CpG methylation site, where only a single cytosine in one of the two CpG dinucleotide sequences of the palindromic CpG methylation site is methylated (e.g., 5′-CC^{M}GG-3′ (top strand): 3′-GGCC-5′ (bottom strand)).

[0238] The term ‘AUC’ as used herein is an abbreviation for the area under a curve. In particular it refers to the area under a Receiver Operating Characteristic (ROC) curve. The ROC curve is a plot of the true positive rate against the false positive rate for the different possible cutpoints of a diagnostic test. It shows the tradeoff between sensitivity and specificity depending on the selected cutpoint (any increase in sensitivity will be accompanied by a decrease in specificity). The area under an ROC curve (AUC) is a measure for the accuracy of a diagnostic test (the larger the area the better, optimum is 1, a random test would have a ROC curve lying on the diagonal with an area of 0.5; for reference: J. P. Egan. Signal Detection Theory and ROC Analysis, Academic Press, New York, 1975). The term “hypermethylation” refers to the average methylation state corresponding to an increased presence of 5-mCyt at one or a plurality of CpG dinucleotides within a DNA sequence of a test DNA sample, relative to the amount of 5-mCyt found at corresponding CpG dinucleotides within a normal control DNA sample.

[0239] The term “hypomethylation” refers to the average methylation state corresponding to a decreased presence of 5-mCyt at one or a plurality of CpG dinucleotides within a DNA sequence of a test DNA sample, relative to the amount of 5-mCyt found at corresponding CpG dinucleotides within a normal control DNA sample.

[0240] The term “microarray” refers broadly to both “DNA microarrays,” and ‘DNA chip(s),’ as recognized in the art, encompasses all art-recognized solid supports, and encompasses all methods for affixing nucleic acid molecules thereto or synthesis of nucleic acids thereon.

[0241] “Genetic parameters” are mutations and polymorphisms of genes and sequences further required for their regulation. To be designated as mutations are, in particular, insertions, deletions, point mutations, inversions and polymorphisms and, particularly preferred, SNPs (single nucleotide polymorphisms).

[0242] “Epigenetic parameters” are, in particular, cytosine methylations. Further epigenetic parameters include, for example, the acetylation of histones which, however, cannot be directly analyzed using the described method but which, in turn, correlate with the DNA methylation.

[0243] The term “bisulfite reagent” refers to a reagent comprising bisulfite, disulfite, hydrogen sulfite or combinations thereof, useful as disclosed herein to distinguish between methylated and unmethylated CpG dinucleotide sequences.

[0244] The term “Methylation assay” refers to any assay for determining the methylation state of one or more CpG dinucleotide sequences within a sequence of DNA.

[0245] The term “MS.AP-PCR” (Methylation-Sensitive Arbitrarily-Primed Polymerase Chain Reaction) refers to the art-recognized technology that allows for a global scan of the genome using CG-rich primers to focus on the regions most likely to contain CpG dinucleotides, and described by Gonzalgo et al., Cancer Research 57:594-599, 1997.

[0246] The term “MethyLight™” refers to the art-recognized fluorescence-based real-time PCR technique described by Eads et al., Cancer Res. 59:2302-2306, 1999.

[0247] The term “HeavyMethyl™” assay, in the embodiment thereof implemented herein, refers to an assay, wherein methylation specific blocking probes (also referred to herein as blockers) covering CpG positions between, or covered by the amplification primers enable methylation-specific selective amplification of a nucleic acid sample.

[0248] The term “HeavyMethyl™ MethyLight™” assay, in the embodiment thereof implemented herein, refers to a HeavyMethyl™ MethyLight™ assay, which is a variation of the MethyLight™ assay, wherein the MethyLight™ assay is combined with methylation specific blocking probes covering CpG positions between the amplification primers.

[0249] The term “Ms-SNuPE” (Methylation-sensitive Single Nucleotide Primer Extension) refers to the art-recognized assay described by Gonzalgo and Jones, Nucleic Acids Res. 25:2529-2531, 1997.

[0250] The term “MSP” (Methylation-specific PCR) refers to the art-recognized methylation assay described by Herman et al. Proc. Natl. Acad. Sci. USA 93:9821-9826, 1996, and by U.S. Pat. No. 5,786,146.

[0251] The term “COBRA” (Combined Bisulfite Restriction Analysis) refers to the art-recognized methylation assay described by Xiong and Laird, Nucleic Acids Res. 25:2532-2534, 1997.

[0252] The term “MCA” (Methylated CpG Island Amplification) refers to the methylation assay described by Toyota et al., Cancer Res. 59:2307-12, 1999, and in WO 00/26401A1.

[0253] The term “hybridization” is to be understood as a bond of an oligonucleotide to a complementary sequence along the lines of the Watson-Crick base pairings in the sample DNA, forming a duplex structure.

[0254] “Stringent hybridization conditions,” as defined herein, involve hybridizing at 68° C. in 5×SSC/5×Denhardt's solution/1.0% SDS, and washing in 0.2×SSC/0.1% SDS at room temperature, or involve the art-recognized equivalent thereof (e.g., conditions in which a hybridization is carried out at 60° C. in 2.5×SSC buffer, followed by several washing steps at 37° C. in a low buffer concentration, and remains stable). Moderately stringent conditions, as defined herein, involve including washing in 3×SSC at 42° C., or the art-recognized equivalent thereof. The parameters of salt concentration and temperature can be varied to achieve the optimal level of identity between the probe and the target nucleic acid. Guidance regarding such conditions is available in the art, for example, by Sambrook et al., 1989, Molecular Cloning, A Laboratory Manual, Cold Spring Harbor Press, N.Y.; and Ausubel et al. (eds.), 1995, Current Protocols in Molecular Biology, (John Wiley and Sons, N.Y.) at Unit 2.10.

[0255] The term polypeptide as used hereunder shall be taken to encompass all peptides, proteins and/or fragments thereof.

### Overview:

[0256] The present invention provides for molecular genetic markers that have novel utility for the classification of biological samples. In particular embodiments classification is according to at least one parameter selected from the group consisting cell type, organ type, tissue type and disease status. It is particularly preferred that the method and nucleic acids according to the invention are utilized for at least one of histological analysis, pathological analysis, detection and/or characterization of cell proliferative disorders and monitoring of cellular or tissue differentiation.

[0257] In a particularly preferred embodiment the invention provides a method for the classification of biological samples, comprising the following steps:

a) determining the expression levels of one or more genes or gene sequences according to Table 1 and/or regulatory regions thereof; and
b) classifying said biological sample according to said expression status. Said expression level may be determined by any means standard in the art including but not limited to methylation analysis, loss of heterozygosity (hereinafter also referred to as LOH), RNA expression levels and protein expression levels.

[0258] Accordingly, said method may be enabled by means of any analysis of the expression of a RNA transcribed therefrom or polypeptide or protein translated from said RNA, preferably by means of mRNA expression analysis or polypeptide expression analysis. Accordingly the present invention also provides classification assays and methods, both quantitative and qualitative for detecting the expression of the genes, genomic sequences and/or regulatory regions according to Table 1 and providing therefrom a classification of said biological sample.

[0259] Expression of mRNA transcribed from the genes or genomic regions according to Table 1, are associated with specific organ and cell types.

[0260] To detect the presence of mRNA encoding a gene or genomic sequence, a sample is obtained from a patient. The sample may be any suitable sample comprising cellular matter of the tumor, most preferably the primary tumor. Suitable sample types include cells or cell lines, histological slides, biopsies, paraffin-embedded tissue, bodily fluids, sputum, stool, nipple aspirate, cerebrospinal fluid, ejaculate, urine, blood or any other suitable biological sample and all possible combinations thereof.

[0261] The sample may be treated to extract the RNA contained therein. The resulting nucleic acid from the sample is then analyzed. Many techniques are known in the state of the art for determining absolute and relative levels of gene expression, commonly used techniques suitable for use in the present invention include in situ hybridization (e.g. FISH), Northern analysis, RNase protection assays (RPA), microarrays and PCR-based techniques, such as quantitative PCR and differential display PCR or any other nucleic acid detection method.

[0262] Particularly preferred is the use of the reverse transcription/polymerisation chain reaction technique (RT-PCR). The method of RT-PCR is well known in the art (for example, see Watson and Fleming, supra).

[0263] The RT-PCR method can be performed as follows. Total cellular RNA is isolated by, for example, the standard guanidium isothiocyanate method and the total RNA is reverse transcribed. The reverse transcription method involves synthesis of DNA on a template of RNA using a reverse transcriptase enzyme and a 3′ end oligo dT primer and/or random hexamer primers. The cDNA thus produced is then amplified by means of PCR. (Belyavsky et al, Nucl Acid Res 17:2919-2932, 1989; Krug and Berger, Methods in Enzymology, Academic Press, N.Y., Vol. 152, pp. 316-325, 1987 which are incorporated by reference). Further preferred is the “Real-time” variant of RT-PCR, wherein the PCR product is detected by means of hybridization probes (e.g. TaqMan, Lightcycler, Molecular Beacons and Scorpion) or SYBR green. The detected signal from the probes or SYBR green is then quantified either by reference to a standard curve or by comparing the Ct values to that of a calibration standard. Analysis of housekeeping genes is often used to normalize the results.

[0264] In Northern blot analysis total or poly(A)+ mRNA is run on a denaturing agarose gel and detected by hybridization to a labeled probe in the dried gel itself or on a membrane. The resulting signal is proportional to the amount of target RNA in the RNA population.

[0265] Comparing the signals from two or more cell populations or tissues reveals relative differences in gene expression levels. Absolute quantification can be performed by comparing the signal to a standard curve generated using known amounts of an in vitro transcript corresponding to the target RNA. Analysis of housekeeping genes, genes whose expression levels are expected to remain relatively constant regardless of conditions, is often used to normalize the results, eliminating any apparent differences caused by unequal transfer of RNA to the membrane or unequal loading of RNA on the gel.

[0266] The first step in Northern analysis is isolating pure, intact RNA from the cells or tissue of interest. Because Northern blots distinguish RNAs by size, sample integrity influences the degree to which a signal is localized in a single band. Partially degraded RNA samples will result in the signal being smeared or distributed over several bands with an overall loss in sensitivity and possibly an erroneous interpretation of the data. In Northern blot analysis, DNA, RNA and oligonucleotide probes can be used and these probes are preferably labeled (e.g. radioactive labels, mass labels or fluorescent labels). The size of the target RNA, not the probe, will determine the size of the detected band, so methods such as random-primed labeling, which generates probes of variable lengths, are suitable for probe synthesis. The specific activity of the probe will determine the level of sensitivity, so it is preferred that probes with high specific activities, are used.

[0267] In an RNase protection assay, the RNA target and an RNA probe of a defined length are hybridized in solution. Following hybridization, the RNA is digested with RNases specific for single-stranded nucleic acids to remove any unhybridized, single-stranded target RNA and probe. The RNases are inactivated, and the RNA is separated e.g. by denaturing polyacrylamide gel electrophoresis. The amount of intact RNA probe is proportional to the amount of target RNA in the RNA population. RPA can be used for relative and absolute quantification of gene expression and also for mapping RNA structure, such as intron/exon boundaries and transcription start sites. The RNase protection assay is preferable to Northern blot analysis as it generally has a lower limit of detection.

[0268] The antisense RNA probes used in RPA are generated by in vitro transcription of a DNA template with a defined endpoint and are typically in the range of 50-600 nucleotides. The use of RNA probes that include additional sequences not homologous to the target RNA allows the protected fragment to be distinguished from the full-length probe. RNA probes are typically used instead of DNA probes due to the ease of generating single-stranded RNA probes and the reproducibility and reliability of RNA:RNA duplex digestion with RNases (Ausubel et al. 2003), particularly preferred are probes with high specific activities.

[0269] Particularly preferred is the use of microarrays. The microarray analysis process can be divided into two main parts. First is the immobilization of known gene sequences onto glass slides or other solid support followed by hybridization of the fluorescently labeled cDNA (comprising the sequences to be interrogated) to the known genes immobilized on the glass slide. After hybridization, arrays are scanned using a fluorescent microarray scanner. Analyzing the relative fluorescent intensity of different genes provides a measure of the differences in gene expression.

[0270] DNA arrays can be generated by immobilizing presynthesized oligomers onto prepared glass slides. In this case, representative gene sequences are manufactured and prepared using standard oligomer synthesis and purification methods. These synthesized gene sequences are complementary to the genes of interest and tend to be shorter sequences in the range of 25-70 nucleotides. Alternatively, immobilized oligomers can be chemically synthesized in-situ on the surface of the slide. In situ oligomer synthesis involves the consecutive addition of the appropriate nucleotides to the spots on the microarray; spots not receiving a nucleotide are protected during each stage of the process using physical or virtual masks.

[0271] In expression profiling microarray experiments, the RNA templates used are representative of the transcription profile of the cells or tissues under study. RNA is first isolated from the cell populations or tissues to be compared. Each RNA sample is then used as a template to generate fluorescently labeled cDNA via a reverse transcription reaction. Fluorescent labeling of the cDNA can be accomplished by either direct labeling or indirect labeling methods. During direct labeling, fluorescently modified nucleotides (e.g., Cy®3- or Cy®5-dCTP) are incorporated directly into the cDNA during the reverse transcription. Alternatively, indirect labeling can be achieved by incorporating aminoallyl-modified nucleotides during cDNA synthesis and then conjugating an N-hydroxysuccinimide (NHS)-ester dye to the aminoallyl-modified cDNA after the reverse transcription reaction is complete. Alternatively, the probe may be unlabeled, but may be detectable by specific binding with a ligand which is labeled, either directly or indirectly. Suitable labels and methods for labelling ligands (and probes) are known in the art, and include, for example, radioactive labels which may be incorporated by known methods (e.g., nick translation or kinasing). Other suitable labels include but are not limited to biotin, fluorescent groups, chemiluminescent groups (e.g., dioxetanes, particularly triggered dioxetanes), enzymes, antibodies, and the like.

[0272] To perform differential gene expression analysis, cDNA generated from different RNA samples are labeled with Cy®3. The resulting labeled cDNA is purified to remove unincorporated nucleotides, free dye and residual RNA. Following purification, the labeled cDNA samples are hybridized to the microarray. The stringency of hybridization is determined by a number of factors during hybridization and during the washing procedure, including temperature, ionic strength, length of time and concentration of fromamide. These factors are outlined in, for example, Sambrook et al. (Molecular Cloning: A Laboratory Manual, 2nd ed., 1989). The microarray is scanned post-hybridization using a fluorescent microarray scanner. The fluorescent intensity of each spot indicates the level of expression for that gene; bright spots correspond to strongly expressed genes, while dim spots indicate weak expression.

[0273] Once the images are obtained, the raw data must be analyzed. First, the background fluorescence must be subtracted from the fluorescence of each spot. The data is then normalized to a control sequence, such as an exogenously added RNA, or a housekeeping gene panel to account for any nonspecific hybridization, array imperfections or variability in the array setup, cDNA labeling, hybridization or washing. Data normalization allows the results of multiple arrays to be compared.

[0274] The present invention further provides methods for the detection of the presence of the polypeptide encoded by said gene sequences in a sample obtained from a patient.

[0275] Levels of polypeptide expression of the polypeptides encoded by the genes and/or genomic regions according to Table 1 are associated with the classification of biological samples.

[0276] Any method known in the art for detecting polypeptides can be used. Such methods include, but are not limited to mass-spectrometry, immunodiffusion, immunoelectrophoresis, immunochemical methods, binder-ligand assays, immunohistochemical techniques, agglutination and complement assays (e.g., see Basic and Clinical Immunology, Sites and Terr, eds., Appleton and Lange, Norwalk, Conn. pp 217-262, 1991 which is incorporated by reference). Preferred are binder-ligand immunoassay methods including reacting antibodies with an epitope or epitopes and competitively displacing a labeled polypeptide or derivative thereof.

[0277] Certain embodiments of the present invention comprise the use of antibodies specific to the polypeptide encoded by the genes and/or genomic regions according to Table 1.

[0278] Such antibodies are useful for the classification of biological samples. In certain embodiments production of monoclonal or polyclonal antibodies can be induced by the use of the coded polypeptide as an antigene. Such antibodies may in turn be used to detect expressed polypeptides as classification markers for biological samples. The levels of such polypeptides present may be quantified by conventional methods. Antibody-polypeptide binding may be detected and quantified by a variety of means known in the art, such as labelling with fluorescent or radioactive ligands. The invention further comprises kits for performing the above-mentioned procedures, wherein such kits contain antibodies specific for the investigated polypeptides.

[0279] Numerous competitive and non-competitive polypeptide binding immunoassays are well known in the art. Antibodies employed in such assays may be unlabeled, for example as used in agglutination tests, or labeled for use a wide variety of assay methods. Labels that can be used include radionuclides, enzymes, fluorescers, chemiluminescers, enzyme substrates or co-factors, enzyme inhibitors, particles, dyes and the like. Preferred assays include but are not limited to radioimmunoassay (RIA), enzyme immunoassays, e.g., enzyme-linked immunosorbent assay (ELISA), fluorescent immunoassays and the like. Polyclonal or monoclonal antibodies or epitopes thereof can be made for use in immunoassays by any of a number of methods known in the art.

[0280] In an alternative embodiment of the method the proteins may be detected by means of western blot analysis. Said analysis is standard in the art, briefly proteins are separated by means of electrophoresis e.g. SDS-PAGE. The separated proteins are then transferred to a suitable membrane (or paper) e.g. nitrocellulose, retaining the spacial separation achieved by electrophoresis. The membrane is then incubated with a generic protein (e.g. milk protein) to bind remaining sticky places on the membrane. An antibody specific to the protein of interest is then added, said antibody being detectably labeled for example by dyes or enzymatic means (e.g. alkaline phosphatase or horseradish peroxidase). The location of the antibody on the membrane is then detected.

[0281] In an alternative embodiment of the method the proteins may be detected by means of immunochemistry (the use of antibodies to probe specific antigens in a sample). Said analysis is standard in the art, wherein detection of antigens in tissues is known as immunohistochemistry, while detection in cultured cells is generally termed immunocytochemistry. Briefly the primary antibody to be detected by binding to its specific antigen. The antibody-antigen complex is then bound by a secondary enzyme conjugated antibody. In the presence of the necessary substrate and chromogen the bound enzyme is detected according to colored deposits at the antibody-antigen binding sites. There is a wide range of suitable sample types, antigen-antibody affinity, antibody types, and detection enhancement methods. Thus optimal conditions for immunochemical detection must be determined by the person skilled in the art for each individual case.

[0282] One approach for preparing antibodies to a polypeptide is the selection and preparation of an amino acid sequence of all or part of the polypeptide, chemically synthesising the amino acid sequence and injecting it into an appropriate animal, usually a rabbit or a mouse (Milstein and Kohler Nature 256:495-497, 1975; Gulfre and Milstein, Methods in Enzymology: Immunochemical Techniques 73:1-46, Langone and Banatis eds., Academic Press, 1981 which are incorporated by reference). Methods for preparation of the polypeptides or epitopes thereof include, but are not limited to chemical synthesis, recombinant DNA techniques or isolation from biological samples.

[0283] In the final step of the method the biological sample is classified, as specified below.

[0284] Another aspect of the invention provides a kit for use in classifying a biological sample, comprising: a means for detecting polypeptides of a gene or genomic region according to Table 1. The means for detecting the polypeptides comprise preferably antibodies, antibody derivatives, or antibody fragments. The polypeptides are most preferably detected by means of Western blotting utilizing a labeled antibody. In another embodiment of the invention the kit further comprising means for obtaining a biological sample of the patient. Preferred is a kit, which further comprises a container suitable for containing the means for detecting the polypeptides in the biological sample of the patient, and most preferably further comprises instructions for use and interpretation of the kit results. In a preferred embodiment the kit for use in classifying biological samples, comprises: (a) a means for detecting polypeptides of a gene or genomic region according to Table 1; (b) a container suitable for containing the said means and the biological sample of the patient comprising the polypeptides wherein the means can form complexes with the polypeptides; (c) a means to detect the complexes of (b); and optionally (d) instructions for use and interpretation of the kit results.

[0285] The kit may also contain other components such as buffers or solutions suitable for blocking, washing or coating, packaged in a separate container.

[0286] Another aspect of the invention relates to a kit for use in classifying a biological sample, said kit comprising: a means for measuring the level of transcription of a gene or genomic region according to Table 1. In a preferred embodiment the means for measuring the level of transcription comprise oligomers or polynucleotides able to hybridize under stringent or moderately stringent conditions to the transcription products of a gene or genomic region according to Table 1. In a most preferred embodiment the level of transcription is determined by techniques selected from the group of Northern blot analysis, reverse transcriptase PCR, real-time PCR, RNAse protection, and microarray. In another embodiment of the invention the kit further comprises means for obtaining a biological sample of the patient. Preferred is a kit, which further comprises a container suitable for containing the means for measuring the level of transcription and the biological sample of the patient, and most preferably further comprises instructions for use and interpretation of the kit results.

[0287] In a preferred embodiment the kit for use in classifying biological samples comprises (a) a plurality of oligomers or polynucleotides able to hybridize under stringent or moderately stringent conditions to the transcription products of a gene or genomic region according to Table 1; (b) a container suitable for containing the oligomers or polynucleotides and a biological sample of the patient comprising the transcription products wherein the oligomers or polynucleotide can hybridize under stringent or moderately stringent conditions to the transcription products, (c) means to detect the hybridization of (b); and optionally, (d) instructions for use and interpretation of the kit results.

[0288] The kit may also contain other components such as hybridization buffer (where the oligomers are to be used as a probe) packaged in a separate container. Alternatively, where the oligomers are to be used to amplify a target region, the kit may contain, packaged in separate containers, a polymerase and a reaction buffer optimized for primer extension mediated by the polymerase, such as PCR.

[0289] Most preferably a kit according to the embodiments of the present invention is used for the determination of expression step of the methods according to other aspects of the invention.

[0290] In a particularly preferred embodiment the expression level of the genes, genomic sequences and/or regulatory regions according to Table 1 is determined by analysis of the level of methylation of said genes, genomic sequences and/or regulatory regions thereof. It is preferred that the level of methylation of said genes, genomic sequences and/or regulatory regions thereof is determined by determining the methylation status or level of at least one CpG dinucleotide thereof. It is further preferred that the level of methylation of said genes, genomic sequences and/or regulatory regions thereof is determined by determining the methylation status or level of a plurality of CpG dinucleotides thereof. It is further preferred that the methylation state of CpG positions within regions of the sequences of Table 1, as shown in Table 3 are analyzed. Said analysis comprises the following steps:

a) contacting genomic DNA obtained from the subject with at least one reagent, or series of reagents that distinguishes between methylated and non-methylated CpG dinucleotides within at least one target region of the genomic DNA, wherein said contiguous nucleotides comprise at least one CpG dinucleotide sequence; and
b) classifying the biological sample according to the methylation status of said target regions analyzed in i).

[0291] Genomic DNA may be isolated by any means standard in the art, including the use of commercially available kits. Briefly, wherein the DNA of interest is encapsulated in by a cellular membrane the biological sample must be disrupted and lyzed by enzymatic, chemical or mechanical means. The DNA solution may then be cleared of proteins and other contaminants e.g. by digestion with proteinase K. The genomic DNA is then recovered from the solution. This may be carried out by means of a variety of methods including salting out, organic extraction or binding of the DNA to a solid phase support. The choice of method will be affected by several factors including time, expense and required quantity of DNA. Preferably, the source of the DNA sample is selected from the group consisting of cells or cell lines, histological slides, biopsies, paraffin-embedded tissue, bodily fluids, ejaculate, urine, blood, and combinations thereof. Preferably, the source is biopsies, body fluids, ejaculate, urine, or blood. The genomic DNA sample is then treated in such a manner that cytosine bases which are unmethylated at the 5′-position are converted to uracil, thymine, or another base which is dissimilar to cytosine in terms of hybridization behavior. This will be understood as ‘treatment’ herein.

[0292] The above described treatment of genomic DNA is preferably carried out with bisulfite (hydrogen sulfite, disulfite) and subsequent alkaline hydrolysis which results in a conversion of non-methylated cytosine nucleobases to uracil or to another base which is dissimilar to cytosine in terms of base pairing behavior.

[0293] The treated DNA is then analyzed in order to determine the methylation state of one or more target gene sequences (prior to the treatment) suitable for the classification of biological samples. It is preferred that the target region comprises, or hybridizes under stringent conditions to at least 16 contiguous nucleotides of the converted sequence of at least one gene or genomic sequence selected from the group consisting the genes and genomic sequences as listed in Table 1, and more preferably to the sub-regions thereof according to Table 3. It is preferred that at least one target region is selected from each of Tables 8A to 8L. It is further preferred that the sequences of said genes as described in the accompanying sequence listing are analyzed. The method of analysis may be selected from those known in the art, including those listed herein. Particularly preferred are MethyLight™, MSP™ and the use of blocking oligonucleotides as will be described herein. It is preferred that any oligonucleotides used in such analysis (including primers, blocking oligonucleotides and detection probes) should be reverse complementary, identical, or hybridize under stringent or highly stringent conditions to an at least 16-base-pair long segment of the base sequences of one or more converted sequences selected from Table 2 and sequences complementary thereto.

### Further Improvements

[0294] The present invention provides novel uses for the genes, genomic sequences and/or regulatory regions thereof according to Table 1. Additional embodiments (see Table 2) provide modified variants of SEQ ID NO: 413 to SEQ ID NO: 824, as well as oligonucleotides and/or PNA-oligomers for analysis of cytosine methylation patterns within the group consisting SEQ ID NO: 413 to SEQ ID NO: 824.

[0295] An objective of the invention comprises analysis of the methylation state of one or more CpG dinucleotides within at least one of the genomic sequences selected from the group consisting of SEQ ID NO: 413 to SEQ ID NO: 824 and sequences complementary thereto.

[0296] The disclosed invention provides treated nucleic acids, derived from genomic SEQ ID NO: 413 to SEQ ID NO: 824, wherein the treatment is suitable to convert at least one unmethylated cytosine base of the genomic DNA sequence to uracil or another base that is detectably dissimilar to cytosine in terms of hybridization. The genomic sequences in question may comprise one, or more, consecutive or random methylated CpG positions. Said treatment preferably comprises use of a reagent selected from the group consisting of bisulfite, hydrogen sulfite, disulfite, and combinations thereof. In a preferred embodiment of the invention, the objective comprises analysis of a non-naturally occurring modified nucleic acid comprising a sequence of at least 16 contiguous nucleotide bases in length of a sequence selected from the converted sequences of Table 2. It is particularly preferred that said nucleic acid is a non-naturally occurring modified nucleic acid that is not identical to or complementary to the genomic sequences of Table 1 or other human genomic DNA.

[0297] It is further preferred that said sequence comprises at least one CpG, TpA or CpA dinucleotide and sequences complementary thereto. The sequences of SEQ ID NO: 1650 to SEQ ID NO: 4120 provide non-naturally occurring modified versions of the nucleic acid according to SEQ ID NO: 413 TO SEQ ID NO: 824, wherein the modification of each genomic sequence results in the synthesis of a nucleic acid having a sequence that is unique and distinct from said genomic sequence as follows. For each sense strand genomic DNA, e.g., SEQ ID NO:1, four converted versions are disclosed. A first version wherein “C” is converted to “T,” but “CpG” remains “CpG” (i.e., corresponds to case where, for the genomic sequence, all “C” residues of CpG dinucleotide sequences are methylated and are thus not converted); a second version discloses the complement of the disclosed genomic DNA sequence (i.e. antisense strand), wherein “C” is converted to “T,” but “CpG” remains “CpG” (i.e., corresponds to case where, for all “C” residues of CpG dinucleotide sequences are methylated and are thus not converted). The ‘upmethylated’ converted sequences of SEQ ID NO: 413 TO SEQ ID NO: 824 correspond to SEQ ID NO: 1650 TO SEQ ID NO: 2472. A third chemically converted version of each genomic sequences is provided, wherein “C” is converted to “T” for all “C” residues, including those of “CpG” dinucleotide sequences (i.e., corresponds to case where, for the genomic sequences, all “C” residues of CpG dinucleotide sequences are unmethylated); a final chemically converted version of each sequence, discloses the complement of the disclosed genomic DNA sequence (i.e. antisense strand), wherein “C” is converted to “T” for all “C” residues, including those of “CpG” dinucleotide sequences (i.e., corresponds to case where, for the complement (antisense strand) of each genomic sequence, all “C” residues of CpG dinucleotide sequences are unmethylated). The ‘downmethylated’ converted sequences of SEQ ID NO: 413 to SEQ ID NO: 824 correspond to SEQ ID NO: 3297 to SEQ ID NO: 4120.

[0298] It is particularly preferred that, fragments of the converted DNA are amplified, using sets of primer oligonucleotides according to the present invention, and an amplification enzyme. The amplification of several DNA segments can be carried out simultaneously in one and the same reaction vessel. Typically, the amplification is carried out using a polymerase chain reaction (PCR). The set of primer oligonucleotides includes at least two oligonucleotides whose sequences are each reverse complementary, identical, or hybridize under stringent or highly stringent conditions to an at least 16-base-pair long segment of the base sequences of one of SEQ ID NO: 1650 to SEQ ID NO: 4120 and sequences complementary thereto.

[0299] In an alternate embodiment of the method, the methylation status of preselected CpG positions within the nucleic acid sequences comprising one or more of SEQ ID NO: 413 to SEQ ID NO: 824 may be detected by use of methylation-specific primer oligonucleotides. This technique (MSP) has been described in U.S. Pat. No. 6,265,171 to Herman. The use of methylation status specific primers for the amplification of bisulfite converted DNA allows the differentiation between methylated and unmethylated nucleic acids. MSP primers pairs contain at least one primer which hybridizes to a bisulfite converted CpG dinucleotide. Therefore, the sequence of said primers comprises at least one CpG dinucleotide. MSP primers specific for non-methylated DNA contain a “T’ at the position of the C position in the CpG. Preferably, therefore, the base sequence of said primers is required to comprise a sequence having a length of at least 9 nucleotides which hybridizes to a converted nucleic acid sequence according to one of SEQ ID NO: 1650 to SEQ ID NO: 4120 and sequences complementary thereto, wherein the base sequence of said oligomers comprises at least one CpG dinucleotide.

[0300] A further preferred embodiment of the method comprises the use of blocker oligonucleotides. The use of such blocker oligonucleotides has been described by Yu et al., BioTechniques 23:714-720, 1997. Blocking probe oligonucleotides are hybridized to the bisulfite converted nucleic acid concurrently with the PCR primers. PCR amplification of the nucleic acid is terminated at the 5′ position of the blocking probe, such that amplification of a nucleic acid is suppressed where the complementary sequence to the blocking probe is present. The probes may be designed to hybridize to the bisulfite converted nucleic acid in a methylation status specific manner. For example, for detection of methylated nucleic acids within a population of unmethylated nucleic acids, suppression of the amplification of nucleic acids which are unmethylated at the position in question would be carried out by the use of blocking probes comprising a ‘CpA’ or ‘TpA’ at the position in question, as opposed to a ‘CpG’ if the suppression of amplification of methylated nucleic acids is desired.

[0301] For PCR methods using blocker oligonucleotides, efficient disruption of polymerase-mediated amplification requires that blocker oligonucleotides not be elongated by the polymerase. Preferably, this is achieved through the use of blockers that are 3′-deoxyoligonucleotides, or oligonucleotides derivitized at the 3′ position with other than a “free” hydroxyl group. For example, 3′-O-acetyl oligonucleotides are representative of a preferred class of blocker molecule.

[0302] Additionally, polymerase-mediated decomposition of the blocker oligonucleotides should be precluded. Preferably, such preclusion comprises either use of a polymerase lacking 5′-3′ exonuclease activity, or use of modified blocker oligonucleotides having, for example, thioate bridges at the 5′-terminii thereof that render the blocker molecule nuclease-resistant. Particular applications may not require such 5′ modifications of the blocker. For example, if the blocker- and primer-binding sites overlap, thereby precluding binding of the primer (e.g., with excess blocker), degradation of the blocker oligonucleotide will be substantially precluded. This is because the polymerase will not extend the primer toward, and through (in the 5′-3′ direction) the blocker—a process that normally results in degradation of the hybridized blocker oligonucleotide.

[0303] A particularly preferred blocker/PCR embodiment, for purposes of the present invention and as implemented herein, comprises the use of peptide nucleic acid (PNA) oligomers as blocking oligonucleotides. Such PNA blocker oligomers are ideally suited, because they are neither decomposed nor extended by the polymerase.

[0304] Preferably, therefore, the base sequence of said blocking oligonucleotides is required to comprise a sequence having a length of at least 9 nucleotides which hybridizes to a converted nucleic acid sequence according to one of SEQ ID NO: 1650 to SEQ ID NO: 4120 and sequences complementary thereto, wherein the base sequence of said oligonucleotides comprises at least one CpG, TpG or CpA dinucleotide.

[0305] The fragments obtained by means of the amplification can carry a directly or indirectly detectable label. Preferred are labels in the from of fluorescence labels, radionuclides, or detachable molecule fragments having a typical mass which can be detected in a mass spectrometer. Where said labels are mass labels, it is preferred that the labeled amplificates have a single positive or negative net charge, allowing for better detectability in the mass spectrometer. The detection may be carried out and visualized by means of, e.g., matrix assisted laser desorption/ionization mass spectrometry (MALDI) or using electron spray mass spectrometry (ESI).

[0306] Matrix Assisted Laser Desorption/Ionization Mass Spectrometry (MALDI-TOF) is a very efficient development for the analysis of biomolecules (Karas and Hillenkamp, Anal Chem., 60:2299-301, 1988). An analyte is embedded in a light-absorbing matrix. The matrix is evaporated by a short laser pulse thus transporting the analyte molecule into the vapour phase in an unfragmented manner. The analyte is ionized by collisions with matrix molecules. An applied voltage accelerates the ions into a field-free flight tube. Due to their different masses, the ions are accelerated at different rates. Smaller ions reach the detector sooner than bigger ones. MALDI-TOF spectrometry is well suited to the analysis of peptides and proteins. The analysis of nucleic acids is somewhat more difficult (Gut and Beck, Current Innovations and Future Trends, 1:147-57, 1995). The sensitivity with respect to nucleic acid analysis is approximately 100-times less than for peptides, and decreases disproportionately with increasing fragment size. Moreover, for nucleic acids having a multiply negatively charged backbone, the ionization process via the matrix is considerably less efficient. In MALDI-TOF spectrometry, the selection of the matrix plays an eminently important role. For desorption of peptides, several very efficient matrixes have been found which produce a very fine crystallisation. There are now several responsive matrixes for DNA, however, the difference in sensitivity between peptides and nucleic acids has not been reduced. This difference in sensitivity can be reduced, however, by chemically modifying the DNA in such a manner that it becomes more similar to a peptide. For example, phosphorothioate nucleic acids, in which the usual phosphates of the backbone are substituted with thiophosphates, can be converted into a charge-neutral DNA using simple alkylation chemistry (Gut and Beck, Nucleic Acids Res. 23: 1367-73, 1995). The coupling of a charge tag to this modified DNA results in an increase in MALDI-TOF sensitivity to the same level as that found for peptides. A further advantage of charge tagging is the increased stability of the analysis against impurities, which makes the detection of unmodified substrates considerably more difficult.

[0307] In the next step of the method, the amplificates obtained are analyzed in order to ascertain the methylation status of the CpG dinucleotides prior to the treatment.

[0308] In embodiments where the amplificates were obtained by means of MSP amplification, the presence or absence of an amplificate is in itself indicative of the methylation state of the CpG positions covered by the primer, according to the base sequences of said primer.

[0309] Amplificates obtained by means of both standard and methylation specific PCR may be further analyzed by means of hybridization-based methods such as, but not limited to, array technology and probe based technologies as well as by means of techniques such as sequencing and template directed extension.

[0310] In one embodiment of the method, the amplificates synthesised are subsequently hybridized to an array or a set of oligonucleotides and/or PNA oligomers. In this context, the hybridization takes place in the following manner: the set of probes used during the hybridization is preferably composed of at least 2 oligonucleotides or PNA-oligomers; in the process, the amplificates serve as probes which hybridize to oligonucleotides or PNA oligomers previously bonded to a solid phase; the non-hybridized fragments are subsequently removed; said oligonucleotides or PNA oligomers contain at least one base sequence having a length of at least 9 nucleotides which is reverse complementary or identical to a segment of a sequence selected from SEQ ID NO: 1650 to SEQ ID NO: 4120; and the segment comprises at least one CpG, TpG or CpA dinucleotide.

[0311] In a preferred embodiment, said dinucleotide is present in the central third of the oligomer. For example, wherein the oligomer comprises one CpG dinucleotide, said dinucleotide is preferably the fifth to ninth nucleotide from the 5′-end of a 13-mer. One oligonucleotide exists for the analysis of each CpG dinucleotide within the sequence according to SEQ ID NO: 413 TO SEQ ID NO: 4120. It is preferred that at least one oligonucleotide is used to determine the status of at least one CpG dinucleotide of a gene selected from each of Tables 8A to 8L. Said oligonucleotides may also be present in the form of peptide nucleic acids. The non-hybridized amplificates are then removed. The hybridized amplificates are then detected. In this context, it is preferred that labels attached to the amplificates are identifiable at each position of the solid phase at which an oligonucleotide sequence is located.

[0312] In a particularly preferred embodiment of the method, the genomic methylation status of the CpG positions may be ascertained by means of oligonucleotide probes that are hybridized to the bisulfite converted DNA concurrently with the PCR amplification primers (wherein said primers may either be methylation specific or standard).

[0313] A particularly preferred embodiment of this method is the use of fluorescence-based Real Time Quantitative PCR (Heid et al., Genome Res. 6:986-994, 1996; also see U.S. Pat. No. 6,331,393) employing a dual-labeled fluorescent oligonucleotide probe (TaqMan™ PCR, using an ABI Prism 7700 Sequence Detection System, Perkin Elmer Applied Biosystems, Foster City, Calif.). The TaqMan™ PCR reaction employs the use of a nonextendible interrogating oligonucleotide, called a TaqMan™ probe, which, in preferred embodiments, is designed to hybridize to a GpC-rich sequence located between the forward and reverse amplification primers. The TaqMan™ probe further comprises a fluorescent “reporter moiety” and a “quencher moiety” covalently bound to linker moieties (e.g., phosphoramidites) attached to the nucleotides of the TaqMan™ oligonucleotide. For analysis of methylation within nucleic acids subsequent to bisulfite treatment, it is required that the probe be methylation specific, as described in U.S. Pat. No. 6,331,393, (hereby incorporated by reference in its entirety) also known as the MethyLight™ assay. Variations on the TaqMan™ detection methodology that are also suitable for use with the described invention include the use of dual-probe technology (Lightcycler™) or fluorescent amplification primers (Sunrise™ technology). Both these techniques may be adapted in a manner suitable for use with bisulfite converted DNA, and moreover for methylation analysis within CpG dinucleotides.

[0314] A further suitable method for the use of probe oligonucleotides for the assessment of methylation by analysis of bisulfite converted nucleic acids In a further preferred, the method comprises the use of template-directed oligonucleotide extension, such as MS-SNuPE as described by Gonzalgo and Jones, Nucleic Acids Res. 25:2529-2531, 1997.

[0315] In yet a further embodiment of the method, said step comprises sequencing and subsequent sequence analysis of the amplificate (Sanger F., et al., Proc Natl Acad Sci USA 74:5463-5467, 1977).

[0316] In a preferred embodiment, the methylation analysis comprises the use of an oligonucleotide or oligomer for detecting the cytosine methylation state within genomic or treated (chemically modified) DNA, according to SEQ ID NO: 413 to SEQ ID NO: 4120. Said oligonucleotide or oligomer comprising a nucleic acid sequence having a length of at least nine (9) nucleotides which hybridizes, under moderately stringent or stringent conditions (as defined herein above), to a treated nucleic acid sequence according to SEQ ID NO: 1650 to SEQ ID NO: 4120 and/or sequences complementary thereto, or to a genomic sequence according to SEQ ID NO: 413 to SEQ ID NO: 824 and/or sequences complementary thereto.

[0317] Thus, the present invention includes nucleic acid molecules (e.g., oligonucleotides and peptide nucleic acid (PNA) molecules (PNA-oligomers)) that hybridize under moderately stringent and/or stringent hybridization conditions to all or a portion of the sequences SEQ ID NO: 413 to SEQ ID NO: 4120, or to the complements thereof. Particularly preferred is a nucleic acid molecule that hybridizes under moderately stringent and/or stringent hybridization conditions to all or a portion of the sequences SEQ ID NO: 1650 to SEQ ID NO: 4120 but is not identical to or complementary to the equivalent genomic DNA selected from SEQ ID NO: 413 to SEQ ID NO: 4120 or other human genomic DNA. The hybridizing portion of the hybridizing nucleic acids is typically at least 9, 15, 20, 25, 30 or 35 nucleotides in length. However, longer molecules have inventive utility, and are thus within the scope of the present invention.

[0318] Preferably, the hybridizing portion of the inventive hybridizing nucleic acids is at least 95%, or at least 98%, or 100% identical to the sequence, or to a portion thereof of SEQ ID NO: 413 to SEQ ID NO: 4120, or to the complements thereof.

[0319] Hybridizing nucleic acids of the type described herein can be used, for example, as a primer (e.g., a PCR primer), or a probe. Preferably, hybridization of the oligonucleotide probe to a nucleic acid sample is performed under stringent conditions and the probe is 100% identical to the target sequence.

[0320] Nucleic acid duplex or hybrid stability is expressed as the melting temperature or Tm, which is the temperature at which a probe dissociates from a target DNA. This melting temperature is used to define the required stringency conditions.

[0321] For target sequences that are related and substantially identical to the corresponding sequence of SEQ ID NO: 413 to SEQ ID NO: 4120 (such as allelic variants and SNPs), rather than identical, it is useful to first establish the lowest temperature at which only homologous hybridization occurs with a particular concentration of salt (e.g., SSC or SSPE). Then, assuming that 1% mismatching results in a 1° C. decrease in the Tm, the temperature of the final wash in the hybridization reaction is reduced accordingly (for example, if sequences having >95% identity with the probe are sought, the final wash temperature is decreased by 5° C.). In practice, the change in Tm can be between 0.5° C. and 1.5° C. per 1% mismatch.

[0322] Examples of inventive oligonucleotides of length X (in nucleotides), as indicated by polynucleotide positions with reference to, e.g., SEQ ID NO:1, include those corresponding to sets (sense and antisense sets) of consecutively overlapping oligonucleotides of length X, where the oligonucleotides within each consecutively overlapping set (corresponding to a given X value) are defined as the finite set of Z oligonucleotides from nucleotide positions:

n to (n+(X−1));
where n=1, 2, 3, . . . (Y−(X−1));
where Y equals the length (nucleotides or base pairs) of SEQ ID NO: 1 (444);
where X equals the common length (in nucleotides) of each oligonucleotide in the set (e.g., X=20 for a set of consecutively overlapping 20-mers); and
where the number (Z) of consecutively overlapping oligomers of length X for a given SEQ ID NO of length Y is equal to Y−(X−1). For example Z=444−19=425 for either sense or antisense sets of SEQ ID NO:1, where X=20.

[0323] Preferably, the set is limited to those oligomers that comprise at least one CpG, TpG or CpA dinucleotide.

[0324] Examples of inventive 20-mer oligonucleotides include the following set of oligomers (and the antisense set complementary thereto), indicated by polynucleotide positions with reference to SEQ ID NO:1:
[0325] 1-20, 2-21, 3-22, 4-23, 5-24, . . . 425-444.

[0326] Preferably, the set is limited to those oligomers that comprise at least one CpG, TpG or CpA dinucleotide.

[0327] Likewise, examples of inventive 25-mer oligonucleotides include the following set of oligomers (and the antisense set complementary thereto), indicated by polynucleotide positions with reference to SEQ ID NO:1:
[0328] 1-25, 2-26, 3-27, 4-28, 5-29, . . . 420-444.

[0329] Preferably, the set is limited to those oligomers that comprise at least one CpG, TpG or CpA dinucleotide.

[0330] The present invention encompasses, for each of SEQ ID NO: 413 TO SEQ ID NO: 4120 (sense and antisense), multiple consecutively overlapping sets of oligonucleotides or modified oligonucleotides of length X, where, e.g., X=9, 10, 17, 20, 22, 23, 25, 27, 30 or 35 nucleotides.

[0331] The oligonucleotides or oligomers according to the present invention constitute effective tools useful to ascertain genetic and epigenetic parameters of the genomic sequence corresponding to SEQ ID NO: 413 to SEQ ID NO: 824. Preferably, said oligomers comprise at least one CpG, TpG or CpA dinucleotide.

[0332] Particularly preferred oligonucleotides or oligomers according to the present invention are those in which the cytosine of the CpG dinucleotide (or of the corresponding converted TpG or CpA dinculeotide) sequences is within the middle third of the oligonucleotide; that is, where the oligonucleotide is, for example, 13 bases in length, the CpG, TpG or CpA dinucleotide is positioned within the fifth to ninth nucleotide from the 5′-end.

[0333] The oligonucleotides of the invention can also be modified by chemically linking the oligonucleotide to one or more moieties or conjugates to enhance the activity, stability or detection of the oligonucleotide. Such moieties or conjugates include chromophores, fluorophors, lipids such as cholesterol, cholic acid, thioether, aliphatic chains, phospholipids, polyamines, polyethylene glycol (PEG), palmityl moieties, and others as disclosed in, for example, U.S. Pat. Nos. 5,514,758, 5,565,552, 5,567,810, 5,574,142, 5,585,481, 5,587,371, 5,597,696 and 5,958,773. The probes may also exist in the from of a PNA (peptide nucleic acid) which has particularly preferred pairing properties. Thus, the oligonucleotide may include other appended groups such as peptides, and may include hybridization-triggered cleavage agents (Krol et al., BioTechniques 6:958-976, 1988) or intercalating agents (Zon, Pharm. Res. 5:539-549, 1988). To this end, the oligonucleotide may be conjugated to another molecule, e.g., a chromophore, fluorophor, peptide, hybridization-triggered cross-linking agent, transport agent, hybridization-triggered cleavage agent, etc.

[0334] The oligonucleotide may also comprise at least one art-recognized modified sugar and/or base moiety, or may comprise a modified backbone or non-natural internucleoside linkage.

[0335] The oligonucleotides or oligomers according to particular embodiments of the present invention are typically used in ‘sets,’ which contain at least one oligomer for analysis of at least one of the CpG dinucleotides of genomic sequences SEQ ID NO: 413 to SEQ ID NO: 824 and sequences complementary thereto, or to the corresponding CpG, TpG or CpA dinucleotide within a sequence of the treated nucleic acids according to SEQ ID NO: 1650 to SEQ ID NO: 4120 and sequences complementary thereto. However, it is anticipated that for economic or other factors it may be preferable to analyze a limited selection of the CpG dinucleotides within said sequences, and the content of the set of oligonucleotides is altered accordingly.

[0336] Therefore, in particular embodiments, the present invention provides a set of at least two (2) (oligonucleotides and/or PNA-oligomers) useful for detecting the cytosine methylation state in treated genomic DNA (SEQ ID NO: 1650 to SEQ ID NO: 4120), or in genomic DNA (SEQ ID NO: 413 to SEQ ID NO: 824) and sequences complementary thereto. These probes enable the classification of biological samples. The set of oligomers may also be used for detecting single nucleotide polymorphisms (SNPs) in treated genomic DNA (SEQ ID NO: 1650 to SEQ ID NO: 4120), or in genomic DNA (SEQ ID NO: 413 to SEQ ID NO: 824 and sequences complementary thereto).

[0337] In preferred embodiments, at least one, and more preferably all members of a set of oligonucleotides is bound to a solid phase.

[0338] In further embodiments, the present invention provides a set of at least two (2) oligonucleotides that are used as ‘primer’ oligonucleotides for amplifying DNA sequences of one of SEQ ID NO: 413 to SEQ ID NO: 4120 and sequences complementary thereto, or segments thereof.

[0339] It is anticipated that the oligonucleotides may constitute all or part of an “array” or “DNA chip” (i.e., an arrangement of different oligonucleotides and/or PNA-oligomers bound to a solid phase). Such an array of different oligonucleotide- and/or PNA-oligomer sequences can be characterized, for example, in that it is arranged on the solid phase in the from of a rectangular or hexagonal lattice. The solid-phase surface may be composed of silicon, glass, polystyrene, aluminum, steel, iron, copper, nickel, silver, or gold. Nitrocellulose as well as plastics such as nylon, which can exist in the from of pellets or also as resin matrices, may also be used. An overview of the Prior Art in oligomer array manufacturing can be gathered from a special edition of Nature Genetics (Nature Genetics Supplement, Volume 21, January 1999, and from the literature cited therein). Fluorescently labeled probes are often used for the scanning of immobilized DNA arrays. The simple attachment of Cy3 and Cy5 dyes to the 5′-OH of the specific probe are particularly suitable for fluorescence labels. The detection of the fluorescence of the hybridized probes may be carried out, for example, via a confocal microscope. Cy3 and Cy5 dyes, besides many others, are commercially available.

[0340] It is also anticipated that the oligonucleotides, or particular sequences thereof, may constitute all or part of an “virtual array” wherein the oligonucleotides, or particular sequences thereof, are used, for example, as ‘specifiers’ as part of, or in combination with a diverse population of unique labeled probes to analyze a complex mixture of analytes. Such a method, for example is described in US 2003/0013091 (U.S. Ser. No. 09/898,743, published 16 Jan. 2003). In such methods, enough labels are generated so that each nucleic acid in the complex mixture (i.e., each analyte) can be uniquely bound by a unique label and thus detected (each label is directly counted, resulting in a digital read-out of each molecular species in the mixture).

[0341] It is particularly preferred that the oligomers according to the invention are utilised for at least one of: in determining the presence or absence of specific organ, tissue or cell types, the detection and/or classification of a cell proliferative disorder and/or analysis of cellular differentiation.

[0342] In one embodiment of the method, this is achieved by analysis of the methylation status of at least one target sequence comprising, or hybridizing under stringent conditions to at least 16 contiguous nucleotides of a gene or sequence selected from the group consisting the genes and sequences according to Table 1 and complements thereof.

[0343] In a particularly preferred embodiment of the invention, the expression at least one of the genes, genomic sequences and/or regulatory regions thereof from each of Tables 8A to 8L is used in the classification of said sample. It is particularly preferred that said biological sample is classified according to at least one parameter selected from the group consisting of the cell, organ or tissue type of said biological sample or features thereof such as disease state.

[0344] Accordingly, in a particularly preferred embodiment the invention provides a method for the classification of biological samples, comprising the following steps:

a) determining the expression levels of one or more genes or gene sequences of each of Tables 8A to 8L and/or regulatory regions thereof; and
b) classifying said biological sample according to said expression status.

[0345] In a the most preferred embodiment thereof, the present invention provides a method for classifying a biological sample, comprising: obtaining a biological sample comprising genomic nucleic acid(s); contacting the nucleic acid(s), or a fragment thereof, with one reagent or a plurality of reagents sufficient for distinguishing between methylated and non methylated CpG dinucleotide sequences within a target sequence of the subject nucleic acid, wherein the target sequence comprises, or hybridizes under stringent conditions to, a sequence comprising at least 16 contiguous nucleotides of at least one gene or genomic sequence selected from each of Tables 8A to 8L said contiguous nucleotides comprising at least one CpG dinucleotide sequence; and determining, based at least in part on said distinguishing, the methylation state of at least one target CpG dinucleotide sequence, or an average, or a value reflecting an average methylation state of a plurality of target CpG dinucleotide sequences.

[0346] Preferably, distinguishing between methylated and non methylated CpG dinucleotide sequences within the target sequence comprises methylation state-dependent conversion or non-conversion of at least one such CpG dinucleotide sequence to the corresponding converted or non-converted dinucleotide sequence within a sequence selected from the equivalent converted sequence selected from Tables 8A to 8L, and contiguous regions thereof corresponding to the target sequence.

[0347] In the final step of the method the classification of the biological sample according to the measured expression is determined. Table 6 and 7 provide information for the correlation of measured methylation with cell, tissue and/or organ types. The person skilled in the art will be able to interpret RNA and/or protein expression on this basis. It is generally appreciated that there is an inverse correlation between methylation and mRNA and/or polypeptide expression.

[0348] A person with ordinary skills in the art will be able to utilize the information provided in Tables 6 to 9 in order to select suitable markers according to his specific requirements. The information provided in said tables enables the selection of one or a plurality of genes or genomic sequences in order to enable the classification of biological samples.

[0349] The information provided in Tables 6 to 9 will also enable a person with ordinary skills in the art to combine suitable markers in order to classify or identify of biological samples. This can be done for example, but not limited to, by combing at least two genes or genomics regions which have a complementary and/or overlapping expression pattern. In one embodiment of the invention the information provided by Table 6 and 7 is used to for the classification of one or more biological samples. In a particularly preferred embodiment the information of Table 6 is used for the classification of a biological sample according to cell, tissue and/or organ type. In an alternative embodiment the information according to Table 7 is used for the conformation and/or monitoring of cell, tissue and/or organ type which were derived by means of cell culturing or tissue engineering processes.

### Kits

[0350] The described invention further provides a composition of matter useful for the classification of biological samples. Said composition comprising at least one nucleic acid 18 base pairs in length of a segment of a nucleic acid sequence selected from the group consisting SEQ ID NO: 1650 TO SEQ ID NO: 4120, and one or more substances taken from the group comprising: magnesium chloride, dNTP, Taq polymerase, bovine serum albumen, an oligomer in particular an oligonucleotide or peptide nucleic acid (PNA)-oligomer, said oligomer comprising in each case at least one base sequence having a length of at least 9 nucleotides which is complementary to, or hybridizes under moderately stringent or stringent conditions to a pretreated genomic DNA according to one of SEQ ID NO: 1650 TO SEQ ID NO: 4120 and sequences complementary thereto. It is preferred that said composition of matter comprises a buffer solution appropriate for the stabilization of said nucleic acid in an aqueous solution and enabling polymerase based reactions within said solution. Suitable buffers are known in the art and commercially available.

### Utility

[0351] The subject matter of the invention has specific utility in the fields of medicine and/or molecular biology. In particular aspects, the subject matter are one or more markers or comprises at least parts of one or more markers. Thereby a marker is a gene, a genomic sequence, a regulatory region of a gene according to Table 1 or its mRNA, cDNA or polypeptide (protein, peptide). herein also referred as molecular biological marker. According to the invention, the provided markers have novel utility for the classification of biological samples.

[0352] A utility of the present invention is to provide molecular markers and methods for the analysis thereof that may be considered an alternative to traditional histological or pathological analysis. Said molecular biological markers accordingly offer an alternative to current means such as staining and microscopic analysis.

[0353] The present invention, in particular said markers are of use in determining the presence or absence of specific organ, tissue or cell types in a biological sample. Wherein said sample is heterogeneous in nature, the method according to the present invention may be used for the identification of a population or subpopulation of specific organs, tissue or cell types. One application of this is for the determination of the tumor content of a biopsy sample which may heterogeneously comprise both tumor and normal tissue. The determination of the relative tumor content of sample is of particular interest when quantifying the presence of molecular markers by reference to the tumor content of the sample, as for example described in EP 05090318 (which is hereby incorporated by reference in its entirety).

[0354] Another application of the determination of the presence or absence of specific organ, tissue or cell types in a biological sample by means of the present invention, in particular said markers is the identification of the tissue origin of tumors or metastasis of unknown tissue origin (cancer of unknown primary, CUP). The treatment of tumors of unknown identity is a well known problem. 3-5% of all cancer diseases are cancer of unknown primary. The course of disease is characterized in that only metastasis of unknown primary tumor are detected. A tumor-specific treatment is therefore not possible. The prognosis for the affected individual is bad and the survival rate is correspondingly low. So far mainly expression-based methods for the identification of a tumor's origin are known. These methods are highly error-associated and difficult because RNA degrades quickly and easily. Therefore an exact determination of the RNA is often not possible. In addition, also a correspondent reference has to be included. But according to the present invention, the origin of tumor cells is easily determinable. Thereby genomic DNA is isolated from a fresh sample or from an archived sample. For example but not limited to, the archived sample is a formalin-fixed and/or paraffin-embedded sample. The isolated DNA is then subjected to a bisulfite conversion. Suitable methods for DNA isolation and bisulfite conversion are known in the art, for example, but not limited to, see WO 06/039563. Subsequently the converted DNA is subjected to a real time PCR based detection assays specific for the said markers. Suitable methods for real time PCR based assays are known in the art, for example but not limited to it, such an assay is a QM assay, HM assay or a MSP assay. The origin of the tumor is the identified when a tissue marker is identified which does not belong to the tissue from whom the sample was taken. Alternatively, the isolated DNA is subjected to non-real time PCR amplifications which are specific for said markers. The resulting amplicons are then detected. Suitable method for detection are known in the art. For example but not limited to it, gel electrophoresis, fluorescence, or detection by means of hybridization, for example but not limited to it, to an array. In addition, it is also possible to detect the origin of a tumor only by analyzing the genomic DNA derived from blood. Because tumors are characterized by a high rate of cell death, in particular after chemotherapy, the amount of tumor derived genomic DNA within the blood is increased in comparison to normal levels of tissue derived DNA. Therefore it is sufficient to determine if the DNA specific for a tissue is increased in the blood of a patient with cancer of unknown primary. The tissue which shows an increased level of DNA in the blood is the tissue of origin of the tumor. For this application, the said markers of the invention are used essentially according to WO 03/074730. According to it, a body fluid sample is obtained from an individual, the amount or presence of free floating DNA originating from a tissue or organ is determinated, and the presence or absence of a medical condition is determinated based on the amount or presence of the free floating DNA originating from a tissue or organ. In any case, after identification of the tumors or metastasis origin, the treatment can be adjusted. The identification also enables that the tumor can be identified in its primary tissue, from where it can then be removed. The use of the present invention, in particular said markers has several advantages in comparison to the methods for tissue identification based on expression, in particular RNA based detection: (a) DNA and DNA methylation are much more stable then RNA; (b) DNA is upstream of the regulatory cascade. This means that DNA methylation influences a lot of RNA expression. Therefore usually the analysis of a complete panel of different RNAs is necessary, while only one DNA methylation pattern in many times sufficient.

[0355] The present invention, in particular said markers have further utility in the detection and/or classification of a cell proliferative disorder, for example but not limited to cancer. It is known in the art that increased levels of circulating cells or cellular matter are a characteristic of cell proliferative disorders. The methods or markers according to the present invention enable the detection and identification of atypical levels of cells or cellular matter derived from specific organ, tissue or cell types and thereby enable the determination of the primary location of said proliferative disorder. They also enable the detection and identification of atypical levels of expression which is a sign of dedifferentiation and breakdown of the cellular regulation mechanisms. Furthermore wherein the presence of a proliferative disorder has already been detected the primary location thereof may be determined according to the methods of the present invention.

[0356] The methods or markers of the present invention have a further alternative utility in the analysis of cellular differentiation, for example in the field of tissue engineering. The molecular characterization of a biological sample as opposed to traditional histological analysis enables the improved monitoring of differentiating cell or tissue cultures. The invention solves this longstanding need in the art by providing markers i.e. genes, genomic sequences and/or regulatory regions thereof according to Table 1 (or to one or more of those), the expression thereof at the mRNA, cDNA, protein or peptide level being indicative of the class of said biological sample.

[0357] In particular, the genes, genomic sequences and/or regulatory regions thereof according to Table 8A are of use in the differentiation and/or detection of T-lymphocytes. In particular the genes, genomic sequences and/or regulatory regions thereof according to Table 8B are of use in the differentiation and/or detection of embryonic liver. In particular the genes, genomic sequences and/or regulatory regions thereof according to Table 8C are of use in the differentiation and/or detection of embryonic skeletal muscle. In particular the genes, genomic sequences and/or regulatory regions thereof according to Table 8D are of use in the differentiation and/or detection of fibroblasts. In particular the genes, genomic sequences and/or regulatory regions thereof according to Table 8E are of use in the differentiation and/or detection of heart muscle. In particular the genes, genomic sequences and/or regulatory regions thereof according to Table 8F are of use in the differentiation of heart muscle from skeletal muscle. In particular the genes, genomic sequences and/or regulatory regions thereof according to Table 8G are of use in the differentiation and/or detection of keratinocytes. In particular the genes, genomic sequences and/or regulatory regions thereof according to Table 8H are of use in the differentiation and/or detection of liver. In particular the genes, genomic sequences and/or regulatory regions thereof according to Table 8I are of use in the differentiation and/or detection of melanocytes. In particular the genes, genomic sequences and/or regulatory regions thereof according to Table 8J are of use in the differentiation and/or detection of placenta. In particular the genes, genomic sequences and/or regulatory regions thereof according to Table 8K are of use in the differentiation and/or detection of skeletal muscle. In particular the genes, genomic sequences and/or regulatory regions thereof according to Table 8L are of use in the differentiation and/or detection of sperm.

[0358] The genomic sequences (and corresponding genes) according to Table 9 are of particular use in the fields of cell culture and tissue engineering, for the confirmation and/or monitoring of particular cell, tissue and/organ types. In particular the genomic sequences according to Table 9A are suitable for the confirmation and/or monitoring of T-lymphocytes. In particular the genomic sequences according to Table 9B are suitable for the confirmation and/or monitoring of embryonic liver. In particular the genomic sequences according to Table 9C are suitable for the confirmation and/or monitoring of embryonic skeletal muscle. In particular the genomic sequences according to Table 9D are suitable for the confirmation and/or monitoring of fibroblasts. In particular the genomic sequences according to Table 9E are suitable for confirmation and/or monitoring of heart muscle. In particular the genomic sequences according to Table 9F are suitable for the confirmation and/or monitoring of keratinocytes. In particular the genomic sequences according to Table 9G are suitable for the confirmation and/or monitoring of liver. In particular the genomic sequences according to Table 9H are suitable for the confirmation and/or monitoring of melanocytes. In particular the genomic sequences according to Table 9I are suitable for the confirmation and/or monitoring of placenta. In particular the genomic sequences according to Table 9J are suitable for the confirmation and/or monitoring of skeletal muscle.

[0359] According to a particularly preferred embodiment of the invention, the methylation status of CpG positions of genes, genomic sequences and/or regulatory regions thereof according to Table 1 is used in the classification of said sample. It is particularly preferred that said biological sample is classified according to at least one parameter selected from the group consisting of the cell, organ or tissue type of said biological sample or features thereof such as disease state. According to a particular preferred embodiment, the subject matter of the invention, in particular the methods, compositions, kits, or markers are utilised for at least one of histological analysis, pathological analysis, detection and/or characterization of cell proliferative disorders and monitoring of cellular or tissue differentiation.

[0360] According to the invention, the provided markers, in particular the genes, genomic sequences, regulatory regions, and corresponding mRNAs, cDNAs, proteins or peptides have a particular utility in the following aspects. Thereby a single marker is used either alone or in combination with other marker or markers herein provided or not.

[0361] The herein provided markers have utility (i) for the characterization of the marker corresponding tissue or cell, (ii) for the identification of marker corresponding tissue or cell, (iii) for the isolation of marker corresponding tissue or cell, (iv) for the purification of the corresponding tissue or cell, or (v) combinations thereof. Therefore known methods, so far unreported methods, or combinations thereof are useable. Said application is useful in the field of research, diagnostics as well as therapeutics.

[0362] In addition, the herein provided markers have utility for the prospective profiling, retrospective profiling, or both of donors and/or recipients in organ transplantation procedures. The correct characterization, identification, or both of the donor and/or the recipient is mandatory during organ transplantation procedures to assure the success of the intervention. The use of the markers of the invention enables the profiling of both, donor and recipient, form which prospective or retrospective observations or conclusions about the feasibility of the procedure are drawn.

[0363] In addition, the herein provided markers have utility for histological, chemical and/or immunohistochemical analysis. Accordingly, they have utility in the fields of research as well as diagnostics, in particular for histological or pathological analysis.

[0364] In addition, the herein provided markers have utility for phylogenetic profiling of species or tissues. The ontogenetic origin or the developmental lineage is then determined by comparison of the determined profiles.

[0365] In addition, the herein provided markers have utility for quality control of a genetically modified organism, tissue, group of cells or cell.

[0366] In addition, the herein provided markers have utility for controlling side effects in in vivo gene therapy procedures wherein genetically modified organism, tissue, group of cells or cell is used.

[0367] In addition, the herein provided markers have utility for the characterization, identification, or labelling of corresponding tissue or combinations thereof. This is of particular utility in the field of tissue bank storage and proliferation. Furthermore it has utility in a prospective as well as in a retrospective manner. The provided markers allow the individualization of samples by a precise molecular method. This is mandatory in storing biological material from patients or healthy individuals. In addition, this also advantageous for isolation or purification of tissues cells.

[0368] In addition, the herein provided markers have utility for controlling cell differentiation in stem-cell research and/or therapeutics. Cells undergo many genetic and/or epigenetic changes throughout differentiation. These changes influence the physiology of the cell and their control is mandatory in any procedure involving stem-cell in research and/or therapeutics. The provided markers allow to control this changes by giving a reference of the adult (completely differentiated) and embryonic (partially differentiated) status of the cells.

### CD4+ and CD8+ Lymphocytes:

[0369] The herein provided markers of Table 8A and Table 9A have utility for the quantification of lymphocytes, in particular in peripheral blood. The said markers enable the identification of CD4+ and CD8+ lymphocytes among other cells in blood samples. A low number of leucocytes in blood (leucopenia) may indicate bone marrow failure (for example, due to infection, tumor, fibrosis); presence of cytotoxic substance; collagen-vascular diseases (such as lupus erythematosus); disease of the liver or spleen; or radiation. A high number of leucocytes in blood (leucocytosis) may indicate infectious diseases; inflammatory disease (such as rheumatoid arthritis or allergy); leukemia; severe emotional or physical stress; tissue damage (for example, burns); or anemia.

[0370] In addition, the herein provided markers of Table 8A and Table 9A have utility for the study of CD4 and/or CD8 T-lymphocyte infiltration in other tissues healthy or diseased. Infiltration of lymphocytes in healthy or diseased tissues is an indication of several diseases such immunological malignances or even in tumor development. The said markers represent a target for the development of molecular probes that coupled to any detection method (e.g. Fluorescent dye) allow the identification of these cells in histological preparations.

[0371] In addition, the herein provided markers of Table 8A and Table 9A have utility for identification, isolation and/or purification of CD4 T-lymphocytes and/or CD8 T-lymphocytes, in particular from surrounding tissue infiltrated by the T-lymphocytes; from blood; and/or from other body fluids.

[0372] In addition, the herein provided markers of Table 8A and Table 9A have utility for the identification of an individual. Thereby at least two samples are used. One samples is obtained from an individual and another sample is a forensic sample, in particular traces of body cells, tissues or fluids, for example but not limited to, traces of blood and/or body fluids. This is of particular utility in the field of forensic medicine or of legal medicine. As constituent of blood or body fluids, CD4 T-lymphocytes and CD8 T-lymphocytes are part of the mentioned traces. The said markers have the advantage of being stable over time because they are DNA based. In addition said markers have the advantage that they enable a highly detailed and accurate characterization of samples. Through this an unambiguous identification of an individual is enabled.

[0373] In addition, the herein provided markers of Table 8A and Table 9A have utility for diagnosing the presence or absence of a disease. Thereby the number of CD4 T-lymphocytes, CD8 T-lymphocytes or both is quantified in normalized samples of healthy individuals. The determined number of CD4 T-lymphocytes, CD8 T-lymphocytes or both are then considered as indicative for healthy condition or a diseased condition with respect to an individual. Preferably, large amount of normalized samples are considered to generate reference values of CD4 T-lymphocytes, CD8 T-lymphocytes or both for a healthy condition and/or for one or more diseased conditions. The diseased condition can be any kind of diseased condition. Preferably, the diseased condition is a disease which causes a immune reaction. For example but not limited to the diseased condition is a cancer disease, a cell proliferation disease, or HIV. Preferably the total number of cells present in a sample is determined. The number of CD4 T-lymphocytes, CD8 T-lymphocytes or both are then normalized to the total number of cells.

### Embryonic

[0374] The herein provided markers of Table 8B, Table 8C, Table 9B and Table 9C have utility for the study, identification and/or quantification of fetal cells or fetal DNA circulating in maternal blood and/or amniotic fluid. During pregnancy cells and DNA from the fetus are continuously brought to the maternal blood stream as well as the amniotic fluid. Fetal cells and fetal DNA have a diagnostic potential in monitoring the health status of the fetus as reviewed by Bianchi D, 2004 (Bianchi D W. Circulating fetal DNA: its origin and diagnostic potential-a review. Placenta. 2004 April; 25 Suppl A:S93-S100).

[0375] In addition, the herein provided markers of Table 8B, Table 8C, Table 9B and Table 9C have utility for the study, identification and/or quantification of fetal cells or fetal DNA from amniocentesis and/or chorionic villus sampling. This is of particular utility in the field of prenatal diagnosis. Prenatal diagnosis procedures involve the study of fetal cells obtained by amniocentesis and chorionic villus biopsies.

### Skin

[0376] The herein provided markers of Tables 8D, G, I and Tables 9D, F, H have utility for identifying individuals from traces of skin and/or adjacent tissues (such as hair, nail pieces, etc). This is of particular utility in forensic medicine and/or legal medicine. Skin or skin adjacent tissue is usually used as study material in forensic and legal medicine. The markers provided in Table 8G and 9F have a particular utility because of the following reason. Keratinocytes constitute the external layer of the skin and therefore are the first cell type to be de-attached and a high number of these cells is expected in skin traces. Variations of one marker alone or in combination with other markers herein provided or not enable the accurate assessment of identity.

[0377] In addition, the herein provided markers of Tables 8D, G, I and Tables 9D, F, H have utility for characterizing the skin, hair, nail, or adjacent tissue of an individual.

[0378] In addition, the herein provided markers of Tables 8D, G, I and Tables 9D, F, H have utility for determining the composition of the skin, hair, nail, or adjacent tissue of an individual. Said composition being dependent from the content of at least one of the three major constituting cell types of the skin (fibroblasts, keratinocytes and melanocytes).

[0379] In addition, the herein provided markers of Tables 8D, G, I and Tables 9D, F, H have utility in the field of drugs. They have particular utility for the development of drugs as well as for the treatment with drugs. The skin, hair, nail or adjacent tissue of an individual can be characterized by means of the provided markers of Tables 8D, G, I and Tables 9D, F, H. This information can then be used to develop new drugs or to access already existing drugs with regard to skin, hair, nail etc. of an individual or to subgroups of individuals. These subgroups are for example but not limited to be characterized by a disease and/or a defined type of skin or hair, etc. The efficiency of said drugs i.e. the presence or absence of the desired effect is also characterized or monitored by means of the provided markers of Tables 8D, G, I and Tables 9D, F, H.

[0380] In addition, the herein provided markers of Tables 8D, G, I and Tables 9D, F, H have utility as prognostic and/or diagnostic markers for wound healing, in particular in the field of surgery procedures wherein the skin is affected.

### Liver

[0381] The herein provided markers of Tables 8H and Tables 9G have utility for deducing the presence of absence of an event which affects the liver. For example but not limited to it, said event is at least one select from the group comprising liver cirrhosis; liver cancer; hepatitis A; hepatitis B; hepatitis C; healthy condition, recently or longer chemical, physical or biological exposure; recently or longer exposure to a drug, or alcohol; or treatment procedures. In the case the event is adverse, said event affecting the liver leads to the death of liver cells. In the case the event is benign, said event leads to a reduction of liver cell death. The genomic DNA of dead liver cells can then be found in the body fluids in particular in the blood of a affected individual.

[0382] In addition, the herein provided markers of Tables 8H and Tables 9G have utility for deducing the sensitivity of an individual to alcohol. Alcohol consumption may change the DNA methylation status as reviewed by Poschl et al, 2004 (Poschl G, Stickel F, Wang X D, Seitz H K. Alcohol and cancer: genetic and nutritional aspects. Proc Nutr Soc. 2004 February; 63(1):65-71.).

### Heart Muscle

[0383] The herein provided markers of Tables 8E, Table 8F and Tables 9E have utility for deducing the presence of absence of an event or condition affecting the heart. For example but not limited to it, said event or condition is at least one select from the group comprising heart failure; heart attack; athletic capacity; healthy condition; recently or longer chemical, physical or biological exposure; recently or longer exposure to a drug; or treatment procedure. In the case the event is adverse, said event or condition affecting the heart leads to death of heart cells. In the case the event is benign, said event leads to a reduction of heart cell death. The genomic DNA of dead heart cells can then be found in the body fluids in particular in the blood of an affected individual.

### Placenta

[0384] The herein provided markers of Table 8J and Table 9I have utility for the study, monitoring, identification and/or quantification of placental cells or placental DNA circulating in maternal blood and/or amniotic fluid. In this respect, the said markers have also utility for the isolation or purification of placental cell or placental genomic DNA. Placenta constitute an extra-embryonic fetal tissue and as such, it shares many genetic characteristics with the fetal tissue. Therefore, cells from the placenta as well as DNA from placental cells can surrogate fetal cells and fetal DNA for diagnostic means. Fetal cells and fetal DNA have a diagnostic potential in monitoring the health status of the fetus as reviewed by Bianchi D, 2004 (Bianchi D W. Circulating fetal DNA: its origin and diagnostic potential-a review. Placenta. 2004 April; 25 Suppl A:S93-S100). During pregnancy placenta cells are de-attached and brought to the maternal blood stream as well as the amniotic fluid.

[0385] In addition, the herein provided markers of Table 8J and Table 9I have utility for the monitoring of embryonic development or the monitoring of placental development, in particular of extra-embryonic tissue or of interaction of extra-embryonic tissue with maternal placental tissue.

[0386] In addition, the herein provided markers of Table 8J and Table 9I have utility for the study, monitoring, identification and/or quantification of placental cells in regenerative medicine, in particular in the field of tissue engineering. Corresponding methods for the study, monitoring, identification and/or quantification of placental cells are applied in particular before and after storage, before and after cell differentiation, before and after cell proliferation, before and after cell culture expansion, and before and after tissue expansion as well as before and after transplantation.

### Sperm

[0387] The herein provided markers of Table 8L have utility for diagnosing a male infertility related disease. A major cause of male infertility is either a low amount of sperm cells (spermatozoa) in the ejaculate (oligospermia) or a complete lack of sperm cells (spermatozoa) in the ejaculate (azoospermia). Thus, methods for the quantification of sperm cells are widely useable in diagnosing male infertility.

[0388] In addition, the herein provided markers of Table 8L have utility as a tool to access the viability of the sperm cells.

[0389] In addition, the herein provided markers of Table 8L have utility for increasing the fertility of a male individual. As said above male fertility is often limited by the amount of sperm cells in the ejaculate. Thus, male fertility can be enhanced by enriching, isolating or purifying sperm cells.

[0390] In addition, the herein provided markers of Table 8L have utility for assisted fertilization procedures. Assisted fertilization procedures are for example but not limited to intracytoplasmic sperm injection (ICSI) or in vitro fertilization (IVF). All assisted fertilization procedures require the management of sperm cells prior to the procedure. Such management comprises at least the characterization, identification, quantification, enrichment, isolation, purification of sperm cells or combinations thereof.

[0391] In addition, the herein provided markers of Table 8L have utility in the fields of forensic and/or legal medicine. By use of the said markers it is possible to determine the presence or absence of sperm in a sample. Furthermore, it is possible to identify an individual by use of said markers.

### Skeletal Muscle

[0392] The herein provided markers of Table 8F, 8K and Table 9J have utility for characterizing the efficiency of skeletal muscle cells. This utility is of particular value in the field of sports medicine.

[0393] In addition, the herein provided markers of Table 8F, 8K and Table 9J have utility for identifying fully differentiated muscle cells in cell culture. This is of particular utility in the field of tissue engineering. Muscle cells are generate in cell culture by cultivation and differentiation of muscle cell progenitor cells. Fully differentiated skeletal muscle cells can be identified by means of the provided markers of Table 8F, 8K and Table 9J.

[0394] In addition, the herein provided markers of Table 8F, 8K and Table 9J have utility for diagnosing muscle cell associated diseases, in particular disease which are characterized by a death of muscle cells like muscular distrophy. The DNA of dead muscle cells is found in body fluids such as blood or urine. This DNA can be identified by means of the herein provided markers of Table 8F, 8K and Table 9J.

### CD8 T-Lymphocytes

[0395] The herein provided markers of Table 8A specific only for CD8 T-lymphocytes have utility for quantifying CD8 T-lymphocytes, in particular for monitoring the immune system of individuals infected with HIV. The periodically determining of the number of CD8 T-lymphocytes for patients infected with HIV is a standard procedure in the art. It is necessary to decide whether and when a drug or treatment is necessary, whether a drug or treatment is still effective, and which drug or treatment can be selected. The said is necessary with respect to the HIV infection itself but also with respect to secondary infection.

### CD4+ Lymphocytes

[0396] The herein provided markers of Table 8A specific only for CD4 T-lymphocytes have utility for quantifying CD4 T-lymphocytes, in particular for monitoring the immune system of individuals infected with HIV. The periodically determining of the number of CD4 T-lymphocytes for patients infected with HIV is a standard procedure in the art. It is necessary to decide whether and when a drug or treatment is necessary, whether a drug or treatment is still effective, and which drug or treatment can be selected. The said is necessary with respect to the HIV infection itself but also with respect to secondary infection.

[0397] According to a preferred embodiment of the invention, the provided markers, in particular the genes, genomic sequences, regulatory regions, and corresponding mRNAs, cDNAs, proteins or peptides are used in the following aspects. Thereby a single marker is used either alone or in combination with other marker or markers herein provided or not.

[0398] In a preferred embodiment, at least one of the provided markers is used (i) for the characterization of the marker corresponding tissue or cell, (ii) for the identification of marker corresponding tissue or cell, (iii) for the isolation of marker corresponding tissue or cell, (iv) for the purification of the corresponding tissue or cell, or (v) combinations thereof. Therefore known methods, so far unreported methods, or combinations thereof are useable. Said application is useful in the field of research, diagnostics as well as therapeutics. As an example, but not limited to it, this application is illustrated in more detail for the marker PDGFB SEQ ID NO: 508. All the herein provided markers can be applied and used in the same way like PDGFB SEQ ID NO: 508 correspondingly to their assignment to respective tissues, organs or cells according to Tables 8 A-L or Tables 9 A-J. Of course, corresponding markers can be alternatively used. Thereby a corresponding marker of PDGFB SEQ ID NO: 508 is, for example but not limited to, genomic DNA derived from or associated with PDGFB SEQ ID NO: 508; methylation specifically converted DNA derived from PDGFB SEQ ID NO: 508; mRNA, cDNA, protein, or peptide each of which derived at least in parts from PDGFB SEQ ID NO: 508. If the case may be, a person skilled in the art knows how to adjust the presented procedure. As shown in Table 6, PDGFB SEQ ID NO: 508 is a marker for adult liver because the CpG dinucleotides of PDGFB SEQ ID NO: 508 are methylated within the range of 75-100% in liver and only within the range of 0-25% in T-lymphocytes (CD4, CD8), embryonic tissue (embryonic liver, embryonic skeletal muscle), skin (melanocytes, keratinocytes, fibroblasts), heart muscle, placenta, sperm, or skeletal muscle.

[0399] Correspondingly, for example but not limited to it, a method for characterization and/or identification of a cell or tissue type of a sample comprises the following steps:

1. Providing of a sample, the sample being derived from an individual and comprising genomic DNA. Preferably, the genomic DNA is purified by means of a kit. A person skilled in the art is aware of suitable kits. For example, but not limited to it, the kit for purification of genomic DNA is the DNeasy Tissue Kit (Qiagen) or the Wizard Genomic DNA Purification kit (Promega).
2. Characterizing a cell or tissue type by determining the methylation state or the methylation level of at least one CpG position within the sequence of PDGFB SEQ ID NO: 508 of the provided sample. A person skilled in the art knows how to determine the methylation state or the methylation level of one or more CpG positions. For example, but not limited to, the methylation state or level is determined by means of at least one selected from the group comprising amplification method, PCR method, isothermal amplification method, NASBA method, LCR method, methylation specific amplification method, MSP (Methylation Specific PCR) method, nested MSP method, HeavyMethyl™ method, detection method, methylation specific detection method, bisulfite sequencing method, detection by means of DNA-arrays, detection by means of oligonucleotide microarrays, detection by means of CpG-island-microarrays, detection by means of restriction enzymes, detection by means of methylation sensitive restriction enzymes simultaneous methylation specific amplification and detection method, COBRA method, real-time PCR, HeavyMethyl™ real time PCR method, MSP MethyLight™ method, MethyLight™ method, MethyLight™ Algo™ method, QM method, Headloop MethyLight™ method, HeavyMethyl™ MethyLight™ method, HeavyMethyl™ Scorpion™ method, MSP Scorpion™ method, Headloop Scorpion™ method, methylation sensitive primer extension, Ms-SNuPE (Methylation-sensitive Single Nucleotide Primer Extension) method, and proteins binding specifically methylated or unmethylated DNA like the proteins MeCP2, MBD1, MBD2, MBD4, Kaiso or any domain thereof like but not limited to the CXXC-3 domain of the MBD1 protein or methylation-specific antibodies, e.g. anti-5-methylcytosine antibodies.
3. Optional, deducing the presence or absence of a cell type or tissue type within the provided sample from the presence or absence of a methylation state or methylation level for said at least one CpG.

[0400] For example but not limited to, a method for isolation and/or purification of a cell or group of cells comprises the following steps:

1. Providing of a sample, the sample being derived from an individual and comprising one or more cells.
2. Binding of at least one probe to one or more CpG positions within the sequence of PDGFB SEQ ID NO: 508 of the provided sample. Thereby a probe binds specifically with respect to the methylation status of said one or more CpG positions. A probe is either a protein, peptide, nucleic acid, RNA or DNA for example but not limited to, an antibody specific for 5-methylcytosine (e.g. AbCAM Cat. No. ab1884); a methyl-binding protein such as the proteins MeCP2, MBD1, MBD2, MBD4, Kaiso or any domain thereof; or a nucleic acid probe that is specific for the methylated sequence. According to some preferred embodiments, the said probe(s) are labeled with a tag suitable for detection of the probe, isolation of one or more cells, and/or purification of one or more cells.
3. Isolating and/or purifying a cell or group of cells from the provided sample by means of the attached probes and their corresponding tags, respectively. A person skilled in the art is aware of suitable methods. Said methods are based on chemical, physical or biological properties of the attached probes or corresponding tags. For example but not limited to, the isolation is performed (i) by means of affinity cromatography, wherein the probe is attached to a tag that is recognized by an antibody immobilized on a column; (ii) by means of magnetic beads, wherein a magnetic bead is directly or indirectly bound to an attached probe and wherein a magnetic field is applied; or (iii) by means of fluorescent activated cell sorting, wherein the used tag is a fluorescent dye.

[0401] In a preferred embodiment, at least one of the provided markers is used for the prospective profiling, retrospective profiling, or both of donors and/or recipients in organ transplantation procedures. The correct characterization, identification, or both of the donor and/or the recipient is mandatory during organ transplantation procedures to assure the success of the intervention. The use of the markers of the invention enables the profiling of both, donor and recipient, form which prospective or retrospective observations or conclusions about the feasibility of the procedure are drawn. As an example, but not limited to it, this application is illustrated in more detail for the marker FOXC1 SEQ ID NO: 579. All other markers of Table 8E, Table 8F and Table 9F are applied and used like FOXC1 SEQ ID NO: 579 for heart muscle. The other herein provided markers are applied and used according their assignment to the Tables 8 A-L or Tables 9 A-J. Of course, corresponding markers can also be alternatively used. Thereby corresponding markers of FOXC1 SEQ ID NO: 579 are, for example but not limited to, genomic DNA derived from or associated with FOXC1 SEQ ID NO: 579; methylation specifically converted DNA derived from FOXC1 SEQ ID NO: 579; mRNA, cDNA, protein, or peptide each of which derived at least in parts from FOXC1 SEQ ID NO: 579. If the case may be, a person skilled in the art knows how to adjust the presented procedures. As shown in Table 6, FOXC1 SEQ ID NO: 579 is a marker for heart muscle because the CpG dinucleotides of FOXC1 SEQ ID NO: 579 are methylated within the range of 25-75% in heart muscle and only within the range of 0-25% in T-lymphocytes (CD4, CD8), embryonic tissue (embryonic liver, embryonic skeletal muscle), skin (melanocytes, keratinocytes, fibroblasts), liver, placenta, sperm, or skeletal muscle.

[0402] Correspondingly, for example but not limited to it, a method for the prospective profiling, retrospective profiling, or both of a donor and/or recipient in organ or tissue transplantation procedures comprises the following steps:

1. Providing of at least one sample, at least one sample being derived from a donor individual and/or at least one sample being derived from a recipient individual. Genomic DNA is purified from said samples, preferably by means of a kit. A person skilled in the art is aware of suitable kits. For example, but not limited to it, the kit for purification of genomic DNA is the DNeasy Tissue Kit (Qiagen) or the Wizard Genomic DNA Purification kit (Promega).
2. Characterizing each of the at least one sample by determining the methylation state or the methylation level of at least one CpG position within the sequence of FOXC1 SEQ ID NO: 579 of the provided samples. Thereby a profile is generated comprising the methylation information of all characterized CpG positions of FOXC1 SEQ ID NO: 579. A person skilled in the art knows how to determine the methylation state or the methylation level of one or more CpG positions. For example, but not limited to, the methylation state or level is determined by means of at least one selected from the group comprising amplification method, PCR method, isothermal amplification method, NASBA method, LCR method, methylation specific amplification method, MSP (Methylation Specific PCR) method, nested MSP method, HeavyMethyl™ method, detection method, methylation specific detection method, bisulfite sequencing method, detection by means of DNA-arrays, detection by means of oligonucleotide microarrays, detection by means of CpG-island-microarrays, detection by means of restriction enzymes, detection by means of methylation sensitive restriction enzymes simultaneous methylation specific amplification and detection method, COBRA method, real-time PCR, HeavyMethyl™ real time PCR method, MSP MethyLight™ method, MethyLight™ method, MethyLight™ Algo™ method, QM method, Headloop MethyLight™ method, HeavyMethyl™ MethyLight™ method, HeavyMethyl™ Scorpion™ method, MSP Scorpion™ method, Headloop Scorpion™ method, methylation sensitive primer extension, Ms-SNuPE (Methylation-sensitive Single Nucleotide Primer Extension) method, and proteins binding specifically methylated or unmethylated DNA like the proteins MeCP2, MBD1, MBD2, MBD4, Kaiso or any domain thereof like but not limited to the CXXC-3 domain of the MBD1 protein or methylation-specific antibodies, e.g. anti-5-methylcytosine anti-bodies.
3. Comparing the determined profiles, in particular the methylation state or methylation level of the analyzed at least one CpG position of the donor sample(s) and/or the recipient sample(s). Thereby the profiling is prospective or retrospective depending from the point in time the samples were collected i.e. before or after the transplantation procedure. A person skilled in the art knows then how to interpret the profiling to give an estimate on the probability of success of the intervention.

[0403] In a preferred embodiment, at least one of the provided markers is detected in studies by histological, chemical and/or immunohistochemical means. Said embodiment is useful in the fields of research as well as diagnostics, in particular for histological or pathological analysis. According to the said embodiment, the detection occurs by one or more probes that specifically bind to an epitop, peptide, protein, cDNA, mRNA, and/or at least one methylation state or level of at least one of the provided markers according to Tables 8 A-L or Table 9 A-J. Thereby a probe is selected from the group comprising antibody; 5-methylcytosine specific antibody (e.g. AbCam Cat. No. ab1884); affinity binding protein; protein binding specifically methylated or unmethylated DNA like MeCP2, MBD1, MBD2, MBD4, Kaiso or any domain thereof; nucleic acid; DNA, RNA, PNA or nucleic acid derivative. In addition, the probe is labeled directly or indirectly with a dye, protein, enzyme, metal, bead or chemical compound suitable for detection. As an example, but not limited to it, this embodiment is illustrated in more detail for the marker CMAH SEQ ID NO: 570. All other markers of Table 8G and Table 9F are applied and used like CMAH SEQ ID NO: 570 for keratinocytes. The other herein provided markers are applied and used according their assignment to the Tables 8 A-L or Tables 9 A-J. Of course, corresponding markers can also be alternatively used. Thereby corresponding markers of CMAH SEQ ID NO: 570 are, for example but not limited to, genomic DNA derived from or associated with CMAH SEQ ID NO: 570; methylation specifically converted DNA derived from CMAH SEQ ID NO: 570; mRNA, cDNA, protein, or peptide each of which derived at least in parts from CMAH SEQ ID NO: 570. If the case may be, a person skilled in the art knows how to adjust the presented procedure. As shown in Table 6, CMAH SEQ ID NO: 570 is a marker for keratinocytes and sperm because the CpG dinucleotides of CMAH SEQ ID NO: 570 are methylated only within the range of 0-25% in keratinocytes and sperm and within the range of 75-100% in T-lymphocytes (CD4, CD8), embryonic tissue (embryonic liver, embryonic skeletal muscle), melanocytes, fibroblasts, heart muscle, liver, or skeletal muscle. Keratinocytes and sperm can easily be distinguished by their different morphological appearance and physiological occurrence.

[0404] Correspondingly, for example but not limited to it, a method for histological or pathological analysis, comprises

1. Providing of a sample, comprising genomic DNA;
2. Contacting the genomic DNA or a derivative of it with at least one probe which is specific for at least one differentially methylated CpG position of the marker CMAH SEQ ID NO: 570. Said probe is selected from the group comprising antibody; 5-methylcytosine specific antibody (e.g. AbCam Cat. No. ab1884); affinity binding protein; protein binding specifically methylated or unmethylated DNA like MeCP2, MBD1, MBD2, MBD4, Kaiso or any domain thereof; nucleic acid; DNA, RNA, PNA or nucleic acid derivative specific for the methylated sequence. In addition, the probe is labeled directly or indirectly with a dye, protein, enzyme, metal, bead or chemical compound suitable for detection.
3. Performing a detection reaction by means of the probe and/or the label. A person skilled in the art is aware of suitable detection reactions. For example, but not limited to, the detection reaction comprises Rabbit Peroxidase Anti-Peroxidase (PAP) Soluble Complex (Rockland Catalog#: P300-002); radioactive labeled probes; or probes fluorescently labeled like DNA probes coupled with Cy5 (Invitrogen).

[0405] In a preferred embodiment, at least one of the provided markers is applied to phylogenetic profiling of species or tissues. The ontogenetic origin or the developmental lineage is then determined by comparison of the determined profiles. As an example, but not limited to it, this application is illustrated in more detail for the marker AIM1 SEQ ID NO: 538. All other markers of Table 8J and Table 9I are applied and used like AIM1 SEQ ID NO: 538 for placenta. The other herein provided markers are applied and used according their assignment to the Tables 8 A-L or Tables 9 A-J. Of course, corresponding markers can also be alternatively used. Thereby corresponding markers of AIM1 SEQ ID NO: 538 are, for example but not limited to, genomic DNA derived from or associated with AIM1 SEQ ID NO: 538; methylation specifically converted DNA derived from AIM1 SEQ ID NO: 538; mRNA, cDNA, protein, or peptide each of which derived at least in parts AIM1 SEQ ID NO: 538. If the case may be, a person skilled in the art knows how to adjust the presented procedures. As shown in Table 6, AIM1 SEQ ID NO: 538 is a marker for placenta because the CpG dinucleotides of AIM1 SEQ ID NO: 538 are methylated within the range of 25-75% in placenta and only within the range of 0-25% in T-lymphocytes (CD4, CD8), embryonic tissue (embryonic liver, embryonic skeletal muscle), skin (melanocytes, keratinocytes, fibroblasts), liver, heart muscle, sperm, or skeletal muscle.

[0406] Correspondingly, for example but not limited to it, a method for phylogenetic profiling of species or tissues, comprises

1. Providing of at least one sample, each sample comprising genomic DNA. Genomic DNA is purified from said samples, preferably by means of a kit. A person skilled in the art is aware of suitable kits. For example, but not limited to it, the kit for purification of genomic DNA is the DNeasy Tissue Kit (Qiagen) or the Wizard Genomic DNA Purification kit (Promega).
2. Characterizing each of the at least one sample by determining the methylation state or the methylation level of at least one CpG position within the sequence of AIM1 SEQ ID NO: 538 of the provided samples. Thereby a profile is generated comprising the methylation information of all characterized CpG positions of AIM1 SEQ ID NO: 538. A person skilled in the art knows how to determine the methylation state or the methylation level of one or more CpG positions. For example, but not limited to, the methylation state or level is determined by means of at least one selected from the group comprising amplification method, PCR method, isothermal amplification method, NASBA method, LCR method, methylation specific amplification method, MSP (Methylation Specific PCR) method, nested MSP method, HeavyMethyl™ method, detection method, methylation specific detection method, bisulfite sequencing method, detection by means of DNA-arrays, detection by means of oligonucleotide microarrays, detection by means of CpG-island-microarrays, detection by means of restriction enzymes, detection by means of methylation sensitive restriction enzymes simultaneous methylation specific amplification and detection method, COBRA method, real-time PCR, HeavyMethyl™ real time PCR method, MSP MethyLight™ method, MethyLight™ method, MethyLight™ Algo™ method, QM method, Headloop MethyLight™ method, HeavyMethyl™ MethyLight™ method, HeavyMethyl™ Scorpion™ method, MSP Scorpion™ method, Headloop Scorpion™ method, methylation sensitive primer extension, Ms-SNuPE (Methylation-sensitive Single Nucleotide Primer Extension) method, and proteins binding specifically methylated or unmethylated DNA like the proteins MeCP2, MBD1, MBD2, MBD4, Kaiso or any domain thereof like but not limited to the CXXC-3 domain of the MBD1 protein or methylation-specific antibodies, e.g. anti-5-methylcytosine anti-bodies.

[0407] The profiles of the one or more respective samples are then compared with each other or with at least one reference profile. According to methods or algorithms known to those skilled in the art, the ontogenetic origin of a cell, group of cells, tissue or organ or the developmental lineage of a cell, group of cells, tissue or organ is determined.

[0408] In a preferred embodiment, at least one of the provided markers is applied for quality control of a genetically modified organism, tissue, group of cells or cell. As an example, but not limited to it, this embodiment is illustrated in more detail for the marker TBC1D10A SEQ ID NO: 700. All other markers of Table 8E, 8F and Table 9E are applied and used like TBC1D10A SEQ ID NO: 700 for heart muscle. The other herein provided markers are applied and used according their assignment to the Tables 8 A-L or Tables 9 A-J. Of course, corresponding markers can also be alternatively used. Thereby corresponding markers of TBC1D10A SEQ ID NO: 700 are, for example but not limited to, genomic DNA derived from or associated with TBC1D10A SEQ ID NO: 700; methylation specifically converted DNA derived from TBC1D10A SEQ ID NO: 700; mRNA, cDNA, protein, or peptide each of which derived at least in parts from TBC1D10A SEQ ID NO: 700. If the case may be, a person skilled in the art knows how to adjust the presented procedures. TBC1D10A SEQ ID NO: 700 is a marker for heart muscle because a) the CpG dinucleotides of TBC1D10A SEQ ID NO: 700 are methylated to a significantly higher extend in the heart muscle and sperm than in other tissues (see Table 6); and b) heart muscle and sperm can be easily distinguished morphologically or by means of other markers. According to Table 6 75-100% of the CpG dinucleotides of the marker TBC1D10A SEQ ID NO: 700 is methylated in heart muscle and sperm; 0-25% is methylated in T-lymphocytes (CD4, CD8), embryonic tissue (embryonic liver, embryonic skeletal muscle), skin (melanocytes, keratinocytes, fibroblasts), and placenta; and 25-75% is methylated in liver and skeletal muscle.

[0409] Correspondingly, for example but not limited to it, a method for quality control of a genetically modified organism, tissue, group of cells or cell, comprises

1. Providing of at least one sample of or derived from the genetically modified organism, tissue, group of cells or cell, each sample comprising genomic DNA. The genomic DNA is purified from said samples, preferably by means of a kit. A person skilled in the art is aware of suitable kits. For example, but not limited to it, the kit for purification of genomic DNA is the DNeasy Tissue Kit (Qiagen) or the Wizard Genomic DNA Purification kit (Promega).
2. Characterizing each of the at least one sample by determining the methylation state or the methylation level of at least one CpG position within the sequence of TBC1D10A SEQ ID NO: 700 of the provided samples. Thereby a profile is generated comprising the methylation information of all characterized CpG positions of TBC1D10A SEQ ID NO: 700. A person skilled in the art knows how to determine the methylation state or the methylation level of one or more CpG positions. For example, but not limited to, the methylation state or level is determined by means of at least one selected from the group comprising amplification method, PCR method, isothermal amplification method, NASBA method, LCR method, methylation specific amplification method, MSP (Methylation Specific PCR) method, nested MSP method, HeavyMethyl™ method, detection method, methylation specific detection method, bisulfite sequencing method, detection by means of DNA-arrays, detection by means of oligonucleotide microarrays, detection by means of CpG-island-microarrays, detection by means of restriction enzymes, detection by means of methylation sensitive restriction enzymes simultaneous methylation specific amplification and detection method, COBRA method, real-time PCR, HeavyMethyl™ real time PCR method, MSP MethyLight™ method, MethyLight™ method, MethyLight™ Algo™ method, QM method, Headloop MethyLight™ method, HeavyMethyl™ MethyLight™ method, HeavyMethyl™ Scorpion™ method, MSP Scorpion™ method, Headloop Scorpion™ method, methylation sensitive primer extension, Ms-SNuPE (Methylation-sensitive Single Nucleotide Primer Extension) method, and proteins binding specifically methylated or unmethylated DNA like the proteins MeCP2, MBD1, MBD2, MBD4, Kaiso or any domain thereof like but not limited to the CXXC-3 domain of the MBD1 protein or methylation-specific antibodies, e.g. anti-5-methylcytosine anti-bodies.
3. Comparing the said profiles with each other or with reference profiles. A person skilled in the art knows to interpret correspondingly said comparison and to deduce therefrom the quality of the genetically modified organism, tissue, group of cells or cell. Thereby a person skilled in the art is enabled to draw prospectively or retrospectively conclusions on the presence or absence of side effects if said genetically modified organism, tissue, group of cells or cell is brought into contact with other organisms, tissues, groups of cells or cells.

[0410] For example but not limited to, a method for quality control of an genetically modified organism, tissue, group of cells or cell, comprises

1. Providing of at least one first sample of or derived from an organism, tissue, group of cells or cell being not genetically modified and at least one second sample of or derived from a correspondent organism, tissue, group of cells or cell being genetically modified. Thereby each sample comprises genomic DNA. The genomic DNA is purified from said first and second samples, preferably by means of a kit. A person skilled in the art is aware of suitable kits. For example, but not limited to it, the kit for purification of genomic DNA is the DNeasy Tissue Kit (Qiagen) or the Wizard Genomic DNA Purification kit (Promega).
2. Characterizing each of the at least one first and second samples by determining the methylation state or the methylation level of at least one CpG position within the sequence of TBC1D10A SEQ ID NO: 700 of the provided samples. Thereby a first and second profile is generated comprising the methylation information of all characterized CpG positions of TBC1D10A SEQ ID NO: 700 of the respective samples. A person skilled in the art knows how to determine the methylation state or the methylation level of one or more CpG positions. For example, but not limited to, the methylation state or level is determined by means of at least one selected from the group comprising amplification method, PCR method, isothermal amplification method, NASBA method, LCR method, methylation specific amplification method, MSP (Methylation Specific PCR) method, nested MSP method, HeavyMethyl™ method, detection method, methylation specific detection method, bisulfite sequencing method, detection by means of DNA-arrays, detection by means of oligonucleotide microarrays, detection by means of CpG-island-microarrays, detection by means of restriction enzymes, detection by means of methylation sensitive restriction enzymes simultaneous methylation specific amplification and detection method, COBRA method, real-time PCR, HeavyMethyl™ real time PCR method, MSP MethyLight™ method, MethyLight™ method, MethyLight™ Algo™ method, QM method, Headloop MethyLight™ method, HeavyMethyl™ MethyLight™ method, HeavyMethyl™ Scorpion™ method, MSP Scorpion™ method, Headloop Scorpion™ method, methylation sensitive primer extension, Ms-SNuPE (Methylation-sensitive Single Nucleotide Primer Extension) method, and proteins binding specifically methylated or unmethylated DNA like the proteins MeCP2, MBD1, MBD2, MBD4, Kaiso or any domain thereof like but not limited to the CXXC-3 domain of the MBD1 protein or methylation-specific antibodies, e.g. anti-5-methylcytosine anti-bodies.
3. Comparing the said first and second profile with each other or with reference profiles.
4. Deducing the presence or absence of side effects, wherein said side effects are characterized in that changes are introduced into regions of the genome which were not target of the genetic modification. This application is of particular interest to exclude unwanted physiological alterations of the cell, group of cells, tissue or organism. The reason for this is unwanted physiological alterations are mainly caused by genetic modification of non-target genomic DNA regions.

[0411] According to a particular preferred embodiment, the at least one first sample is derived from an organism, tissue, group of cells or cell before a genetic modification and the at least one second sample is derived thereof after said genetic modification.

[0412] In a preferred embodiment, at least one of the provided markers is applied for controlling side effects in in vivo gene therapy procedures wherein genetically modified organism, tissue, group of cells or cell is used. As an example, but not limited to it, this embodiment is illustrated in more detail for the marker GPX5 SEQ ID NO: 574. All other markers of Table 8A and Table 9A are applied and used correspondingly as GPX5 SEQ ID NO: 574 for T-lymphocytes. The other herein provided markers are applied and used according their assignment to the Tables 8 A-L or Tables 9 A-J. Of course, corresponding markers can also be alternatively used. Thereby corresponding markers of GPX5 SEQ ID NO: 574 are, for example but not limited to, genomic DNA derived from or associated with GPX5 SEQ ID NO: 574; methylation specifically converted DNA derived from GPX5 SEQ ID NO: 574; mRNA, cDNA, protein, or peptide each of which derived at least in parts from GPX5 SEQ ID NO: 574. If the case may be, a person skilled in the art knows how to adjust the presented procedures. As shown in Table 6, GPX5 SEQ ID NO: 574 is a marker for T-lymphocytes because the CpG dinucleotides of GPX5 SEQ ID NO: 574 are methylated within the range of 0-25% in CD4 T-lymphocytes as well as in CD 8 T-lymphocytes and within the range of 75-100% in embryonic tissue (embryonic liver, embryonic skeletal muscle), skin (melanocytes, keratinocytes, fibroblasts), placenta, liver, heart muscle, sperm, or skeletal muscle.

[0413] For example but not limited to, a method for controlling side effects in in vivo gene therapy procedures, comprises

1. Providing of at least one untreated sample derived from an individual and at least one treated sample of said individual. Thereby the samples are derived from respective body regions and each of the samples comprises genomic DNA. The genomic DNA is purified from said first and second samples, preferably by means of a kit. A person skilled in the art is aware of suitable kits. For example, but not limited to it, the kit for purification of genomic DNA is the DNeasy Tissue Kit (Qiagen) or the Wizard Genomic DNA Purification kit (Promega).
2. Characterizing each of the at least one first and second samples by determining the methylation state or the methylation level of at least one CpG position within the sequence of GPX5 SEQ ID NO: 574 of the provided samples. Thereby a first and second profile is generated comprising the methylation information of all characterized CpG positions of GPX5 SEQ ID NO: 574 of the respective samples. A person skilled in the art knows how to determine the methylation state or the methylation level of one or more CpG positions. For example, but not limited to, the methylation state or level is determined by means of at least one selected from the group comprising amplification method, PCR method, isothermal amplification method, NASBA method, LCR method, methylation specific amplification method, MSP (Methylation Specific PCR) method, nested MSP method, HeavyMethyl™ method, detection method, methylation specific detection method, bisulfite sequencing method, detection by means of DNA-arrays, detection by means of oligonucleotide microarrays, detection by means of CpG-island-microarrays, detection by means of restriction enzymes, detection by means of methylation sensitive restriction enzymes simultaneous methylation specific amplification and detection method, COBRA method, real-time PCR, HeavyMethyl™ real time PCR method, MSP MethyLight™ method, MethyLight™ method, MethyLight™ Algo™ method, QM method, Headloop MethyLight™ method, HeavyMethyl™ MethyLight™ method, HeavyMethyl™ Scorpion™ method, MSP Scorpion™ method, Headloop Scorpion™ method, methylation sensitive primer extension, Ms-SNuPE (Methylation-sensitive Single Nucleotide Primer Extension) method, and proteins binding specifically methylated or unmethylated DNA like the proteins MeCP2, MBD1, MBD2, MBD4, Kaiso or any domain thereof like but not limited to the CXXC-3 domain of the MBD1 protein or methylation-specific antibodies, e.g. anti-5-methylcytosine anti-bodies.
3. Comparing the said first and second profile with each other or with reference profiles.
4. Deducing the presence or absence of side effects, wherein said side effects are characterized in that changes are introduced into regions of the genome which were not target of the genetic modification. This application is of particular interest to exclude unwanted physiological alterations for the individual. The reason for this unwanted physiological alterations are mainly caused by genetic modification of non-target genomic DNA regions.

[0414] According to a particular preferred embodiment, the at least one untreated sample is derived before the gene therapy and the at least one treated sample is derived after said gene therapy.

[0415] In a preferred embodiment, at least one of the provided markers is applied for the characterization, identification, or labelling of corresponding tissue or combinations thereof. Said embodiment is of particular use in the field of tissue bank storage and proliferation. Furthermore it can be used in a prospective as well as in a retrospective manner. The provided markers allow the individualization of samples by a precise molecular method. This is mandatory in storing biological material from patients or healthy individuals. In addition, this also advantageous for isolation or purification of tissues cells. As an example, but not limited to it, this application is illustrated in more detail for the marker TCN2 SEQ ID NO: 470. All other markers of Table 8L are applied and used like TCN2 SEQ ID NO: 470 for sperm. The other herein provided markers are applied and used according their assignment to the Tables 8 A-L or Tables 9 A-J. Of course, corresponding markers can also be alternatively used. Thereby corresponding markers of TCN2 SEQ ID NO: 470 are, for example but not limited to, genomic DNA derived from or associated with TCN2 SEQ ID NO: 470; methylation specifically converted DNA derived from TCN2 SEQ ID NO: 470; mRNA, cDNA, protein, or peptide each of which derived at least in parts from TCN2 SEQ ID NO: 470. If the case may be, a person skilled in the art knows how to adjust the presented procedures. As shown in Table 6, TCN2 SEQ ID NO: 470 is a marker for sperm because the CpG dinucleotides of TCN2 SEQ ID NO: 470 are methylated within the range of 75-100% in sperm and to only an extend of 0-25% in T-lymphocytes (CD4, CD8), embryonic tissue (embryonic liver, embryonic skeletal muscle), skin (melanocytes, keratinocytes, fibroblasts), placenta, liver, heart muscle, or skeletal muscle.

[0416] Correspondingly, for example but not limited to it, a method for characterizing a tissue or cell, comprises

1. Providing of at least one sample comprising genomic DNA. The genomic DNA is purified from said sample(s), preferably by means of a kit. A person skilled in the art is aware of suitable kits. For example, but not limited to it, the kit for purification of genomic DNA is the DNeasy Tissue Kit (Qiagen) or the Wizard Genomic DNA Purification kit (Promega).
2. Characterizing each sample by determining the methylation state or the methylation level of at least one CpG position within the sequence of TCN2 SEQ ID NO: 470 of the provided sample(s). Thereby a profile is generated comprising the methylation information of all characterized CpG positions of TCN2 SEQ ID NO: 470 of the respective sample(s). A person skilled in the art knows how to determine the methylation state or the methylation level of one or more CpG positions. For example, but not limited to, the methylation state or level is determined by means of at least one selected from the group comprising amplification method, PCR method, isothermal amplification method, NASBA method, LCR method, methylation specific amplification method, MSP (Methylation Specific PCR) method, nested MSP method, HeavyMethyl™ method, detection method, methylation specific detection method, bisulfite sequencing method, detection by means of DNA-arrays, detection by means of oligonucleotide microarrays, detection by means of CpG-island-microarrays, detection by means of restriction enzymes, detection by means of methylation sensitive restriction enzymes simultaneous methylation specific amplification and detection method, COBRA method, real-time PCR, HeavyMethyl™ real time PCR method, MSP MethyLight™ method, MethyLight™ method, MethyLight™ Algo™ method, QM method, Headloop MethyLight™ method, HeavyMethyl™ MethyLight™ method, HeavyMethyl™ Scorpion™ method, MSP Scorpion™ method, Headloop Scorpion™ method, methylation sensitive primer extension, Ms-SNuPE (Methylation-sensitive Single Nucleotide Primer Extension) method, and proteins binding specifically methylated or unmethylated DNA like the proteins MeCP2, MBD1, MBD2, MBD4, Kaiso or any domain thereof like but not limited to the CXXC-3 domain of the MBD1 protein or methylation-specific antibodies, e.g. anti-5-methylcytosine antibodies.

[0417] For example but not limited to it, a method for labelling a tissue or cell, comprises in addition to the said method for characterizing a tissue or cell:

3. Labelling said tissue or cell by means of the methylation status or level of one or more of the analyzed CpG positions of TCN2 SEQ ID NO: 470. According to a preferred embodiment the labelling is achieved by assigning at least one distinct methylation status or level of at least one analyzed CpG dinucleotide of TCN2 SEQ ID NO: 470 to said tissue or cell. Thereby the assigned methylation status or level(s) are specific for said tissue or cell.

[0418] For example but not limited to it, a method for identifying a tissue or cell, comprises in addition to the said method for characterizing a tissue or cell:

3. Identifying a tissue or cell or an individual from whom the sample is derived from by comparison of the determined TCN2 profile of said samples with a reference TCN2 profile.

[0419] For example but not limited to it, a method for profiling a tissue type or cell type, comprises in addition to the said method for characterizing a tissue or cell:

3. Comparing the determined TCN2 profiles of said samples with each other and/or with at least one reference TCN2 profile and considering the group of same methylation status or levels of correspondent CpG dinucleotides of different samples as a tissue type or cell type profile.

[0420] A person skilled in the art knows to combine the said methods for characterizing a tissue or cell; for labelling a tissue or cell; for identifying a tissue or cell; and for profiling a tissue type or cell type with state of the art methods for tissue or cell isolation or purification.

[0421] In a preferred embodiment, at least one of the provided markers is applied for controlling cell differentiation in stem-cell research and/or therapeutics. Cells undergo many genetic and/or epigenetic changes throughout differentiation. These changes influence the physiology of the cell and their control is mandatory in any procedure involving stem-cell in research and/or therapeutics. The provided markers enable to control this changes by giving a reference of the adult (completely differentiated) and embryonic (partially differentiated) status of the cells. As an example, but not limited to it, this application is illustrated in more detail for the marker RPL3 SEQ ID NO: 529. All other markers of Table 8H and Table 9G are applied and used like RPL3 SEQ ID NO: 529 for adult liver. The other herein provided markers are applied and used according their assignment to the Tables 8 A-L or Tables 9 A-J. Of course, corresponding markers can also be alternatively used. Thereby corresponding markers of RPL3 SEQ ID NO: 529 are, for example but not limited to, genomic DNA derived from or associated with RPL3 SEQ ID NO: 529; methylation specifically converted DNA derived from RPL3 SEQ ID NO: 529; mRNA, cDNA, protein, or peptide each of which derived at least in parts from RPL3 SEQ ID NO: 529. If the case may be, a person skilled in the art knows how to adjust the presented procedures. As shown in Table 6, RPL3 SEQ ID NO: 529 is a marker for sperm because the CpG dinucleotides of RPL3 SEQ ID NO: 529 are methylated within the range of 25-75% in adult liver and within the range of 75-100% in T-lymphocytes (CD4, CD8), embryonic tissue (embryonic liver, embryonic skeletal muscle), skin (melanocytes, keratinocytes, fibroblasts), placenta, sperm, heart muscle, or skeletal muscle.

[0422] Correspondingly, for example but not limited to it, a method for controlling cell differentiation in stem-cell research and/or therapeutics, comprises

1. Providing of a sample comprising genomic DNA. The genomic DNA is purified from said sample(s), preferably by means of a kit. A person skilled in the art is aware of suitable kits. For example, but not limited to it, the kit for purification of genomic DNA is the DNeasy Tissue Kit (Qiagen) or the Wizard Genomic DNA Purification kit (Promega).
2. Characterizing said sample by determining the methylation state or the methylation level of at least one CpG position within the sequence of RPL3 SEQ ID NO: 529 of the provided sample. Thereby a profile is generated comprising the methylation information of all characterized CpG positions of RPL3 SEQ ID NO: 529 of the respective sample. A person skilled in the art knows how to determine the methylation state or the methylation level of one or more CpG positions. For example, but not limited to, the methylation state or level is determined by means of at least one selected from the group comprising amplification method, PCR method, isothermal amplification method, NASBA method, LCR method, methylation specific amplification method, MSP (Methylation Specific PCR) method, nested MSP method, HeavyMethyl™ method, detection method, methylation specific detection method, bisulfite sequencing method, detection by means of DNA-arrays, detection by means of oligonucleotide microarrays, detection by means of CpG-island-microarrays, detection by means of restriction enzymes, detection by means of methylation sensitive restriction enzymes simultaneous methylation specific amplification and detection method, COBRA method, real-time PCR, HeavyMethyl™ real time PCR method, MSP MethyLight™ method, MethyLight™ method, MethyLight™ Algo™ method, QM method, Headloop MethyLight™ method, HeavyMethyl™ MethyLight™ method, HeavyMethyl™ Scorpion™ method, MSP Scorpion™ method, Headloop Scorpion™ method, methylation sensitive primer extension, Ms-SNuPE (Methylation-sensitive Single Nucleotide Primer Extension) method, and proteins binding specifically methylated or unmethylated DNA like the proteins MeCP2, MBD1, MBD2, MBD4, Kaiso or any domain thereof like but not limited to the CXXC-3 domain of the MBD1 protein or methylation-specific antibodies, e.g. anti-5-methylcytosine antibodies.
3. Comparing said RPL3 profile of said sample with at least one reference RPL3 profile and deducing therefrom if a desired differentiation status of one or more cells of the sample is met or not. Through this a controlling of cell differentiation is achieved.

[0423] According to Table 6, the herein provided markers are assigned to different tissues (see Tables 8 A-L or Tables 9 A-J). In the following, applications are described which are only applicable for the named tissue(s).

### CD4+ and CD8+ Lymphocytes:

[0424] In a preferred embodiment, the herein provided markers of Table 8A and Table 9A are used for the quantification of lymphocytes, in particular in peripheral blood.

[0425] Low number of leucocytes in blood (leucopenia) may indicate:
[0426] bone marrow failure (for example, due to infection, tumor, fibrosis),
[0427] presence of cytotoxic substance,
[0428] collagen-vascular diseases (such as lupus erythematosus),
[0429] disease of the liver or spleen,
[0430] exposure to radiation,

[0431] High number of leucocytes in blood (leucocytosis) may indicate:
[0432] infectious diseases,
[0433] inflammatory disease (such as rheumatoid arthritis or allergy),
[0434] leukemia,
[0435] severe emotional or physical stress,
[0436] tissue damage (for example, burns),
[0437] anemia.

[0438] Said markers enable the identification of CD4+ and CD8+ lymphocytes among other cells in blood samples. For example but not limited to it, the differential methylation of FBLN1 SEQ ID NO: 426 is used. According to Table 6, the differential methylation of FBLN1 SEQ ID NO: 426 is marker for CD4 T-lymphocytes as well as for CD8 T-lymphocytes because the CpG dinucleotides of FBLN1 SEQ ID NO: 426 are methylated within the range of 25-75% in CD4 and CD8 T-lymphocytes while other tissues show a different extend of methylation. Of course, corresponding markers can also be alternatively used. Thereby corresponding markers of FBLN1 SEQ ID NO: 426 are, for example but not limited to, genomic DNA derived from or associated with FBLN1 SEQ ID NO: 426; methylation specifically converted DNA derived from FBLN1 SEQ ID NO: 426; mRNA, cDNA, protein, or peptide each of which derived at least in parts from FBLN1 SEQ ID NO: 426. If the case may be, a person skilled in the art knows how to adjust the presented procedures.

[0439] Correspondingly, for example but not limited to it, a method for the quantification of CD4 and/or CD8 T-lymphocytes, comprises:

1. Providing of a sample, comprising genomic DNA;
2. Contacting the genomic DNA or a derivative of it with at least one probe which is specific for at least one differentially methylated CpG position of the marker FBLN1 SEQ ID NO: 426. Said probe is selected from the group comprising antibody; 5-methylcytosine specific antibody (e.g. AbCam Cat. No. ab1884); affinity binding protein; protein binding specifically methylated or unmethylated DNA like MeCP2, MBD1, MBD2, MBD4, Kaiso or any domain thereof; nucleic acid; DNA, RNA, PNA or nucleic acid derivative specific for the methylated sequence. In addition, the probe is labeled directly or indirectly with a dye, protein, enzyme, metal, bead or chemical compound suitable for detection.
3. Performing a detection reaction by means of the probe and/or the label. A person skilled in the art is aware of suitable detection reactions. For example, but not limited to, the detection reaction comprises Rabbit Peroxidase Anti-Peroxidase (PAP) Soluble Complex (Rockland Catalog#: P300-002); radioactive labeled probes; or probes fluorescently labeled like DNA probes coupled with Cy5 (Invitrogen). A person skilled in the art knows further suitable methods for detection.
4. Quantifying the detection reaction in a manner so that the detected signal is indicative for the amount of probe or label therewith also for the amount of CD4 and/or CD8 T-lymphocytes. A person knows suitable methods for quantification.

[0440] In a particular preferred embodiment, the said method is also a method for isolation of CD4 and CD8 T-lymphocytes. Said method additional comprises the separation of CD4 and CD8 T-lymphocytes from other cells, tissue, or molecules of a sample by means of the said probes and/or labels attached to one or more differentially methylated CpG position of FBLN1 SEQ ID NO: 426 in CD4 and CD8 T-lymphocytes. A person skilled in the art knows suitable methods for separation of labeled cells form unlabeled cells, tissue, or molecules.

[0441] Alternatively, for example but not limited to, a method for quantifying the number of CD4 and/or CD8 T-lymphocytes comprises:

1. Providing of a sample, the sample comprising one or more cells or genomic DNA. The genomic DNA is purified from said sample, preferably by means of a kit. A person skilled in the art is aware of suitable kits. For example, but not limited to it, the kit for purification of genomic DNA is the DNeasy Tissue Kit (Qiagen) or the Wizard Genomic DNA Purification kit (Promega).
2. Determining the methylation level of at least one CpG position within the sequence of FBLN1 SEQ ID NO: 426 of the provided sample. A person skilled in the art knows how to determine the methylation level of one or more CpG positions. For example, but not limited to, the methylation state or level is determined by means of at least one selected from the group comprising amplification method, PCR method, isothermal amplification method, NASBA method, LCR method, methylation specific amplification method, MSP (Methylation Specific PCR) method, nested MSP method, HeavyMethyl™ method, detection method, methylation specific detection method, bisulfite sequencing method, detection by means of DNA-arrays, detection by means of oligonucleotide microarrays, detection by means of CpG-island-microarrays, detection by means of restriction enzymes, detection by means of methylation sensitive restriction enzymes simultaneous methylation specific amplification and detection method, COBRA method, real-time PCR, HeavyMethyl™ real time PCR method, MSP MethyLight™ method, MethyLight™ method, MethyLight™ Algo™ method, QM method, Headloop MethyLight™ method, HeavyMethyl™ MethyLight™ method, HeavyMethyl™ Scorpion™ method, MSP Scorpion™ method, Headloop Scorpion™ method, methylation sensitive primer extension, Ms-SNuPE (Methylation-sensitive Single Nucleotide Primer Extension) method, and proteins binding specifically methylated or unmethylated DNA like the proteins MeCP2, MBD1, MBD2, MBD4, Kaiso or any domain thereof like but not limited to the CXXC-3 domain of the MBD1 protein or methylation-specific antibodies, e.g. anti-5-methylcytosine antibodies.
3. Quantifying the number of CD4 and/or CD8 T-lymphocytes by comparing the determined one or more methylation levels of the sample with the respective herein provided one or more methylation levels of CD4 and/or CD8 T-lymphocytes and with at least one methylation level representing the correspondent tissue, group of cells, or cell of a healthy individual.

[0442] In a preferred embodiment, the markers of Table 8A and Table 9A are used to study the CD4 and/or CD8 T-lymphocyte infiltration in other tissues healthy or diseased. Infiltration of lymphocytes in healthy or diseased tissues is an indication of several diseases such immunological malignances or even in tumor development. The said markers represent a target for the development of molecular probes that coupled to any detection method (e.g. Fluorescent dye) allow the identification of these cells in histological preparations. For example but not limited to it, the differential methylation of HLA-DPB SEQ ID NO: 416 is used. According to Table 6, the differential methylation of HLA-DPB SEQ ID NO: 416 is marker for CD4 T-lymphocytes as well as for CD8 T-lymphocytes because the CpG dinucleotides of HLA-DPB SEQ ID NO: 416 are methylated within the range of 75-100% in CD4 and CD8 T-lymphocytes while other tissues show a different extend of methylation. Of course, corresponding markers can also be alternatively used. Thereby corresponding markers of HLA-DPB SEQ ID NO: 416 are, for example but not limited to, genomic DNA derived from or associated with HLA-DPB SEQ ID NO: 416; methylation specifically converted DNA derived from HLA-DPB SEQ ID NO: 416; mRNA, cDNA, protein, or peptide each of which derived at least in parts from HLA-DPB SEQ ID NO: 416. If the case may be, a person skilled in the art knows how to adjust the presented procedures.

[0443] Correspondingly, for example but not limited to it, a method for detection of infiltrated CD4 and/or CD8 T-lymphocytes comprises:
[0444] 1. Providing of a sample, comprising genomic DNA;
[0445] 2. Contacting the genomic DNA or a derivative of it with at least one probe which is specific for at least one differentially methylated CpG position of the marker HLA-DPB SEQ ID NO: 416. Said probe is selected from the group comprising antibody; 5-methylcytosine specific antibody (e.g. AbCam Cat. No. ab1884); affinity binding protein; protein binding specifically methylated or unmethylated DNA like MeCP2, MBD1, MBD2, MBD4, Kaiso or any domain thereof; nucleic acid; DNA, RNA, PNA or nucleic acid derivative specific for the methylated sequence. In addition, the probe is labeled directly or indirectly with a dye, protein, enzyme, metal, bead or chemical compound suitable for detection.
[0446] 3. Performing a detection reaction by means of the probe and/or the label. A person skilled in the art knows of suitable detection reactions. For example, but not limited to, the detection reaction comprises Rabbit Peroxidase Anti-Peroxidase (PAP) Soluble Complex (Rockland Catalog#: P300-002); radioactive labeled probes; or probes fluorescently labeled like DNA probes coupled with Cy5 (Invitrogen).

[0447] According to a preferred embodiment, said method is performed in a histological manner. A person skilled in the art knows how to carried such a method. For example, but not limited to, the providing of the sample comprises the making of sample sections suitable for histological analysis.

[0448] In a preferred embodiment, the markers of Table 8A and Table 9A are used to identify, isolate and/or purify CD4 T-lymphocytes and/or CD8 T-lymphocytes, in particular from surrounding tissue infiltrated by the T-lymphocytes; from blood; and/or from other body fluids. For example but not limited to it, the differential methylation of APOBEC3B SEQ ID NO: 474 is used. According to Table 6, the differential methylation of APOBEC3B SEQ ID NO: 474 is a marker for CD4 T-lymphocytes as well as for CD8 T-lymphocytes because the CpG dinucleotides of APOBEC3B SEQ ID NO: 474 are methylated within the range of 0-25% in CD4 and CD8 T-lymphocytes while other tissues show a different extend of methylation. Of course, corresponding markers can also be alternatively used. Thereby corresponding markers of APOBEC3B SEQ ID NO: 474 are, for example but not limited to, genomic DNA derived from or associated with APOBEC3B SEQ ID NO: 474; methylation specifically converted DNA derived from APOBEC3B SEQ ID NO: 474; mRNA, cDNA, protein, or peptide each of which derived at least in parts from APOBEC3B SEQ ID NO: 474. If the case may be, a person skilled in the art knows how to adjust the presented procedures.

[0449] Correspondingly, for example but not limited to, a method for identifying CD4 T-lymphocytes and/or CD8 T-lymphocytes comprises:

1. Providing of a sample, the sample comprising genomic DNA.
2. Binding of at least one probe to one or more CpG positions within the sequence of APOBEC3B SEQ ID NO: 474 of the provided sample. Thereby a probe binds specifically with respect to the methylation status of said one or more CpG positions. A probe is either a protein, peptide, nucleic acid, RNA or DNA for example but not limited to, an antibody specific for 5-methylcytosine (e.g. AbCAM Cat. No. ab1884); a methyl-binding protein such as the proteins MeCP2, MBD1, MBD2, MBD4, Kaiso or any domain thereof; or a nucleic acid probe that is specific for the methylated sequence. According to some preferred embodiments, the said probe(s) are labeled with a tag suitable for detection of the probe, isolation of one or more cells, and/or purification of one or more cells. A person skilled in the art knows suitable methods to carry out this step.
3. Identifying CD4 and/or CD8 T-lymphocytes by detecting the bound probes and/or their respective label(s). A person skilled in the art knows suitable methods for detection of said probes or labels.

[0450] For example but not limited to, a method for isolating and/or purifying CD4 and/or CD8 T-lymphocytes comprises in addition to the steps of the said method for identifying CD4 T-lymphocytes and/or CD8 T-lymphocytes:

3. Isolating and/or purifying of the identified CD4 and/or CD8 T-lymphocytes from the provided sample by means of the attached probes and their corresponding tags, respectively. A person skilled in the art knows suitable methods. Said methods are based on chemical, physical or biological properties of the attached probes or corresponding tags. For example but not limited to, the isolation is performed (i) by means of affinity cromatography, wherein the probe is attached to a tag that is recognized by an antibody immobilized on a column; (ii) by means of magnetic beads, wherein a magnetic bead is directly or indirectly bound to an attached probe and wherein a magnetic field is applied; or (iii) by means of fluorescent activated cell sorting, wherein the used tag is a fluorescent dye.

[0451] According to a preferred embodiment, the isolated or purified CD4 and/or CD8 T-lymphocytes are quantified by means of the attached probes and/or their corresponding tags. A person skilled in the art knows suitable methods. For example, but not limited to by cell counting manually or by automatic means.

[0452] In a preferred embodiment, the markers of Table 8A and Table 9A are used for the identification of an individual. Thereby at least two samples are used. One samples is obtained from an individual and another sample is a forensic sample, in particular traces of body cells, tissues or fluids for example but not limited to traces of blood and/or body fluids. This embodiment is of particular use in the field of forensic medicine or of legal medicine. As constituent of blood or body fluids, CD4 T-lymphocytes and CD8 T-lymphocytes are part of the mentioned traces. The said markers have the advantage of being stable over time because they are DNA based. In addition said markers have the advantage that they enable a highly detailed and accurate characterization of samples. Through this an unambiguous identification of an individual is enabled. For example but not limited to it, the differential methylation of GPX5 SEQ ID NO: 574 is used. According to Table 6, the differential methylation of GPX5 SEQ ID NO: 574 is a marker for CD4 T-lymphocytes as well as for CD8 T-lymphocytes because the CpG dinucleotides of GPX5 SEQ ID NO: 574 are methylated within the range of 0-25% in CD4 and CD8 T-lymphocytes while other tissues show a different extend of methylation. Of course, corresponding markers can also be alternatively used. Thereby corresponding markers of GPX5 SEQ ID NO: 574 are, for example but not limited to, genomic DNA derived from or associated with GPX5 SEQ ID NO: 574; methylation specifically converted DNA derived from GPX5 SEQ ID NO: 574; mRNA, cDNA, protein, or peptide each of which derived at least in parts from GPX5 SEQ ID NO: 574. If the case may be, a person skilled in the art knows how to adjust the presented procedures.

[0453] Correspondingly, for example but not limited to it, a method for the identification of an individual, comprises

1. Providing at least two samples. One sample is collected from an individual. Another sample is a forensic sample. Each of the provided samples comprises genomic DNA. The genomic DNA is purified from said samples, preferably by means of a kit. A person skilled in the art is aware of suitable kits. For example, but not limited to it, the kit for purification of genomic DNA is the DNeasy Tissue Kit (Qiagen) or the Wizard Genomic DNA Purification kit (Promega).
2. Characterizing each sample by determining the methylation state or the methylation level of at least one CpG position within the sequence of GPX5 SEQ ID NO: 574 of the provided samples. Thereby a profile is generated comprising the methylation information of all characterized CpG positions GPX5 SEQ ID NO: 574 of the respective samples. A person skilled in the art knows how to determine the methylation state or the methylation level of one or more CpG positions. For example, but not limited to, the methylation state or level is determined by means of at least one selected from the group comprising amplification method, PCR method, isothermal amplification method, NASBA method, LCR method, methylation specific amplification method, MSP (Methylation Specific PCR) method, nested MSP method, HeavyMethyl™ method, detection method, methylation specific detection method, bisulfite sequencing method, detection by means of DNA-arrays, detection by means of oligonucleotide microarrays, detection by means of CpG-island-microarrays, detection by means of restriction enzymes, detection by means of methylation sensitive restriction enzymes simultaneous methylation specific amplification and detection method, COBRA method, real-time PCR, HeavyMethyl™ real time PCR method, MSP MethyLight™ method, MethyLight™ method, MethyLight™ Algo™ method, QM method, Headloop MethyLight™ method, HeavyMethyl™ MethyLight™ method, HeavyMethyl™ Scorpion™ method, MSP Scorpion™ method, Headloop Scorpion™ method, methylation sensitive primer extension, Ms-SNuPE (Methylation-sensitive Single Nucleotide Primer Extension) method, and proteins binding specifically methylated or unmethylated DNA like the proteins MeCP2, MBD1, MBD2, MBD4, Kaiso or any domain thereof like but not limited to the CXXC-3 domain of the MBD1 protein or methylation-specific antibodies, e.g. anti-5-methylcytosine antibodies.
3.Comparing the GPX5 profile of the forensic sample with one or more profiles of the samples collected from individual. An individual is identified wherein the GXP5 profile matches the profile of the sample of said individual. In alternative preferred embodiments, the forensic sample and the samples collected from individuals are collected or processed not at the same time.

[0454] In a preferred embodiment, the markers of Table 8A and Table 9A are used to diagnose the presence or absence of a disease. Thereby the number of CD4 T-lymphocytes, CD8 T-lymphocytes or both is quantified in normalized samples of healthy individuals. The determined number of CD4 T-lymphocytes, CD8 T-lymphocytes or both are then considered as indicative for healthy condition or a diseased condition with respect to an individual. Preferably, large amount of normalized samples are considered to generate reference values of CD4 T-lymphocytes, CD8 T-lymphocytes or both for a healthy condition and/or for one or more diseased conditions. The diseased condition can be any kind of diseased condition. Preferably, the diseased condition is a disease which causes a immune reaction. For example but not limited to the diseased condition is a cancer disease, a cell proliferation disease, or HIV. Preferably the total number of cells present in a sample is determined. The number of CD4 T-lymphocytes, CD8 T-lymphocytes or both are then normalized to the total number of cells. For example but not limited to it, the differential methylation of SYNE1 SEQ ID NO: 558 is used. According to Table 6, the differential methylation of SYNE1 SEQ ID NO: 558 is a marker for CD4 T-lymphocytes, for CD8 T-lymphocytes as well as sperm because the CpG dinucleotides of SYNE1 SEQ ID NO: 558 are methylated within the range of 75-100% in CD4 T-lymphocytes, CD8 T-lymphocytes and sperm while other tissues show a different extend of methylation. Because sperm can be easily morphologically distinguished from CD4 or CD8 T-lymphocytes, this marker can be used in the following described application. Of course, corresponding markers can also be alternatively used. Thereby corresponding markers of SYNE1 SEQ ID NO: 558 are, for example but not limited to, genomic DNA derived from or associated with SYNE1 SEQ ID NO: 558; methylation specifically converted DNA derived from SYNE1 SEQ ID NO: 558; mRNA, cDNA, protein, or peptide each of which derived at least in parts from SYNE1 SEQ ID NO: 558. If the case may be, a person skilled in the art knows how to adjust the presented procedures.

[0455] Correspondingly, for example but not limited to it, a method for diagnosing the absence or presence of a diseased or healthy condition for an individual, comprises
[0456] 1. Providing a sample, comprising genomic DNA.
[0457] 2. Determining the number of CD4 T-lymphocytes, CD8 T-lymphocytes or both by detecting the methylation status or level of at least one CpG position within the sequence of SYNE1 SEQ ID NO: 558 of the provided samples. A person skilled in the art knows how to determine the methylation state or the methylation level of one or more CpG positions. For example, but not limited to, the methylation state or level is determined by means of at least one selected from the group comprising amplification method, PCR method, isothermal amplification method, NASBA method, LCR method, methylation specific amplification method, MSP (Methylation Specific PCR) method, nested MSP method, HeavyMethyl™ method, detection method, methylation specific detection method, bisulfite sequencing method, detection by means of DNA-arrays, detection by means of oligonucleotide microarrays, detection by means of CpG-island-microarrays, detection by means of restriction enzymes, detection by means of methylation sensitive restriction enzymes simultaneous methylation specific amplification and detection method, COBRA method, real-time PCR, HeavyMethyl™ real time PCR method, MSP MethyLight™ method, MethyLight™ method, MethyLight™ Algo™ method, QM method, Headloop MethyLight™ method, HeavyMethyl™ MethyLight™ method, HeavyMethyl™ Scorpion™ method, MSP Scorpion™ method, Headloop Scorpion™ method, methylation sensitive primer extension, Ms-SNuPE (Methylation-sensitive Single Nucleotide Primer Extension) method, and proteins binding specifically methylated or unmethylated DNA like the proteins MeCP2, MBD1, MBD2, MBD4, Kaiso or any domain thereof like but not limited to the CXXC-3 domain of the MBD1 protein or methylation-specific antibodies, e.g. anti-5-methylcytosine antibodies.
[0458] 3. Normalizing the determined number of CD4 T-lymphocytes, CD8 T-lymphocytes or CD4 T-lymphocytes and CD8 T-lymphocytes. A person skilled in the art knows suitable methods for normalization. For example but not limited to the determined number of CD4 T-lymphocytes, CD8 T-lymphocytes or CD4 T-lymphocyte and CD8 T-lymphocytes is normalized to the number of total cell contained the provided sample.
   1. In a preferred embodiment, step 2 is performed in a histological, immunohistological and/or immunocytological manners. A person skilled in the art knows suitable methods for carrying out step 2 in histological, immunohistological and/or immunocytological manners for example but not limited to in situ hybridization, antibody stainings, or FACS. In another preferred embodiment, step 2 is performed by means of molecular biological methods. A person skilled in the art knows also suitable methods therefor for example but not limited to real time PCR based methods or hybridization based methods (Microarrays).

### Embryonic

[0459] In a preferred embodiment, the herein provided markers of Table 8B, Table 8C, Table 9B and Table 9C are used for the study, identification and/or quantification of fetal cells or fetal DNA circulating in maternal blood and/or amniotic fluid. During pregnancy cells and DNA from the fetus are continuously brought to the maternal blood stream as well as the amniotic fluid. Fetal cells and fetal DNA have a diagnostic potential in monitoring the health status of the fetus as reviewed by Bianchi D, 2004 (Bianchi D W. Circulating fetal DNA: its origin and diagnostic potential-a review. Placenta. 2004 April; 25 Suppl A:S93-S100). For example but not limited to it, the differential methylation of CTA-384D8.15 SEQ ID NO: 509 is used. According to Table 6, the differential methylation of CTA-384D8.15 SEQ ID NO: 509 is a marker for embryonic liver because the CpG dinucleotides of CTA-384D8.15 SEQ ID NO: 509 are methylated within the range of 25-75% in embryonic liver while other tissues show a different extend of methylation. Of course, corresponding markers can also be alternatively used. Thereby corresponding markers of CTA-384D8.15 SEQ ID NO: 509 are, for example but not limited to, genomic DNA derived from or associated with CTA-384D8.15 SEQ ID NO: 509; methylation specifically converted DNA derived from CTA-384D8.15 SEQ ID NO: 509; mRNA, cDNA, protein, or peptide each of which derived at least in parts from CTA-384D8.15 SEQ ID NO: 509. If the case may be, a person skilled in the art knows how to adjust the presented procedures.

[0460] Correspondingly, for example but not limited to, a method for identifying fetal cells or fetal DNA comprises:

1. Providing of a sample, the sample comprising one or more cells or genomic DNA.
2. Binding of at least one probe to one or more CpG positions within the sequence of CTA-384D8.15 SEQ ID NO: 509 of the provided sample. Thereby a probe binds specifically with respect to the methylation status of said one or more CpG positions. A probe is either a protein, peptide, nucleic acid, RNA or DNA for example but not limited to, an antibody specific for 5-methylcytosine (e.g. AbCAM Cat. No. ab1884); a methyl-binding protein such as the proteins MeCP2, MBD1, MBD2, MBD4, Kaiso or any domain thereof; or a nucleic acid probe that is specific for the methylated sequence. According to some preferred embodiments, the said probe(s) are labeled with a tag suitable for detection of the probe, isolation of one or more cells, and/or purification of one or more cells. A person skilled in the art knows suitable methods to carry out this step.
3. Identifying fetal cells or fetal genomic DNA by detecting the bound probes and/or their respective label(s). A person skilled in the art knows suitable methods for detection of said probes or labels.

[0461] In preferred embodiments, a probe of step 2 binds specifically with respect to the methylation status of 1, 2, 3, 4, 5, 6, 7, 8, 9, 10, 11, 12, 13, 14, 15, 16, 17, 18, 19, 20, 22, 25, or 30 CpG dinucleotides.

[0462] For example but not limited to, a method for isolating and/or purifying fetal cells or fetal genomic DNA comprises in addition to the steps of the said method for identifying fetal cells or fetal genomic DNA:

3. Isolating and/or purifying of the identified fetal cells or fetal genomic DNA from the provided sample by means of the attached probes and their corresponding tags, respectively. A person skilled in the art knows suitable methods. Said methods are based on chemical, physical or biological properties of the attached probes or corresponding tags. For example but not limited to, the isolation is performed (i) by means of affinity cromatography, wherein the probe (e.g. a nucleic acid) is directly or indirectly bound to a solid surface; (ii) by means of affinity cromatography, wherein the probe is attached to a tag that is recognized by an antibody immobilized on a column; (iii) by means of magnetic beads, wherein a magnetic bead is directly or indirectly bound to an attached probe and wherein a magnetic field is applied; or (iv) by means of fluorescent activated cell sorting, wherein the used tag is a fluorescent dye.

[0463] According to a preferred embodiment, the isolated or purified fetal cells or fetal genomic DNA are quantified by means of the attached probes and/or their corresponding tags. A person skilled in the art knows suitable methods. For example, but not limited to by cell counting manually or by automatic means. According to a preferred embodiment, the isolated or purified fetal genomic DNA is quantified by means of at least one selected from the group comprising amplification method, PCR method, isothermal amplification method, NASBA method, LCR method, methylation specific amplification method, MSP (Methylation Specific PCR) method, nested MSP method, HeavyMethyl™ method, detection method, methylation specific detection method, bisulfite sequencing method, detection by means of DNA-arrays, detection by means of oligonucleotide microarrays, detection by means of CpG-island-microarrays, detection by means of restriction enzymes, detection by means of methylation sensitive restriction enzymes simultaneous methylation specific amplification and detection method, COBRA method, real-time PCR, HeavyMethyl™ real time PCR method, MSP MethyLight™ method, MethyLight™ method, MethyLight™ Algo™ method, QM method, Headloop MethyLight™ method, HeavyMethyl™ MethyLight™ method, HeavyMethyl™ Scorpion™ method, MSP Scorpion™ method, Headloop Scorpion™ method, methylation sensitive primer extension, Ms-SNuPE (Methylation-sensitive Single Nucleotide Primer Extension) method.

[0464] Alternatively, for example but not limited to, a method for quantifying the number of fetal cells or the amount of fetal genomic DNA comprises:

1. Providing of a sample, the sample comprising one or more cells or genomic DNA. The genomic DNA is purified from said sample, preferably by means of a kit. A person skilled in the art is aware of suitable kits. For example, but not limited to it, the kit for purification of genomic DNA is the DNeasy Tissue Kit (Qiagen) or the Wizard Genomic DNA Purification kit (Promega).
2. Determining the methylation level of at least one CpG position within the sequence of CTA-384D8.15 SEQ ID NO: 509 of the provided sample. A person skilled in the art knows how to determine the methylation state or the methylation level of one or more CpG positions. For example, but not limited to, the methylation state or level is determined by means of at least one selected from the group comprising amplification method, PCR method, isothermal amplification method, NASBA method, LCR method, methylation specific amplification method, MSP (Methylation Specific PCR) method, nested MSP method, HeavyMethyl™ method, detection method, methylation specific detection method, bisulfite sequencing method, detection by means of DNA-arrays, detection by means of oligonucleotide microarrays, detection by means of CpG-island-microarrays, detection by means of restriction enzymes, detection by means of methylation sensitive restriction enzymes simultaneous methylation specific amplification and detection method, COBRA method, real-time PCR, HeavyMethyl™ real time PCR method, MSP MethyLight™ method, MethyLight™ method, MethyLight™ Algo™ method, QM method, Headloop MethyLight™ method, HeavyMethyl™ MethyLight™ method, HeavyMethyl™ Scorpion™ method, MSP Scorpion™ method, Headloop Scorpion™ method, methylation sensitive primer extension, Ms-SNuPE (Methylation-sensitive Single Nucleotide Primer Extension) method, and proteins binding specifically methylated or unmethylated DNA like the proteins MeCP2, MBD1, MBD2, MBD4, Kaiso or any domain thereof like but not limited to the CXXC-3 domain of the MBD1 protein or methylation-specific antibodies, e.g. anti-5-methylcytosine antibodies.
3. Quantifying the number of fetal cells or the amount of fetal genomic DNA by comparing the determined one or more methylation levels of the sample with the respective herein provided one or more methylation levels specific for embryonic liver and/or embryonic skeletal muscle and with at least one methylation level representing the correspondent tissue, group of cells, or cell comprising no placental DNA.

[0465] For example but not limited to it, a method for characterizing one or more fetal cells or fetal genomic DNA comprises

1. Providing of a sample comprising one or more fetal cells or fetal genomic DNA. The fetal cell(s) or the fetal genomic DNA are isolated for example but not limited to the methods described herein.
2. Characterizing said sample by determining the methylation state or the methylation level of at least one CpG position within the sequence of CTA-384D8.15 SEQ ID NO: 509 of the provided sample. Thereby a profile is generated comprising the methylation information of all characterized CpG positions of CTA-384D8.15 SEQ ID NO: 509 of the respective sample. A person skilled in the art knows how to determine the methylation state or the methylation level of one or more CpG positions. For example, but not limited to, the methylation state or level is determined by means of at least one selected from the group comprising amplification method, PCR method, isothermal amplification method, NASBA method, LCR method, methylation specific amplification method, MSP (Methylation Specific PCR) method, nested MSP method, HeavyMethyl™ method, detection method, methylation specific detection method, bisulfite sequencing method, detection by means of DNA-arrays, detection by means of oligonucleotide microarrays, detection by means of CpG-island-microarrays, detection by means of restriction enzymes, detection by means of methylation sensitive restriction enzymes simultaneous methylation specific amplification and detection method, COBRA method, real-time PCR, HeavyMethyl™ real time PCR method, MSP MethyLight™ method, MethyLight™ method, MethyLight™ Algo™ method, QM method, Headloop MethyLight™ method, HeavyMethyl™ MethyLight™ method, HeavyMethyl™ Scorpion™ method, MSP Scorpion™ method, Headloop Scorpion™ method, methylation sensitive primer extension, Ms-SNuPE (Methylation-sensitive Single Nucleotide Primer Extension) method, and proteins binding specifically methylated or unmethylated DNA like the proteins MeCP2, MBD1, MBD2, MBD4, Kaiso or any domain thereof like but not limited to the CXXC-3 domain of the MBD1 protein or methylation-specific antibodies, e.g. anti-5-methylcytosine antibodies.

[0466] In a preferred embodiment of step 1, the genomic DNA comprising fetal genomic DNA is isolated/purified from the provided sample, preferably by means of a kit. A person skilled in the art is aware of suitable kits. For example, but not limited to it, the kit for purification of genomic DNA is the DNeasy Tissue Kit (Qiagen) or the Wizard Genomic DNA Purification kit (Promega). In a preferred embodiment the determined CTA-384D8.15 profile is compared with one or more CTA-384D8.15 profiles of obtained from other samples and/or with one or more CTA-384D8.15 reference profiles.

[0467] In a preferred embodiment, the herein provided markers of Table 8B, Table 8C, Table 9B and Table 9C are used for the study, identification and/or quantification of fetal cells or fetal DNA from amniocentesis and/or chorionic villus sampling. Said embodiment is of particular use in the field of prenatal diagnosis. Prenatal diagnosis procedures involve the study of fetal cells obtained by amniocentesis and chorionic villus biopsies. For example but not limited to it, the differential methylation of CRYBA4 SEQ ID NO: 476 is used. According to Table 6, the differential methylation of CRYBA4 SEQ ID NO: 476 is a marker for embryonic liver and embryonic skeletal muscle because the CpG dinucleotides of CRYBA4 SEQ ID NO: 476 are methylated within the range of 25-75% in embryonic liver or embryonic skeletal muscle while other tissues show a different extend of methylation. Of course, corresponding markers can also be alternatively used. Thereby corresponding markers of CRYBA4 SEQ ID NO: 476 are, for example but not limited to, genomic DNA derived from or associated with CRYBA4 SEQ ID NO: 476; methylation specifically converted DNA derived from CRYBA4 SEQ ID NO: 476; mRNA, cDNA, protein, or peptide each of which derived at least in parts from CRYBA4 SEQ ID NO: 476. If the case may be, a person skilled in the art knows how to adjust the presented procedures.

[0468] Correspondingly, for example but not limited to, a method for identifying fetal cells or fetal DNA comprises:

1. Providing of a sample, the sample comprising one or more cells or genomic DNA.
2. Binding of at least one probe to one or more CpG positions within the sequence of CRYBA4 SEQ ID NO: 476 of the provided sample. Thereby a probe binds specifically with respect to the methylation status of said one or more CpG positions. A probe is either a protein, peptide, nucleic acid, RNA or DNA for example but not limited to, an antibody specific for 5-methylcytosine (e.g. AbCAM Cat. No. ab1884); a methyl-binding protein such as the proteins MeCP2, MBD1, MBD2, MBD4, Kaiso or any domain thereof; or a nucleic acid probe that is specific for the methylated sequence. According to some preferred embodiments, the said probe(s) are labeled with a tag suitable for detection of the probe, isolation of one or more cells, and/or purification of one or more cells. A person skilled in the art knows suitable methods to carry out this step.
3. Identifying fetal cells or fetal genomic DNA by detecting the bound probes and/or their respective label(s). A person skilled in the art knows suitable methods for detection of said probes or labels.

[0469] In preferred embodiments, a probe of step 2 binds specifically with respect to the methylation status of 1, 2, 3, 4, 5, 6, 7, 8, 9, 10, 11, 12, 13, 14, 15, 16, 17, 18, 19, 20, 22, 25, or 30 CpG dinucleotides.

[0470] For example but not limited to, a method for isolating and/or purifying fetal cells or fetal genomic DNA comprises in addition to the steps of the said method for identifying fetal cells or fetal genomic DNA:

3. Isolating and/or purifying of the identified fetal cells or fetal genomic DNA from the provided sample by means of the attached probes and their corresponding tags, respectively. A person skilled in the art knows suitable methods. Said methods are based on chemical, physical or biological properties of the attached probes or corresponding tags. For example but not limited to, the isolation is performed (i) by means of affinity cromatography, wherein the probe (e.g. a nucleic acid) is directly or indirectly bound to a solid surface; (ii) by means of affinity cromatography, wherein the probe is attached to a tag that is recognized by an antibody immobilized on a column; (iii) by means of magnetic beads, wherein a magnetic bead is directly or indirectly bound to an attached probe and wherein a magnetic field is applied; or (iv) by means of fluorescent activated cell sorting, wherein the used tag is a fluorescent dye.

[0471] According to a preferred embodiment, the isolated or purified fetal cells or fetal genomic DNA are quantified by means of the attached probes and/or their corresponding tags. A person skilled in the art knows suitable methods. For example, but not limited to by cell counting manually or by automatic means. According to a preferred embodiment, the isolated or purified fetal genomic DNA is quantified by means of at least one selected from the group comprising amplification method, PCR method, isothermal amplification method, NASBA method, LCR method, methylation specific amplification method, MSP (Methylation Specific PCR) method, nested MSP method, HeavyMethyl™ method, detection method, methylation specific detection method, bisulfite sequencing method, detection by means of DNA-arrays, detection by means of oligonucleotide microarrays, detection by means of CpG-island-microarrays, detection by means of restriction enzymes, detection by means of methylation sensitive restriction enzymes simultaneous methylation specific amplification and detection method, COBRA method, real-time PCR, HeavyMethyl™ real time PCR method, MSP MethyLight™ method, MethyLight™ method, MethyLight™ Algo™ method, QM method, Headloop MethyLight™ method, HeavyMethyl™ MethyLight™ method, HeavyMethyl™ Scorpion™ method, MSP Scorpion™ method, Headloop Scorpion™ method, methylation sensitive primer extension, Ms-SNuPE (Methylation-sensitive Single Nucleotide Primer Extension) method.

[0472] Alternatively, for example but not limited to, a method for quantifying the number of fetal cells or the amount of fetal genomic DNA comprises:

1. Providing of a sample, the sample comprising one or more cells or genomic DNA. The genomic DNA is purified from said sample, preferably by means of a kit. A person skilled in the art is aware of suitable kits. For example, but not limited to it, the kit for purification of genomic DNA is the DNeasy Tissue Kit (Qiagen) or the Wizard Genomic DNA Purification kit (Promega).
2. Determining the methylation level of at least one CpG position within the sequence of CRYBA4 SEQ ID NO: 476 of the provided sample. A person skilled in the art knows how to determine the methylation state or the methylation level of one or more CpG positions. For example, but not limited to, the methylation state or level is determined by means of at least one selected from the group comprising amplification method, PCR method, isothermal amplification method, NASBA method, LCR method, methylation specific amplification method, MSP (Methylation Specific PCR) method, nested MSP method, HeavyMethyl™ method, detection method, methylation specific detection method, bisulfite sequencing method, detection by means of DNA-arrays, detection by means of oligonucleotide microarrays, detection by means of CpG-island-microarrays, detection by means of restriction enzymes, detection by means of methylation sensitive restriction enzymes simultaneous methylation specific amplification and detection method, COBRA method, real-time PCR, HeavyMethyl™ real time PCR method, MSP MethyLight™ method, MethyLight™ method, MethyLight™ Algo™ method, QM method, Headloop MethyLight™ method, HeavyMethyl™ MethyLight™ method, HeavyMethyl™ Scorpion™ method, MSP Scorpion™ method, Headloop Scorpion™ method, methylation sensitive primer extension, Ms-SNuPE (Methylation-sensitive Single Nucleotide Primer Extension) method, and proteins binding specifically methylated or unmethylated DNA like the proteins MeCP2, MBD1, MBD2, MBD4, Kaiso or any domain thereof like but not limited to the CXXC-3 domain of the MBD1 protein or methylation-specific antibodies, e.g. anti-5-methylcytosine antibodies.
3. Quantifying the number of fetal cells or the amount of fetal genomic DNA by comparing the determined methylation levels of the sample with the respective herein provided methylation levels of embryonic liver and/or embryonic skeletal muscle.

[0473] For example but not limited to it, a method for characterizing one or more fetal cells or fetal genomic DNA comprises

1. Providing of a sample comprising one or more fetal cells or fetal genomic DNA. The fetal cell(s) or the fetal genomic DNA are isolated for example but not limited to the methods described herein.
2. Characterizing said sample by determining the methylation state or the methylation level of at least one CpG position within the sequence of CRYBA4 SEQ ID NO: 476 of the provided sample. Thereby a profile is generated comprising the methylation information of all characterized CpG positions of CRYBA4 SEQ ID NO: 476 of the respective sample. A person skilled in the art knows how to determine the methylation state or the methylation level of one or more CpG positions. For example, but not limited to, the methylation state or level is determined by means of at least one selected from the group comprising amplification method, PCR method, isothermal amplification method, NASBA method, LCR method, methylation specific amplification method, MSP (Methylation Specific PCR) method, nested MSP method, HeavyMethyl™ method, detection method, methylation specific detection method, bisulfite sequencing method, detection by means of DNA-arrays, detection by means of oligonucleotide microarrays, detection by means of CpG-island-microarrays, detection by means of restriction enzymes, detection by means of methylation sensitive restriction enzymes simultaneous methylation specific amplification and detection method, COBRA method, real-time PCR, HeavyMethyl™ real time PCR method, MSP MethyLight™ method, MethyLight™ method, MethyLight™ Algo™ method, QM method, Headloop MethyLight™ method, HeavyMethyl™ MethyLight™ method, HeavyMethyl™ Scorpion™ method, MSP Scorpion™ method, Headloop Scorpion™ method, methylation sensitive primer extension, Ms-SNuPE (Methylation-sensitive Single Nucleotide Primer Extension) method, and proteins binding specifically methylated or unmethylated DNA like the proteins MeCP2, MBD1, MBD2, MBD4, Kaiso or any domain thereof like but not limited to the CXXC-3 domain of the MBD1 protein or methylation-specific antibodies, e.g. anti-5-methylcytosine antibodies.

[0474] In a preferred embodiment of step 1, the genomic DNA comprising fetal genomic DNA is isolated/purified from the provided sample, preferably by means of a kit. A person skilled in the art is aware of suitable kits. For example, but not limited to it, the kit for purification of genomic DNA is the DNeasy Tissue Kit (Qiagen) or the Wizard Genomic DNA Purification kit (Promega).

[0475] In a preferred embodiment the determined CRYBA4 profile is compared with one or more CRYBA4 profiles of obtained from other samples and/or with one or more CRYBA4 reference profiles.

### Skin:

[0476] In a preferred embodiment, the herein provided markers of Tables 8D, G, I and Tables 9D, F, H are used for identifying individuals from traces of skin and/or adjacent tissues (such as hair, nail pieces, etc). This embodiment is of particular use in forensic medicine and/or legal medicine. Skin or skin adjacent tissue is usually used as study material in forensic and legal medicine. Preferably the markers provided in Table 8G and 9F are used because of the following reason. Keratinocytes constitute the external layer of the skin and therefore are the first cell type to be de-attached and a high number of these cells is expected in skin traces. Variations of one marker alone or in combination with other markers herein provided or not enable the accurate assessment of identity. For example but not limited to it, the differential methylation of NP_{—}612444.1 SEQ ID NO: 689 is used. According to Table 6, the differential methylation of NP_{—}612444.1 SEQ ID NO: 689 is a marker for keratinocytes as well as for sperm because the CpG dinucleotides of NP_{—}612444.1 SEQ ID NO: 689 are methylated within the range of 0-25% in keratinocytes and sperm while other tissues show a different extend of methylation. Of course, corresponding markers can also be alternatively used. Thereby corresponding markers of NP_{—}612444.1 SEQ ID NO: 689 are, for example but not limited to, genomic DNA derived from or associated with NP_{—}612444.1 SEQ ID NO: 689; methylation specifically converted DNA derived from NP_{—}612444.1 SEQ ID NO: 689; mRNA, cDNA, protein, or peptide each of which derived at least in parts from NP_{—}612444.1 SEQ ID NO: 689. If the case may be, a person skilled in the art knows how to adjust the presented procedures.

[0477] Correspondingly, for example but not limited to it, a method for the identification of an individual, comprises

1. Providing a sample, comprising skin, hair, nail pieces and/or adjacent tissue. Genomic DNA is purified from said samples, preferably by means of a kit. A person skilled in the art is aware of suitable kits. For example, but not limited to it, the kit for purification of genomic DNA is the DNeasy Tissue Kit (Qiagen) or the Wizard Genomic DNA Purification kit (Promega).
2. Characterizing the sample by determining the methylation state or the methylation level of at least one CpG position within the sequence of NP_{—}612444.1 SEQ ID NO: 689 of the provided sample. Thereby a profile is generated comprising the methylation information of all characterized CpG positions of NP_{—}612444.1 SEQ ID NO: 689 of the sample. A person skilled in the art knows how to determine the methylation state or the methylation level of one or more CpG positions. For example, but not limited to, the methylation state or level is determined by means of at least one selected from the group comprising amplification method, PCR method, isothermal amplification method, NASBA method, LCR method, methylation specific amplification method, MSP (Methylation Specific PCR) method, nested MSP method, HeavyMethyl™ method, detection method, methylation specific detection method, bisulfite sequencing method, detection by means of DNA-arrays, detection by means of oligonucleotide microarrays, detection by means of CpG-island-microarrays, detection by means of restriction enzymes, detection by means of methylation sensitive restriction enzymes simultaneous methylation specific amplification and detection method, COBRA method, real-time PCR, HeavyMethyl™ real time PCR method, MSP MethyLight™ method, MethyLight™ method, MethyLight™ Algo™ method, QM method, Headloop MethyLight™ method, HeavyMethyl™ MethyLight™ method, HeavyMethyl™ Scorpion™ method, MSP Scorpion™ method, Headloop Scorpion™ method, methylation sensitive primer extension, Ms-SNuPE (Methylation-sensitive Single Nucleotide Primer Extension) method, and proteins binding specifically methylated or unmethylated DNA like the proteins MeCP2, MBD1, MBD2, MBD4, Kaiso or any domain thereof like but not limited to the CXXC-3 domain of the MBD1 protein or methylation-specific antibodies, e.g. anti-5-methylcytosine antibodies.
3.Comparing the determined NP_{—}612444.1 profile of the sample with one or more NP_{—}612444.1 profiles of individuals, the profiles obtained correspondingly or in a different manner. An individual is identified wherein the NP_{—}612444.1 profile matches the profile of an individual. In preferred embodiments, the forensic sample and the sample collected from an individual are collected and/or processed simultaneously or not.

[0478] In a preferred embodiment, the herein provided markers of Tables 8D, G, I and Tables 9D, F, H are used to characterize the skin, hair, nail, or adjacent tissue of an individual. For example but not limited to it, the differential methylation of SEQ ID NO: 640 (no gene associated) is used. According to Table 6, the differential methylation of SEQ ID NO: 640 is a marker for skin, hair, nail, or adjacent tissue because the CpG dinucleotides of SEQ ID NO: 640 are methylated within the range of 25-75% in keratinocytes, melanocytes and fibroblasts while other tissues show a different extend of methylation. Of course, corresponding markers can also be used alternatively. Thereby corresponding markers of SEQ ID NO: 640 are, for example but not limited to, genomic DNA derived from or associated with SEQ ID NO: 640; methylation specifically converted DNA derived from SEQ ID NO: 640; mRNA, cDNA, protein, or peptide each of which derived at least in parts from SEQ ID NO: 640. If the case may be, a person skilled in the art knows how to adjust the presented procedures.

[0479] Correspondingly, for example but not limited to, a method for characterizing skin, hair, nail and/or adjacent tissue comprises the characterization of at least keratinocytes, melanocytes, fibroblasts or combinations thereof, in addition comprising:

1. Providing a sample, comprising skin, hair, nail and/or adjacent tissue. Genomic DNA is purified from said samples, preferably by means of a kit. A person skilled in the art is aware of suitable kits. For example, but not limited to it, the kit for purification of genomic DNA is the DNeasy Tissue Kit (Qiagen) or the Wizard Genomic DNA Purification kit (Promega).
2. Characterizing the sample by determining the methylation state or the methylation level of at least one CpG position within the sequence of SEQ ID NO: 640 of the provided sample. Thereby a profile is generated comprising the methylation information of all characterized CpG positions of SEQ ID NO: 640 of the sample. A person skilled in the art knows how to determine the methylation state or the methylation level of one or more CpG positions. For example, but not limited to, the methylation state or level is determined by means of at least one selected from the group comprising amplification method, PCR method, isothermal amplification method, NASBA method, LCR method, methylation specific amplification method, MSP (Methylation Specific PCR) method, nested MSP method, HeavyMethyl™ method, detection method, methylation specific detection method, bisulfite sequencing method, detection by means of DNA-arrays, detection by means of oligonucleotide microarrays, detection by means of CpG-island-microarrays, detection by means of restriction enzymes, detection by means of methylation sensitive restriction enzymes simultaneous methylation specific amplification and detection method, COBRA method, real-time PCR, HeavyMethyl™ real time PCR method, MSP MethyLight™ method, MethyLight™ method, MethyLight™ Algo™ method, QM method, Headloop MethyLight™ method, HeavyMethyl™ MethyLight™ method, HeavyMethyl™ Scorpion™ method, MSP Scorpion™ method, Headloop Scorpion™ method, methylation sensitive primer extension, Ms-SNuPE (Methylation-sensitive Single Nucleotide Primer Extension) method, and proteins binding specifically methylated or unmethylated DNA like the proteins MeCP2, MBD1, MBD2, MBD4, Kaiso or any domain thereof like but not limited to the CXXC-3 domain of the MBD1 protein or methylation-specific antibodies, e.g. anti-5-methylcytosine antibodies.

[0480] In a preferred embodiment, the herein provided markers of Tables 8D, G, 1 and Tables 9D, F, H are used to determine the composition of the skin, hair, nail, or adjacent tissue of an individual. Said composition being dependent from the content of at least one of the three major constituting cell types of the skin (fibroblasts, keratinocytes and melanocytes). For example but not limited to it, the differential methylation of SEQ ID NO: 644 (no gene associated), SEQ ID NO: 648 (no gene associated), PTPNS1 SEQ ID NO: 649, or combinations thereof are used. According to Table 6, the differential methylation of SEQ ID NO: 644 is a marker for melanocytes because the CpG dinucleotides of SEQ ID NO: 644 are methylated within the range of 0-25% in melanocytes while other tissues show a different extend of methylation. Of course, corresponding markers can also be used alternatively. Thereby corresponding markers of SEQ ID NO: 644 are, for example but not limited to, genomic DNA derived from or associated with SEQ ID NO: 644; methylation specifically converted DNA derived from SEQ ID NO: 644; mRNA, cDNA, protein, or peptide each of which derived at least in parts from SEQ ID NO: 644. According to Table 6, the differential methylation of SEQ ID NO: 648 is a marker for fibroblasts because the CpG dinucleotides of SEQ ID NO: 648 are methylated within the range of 0-25% in fibroblast while other tissues show a different extend of methylation. Of course, corresponding markers can also be used alternatively. Thereby corresponding markers of SEQ ID NO: 648 are, for example but not limited to, genomic DNA derived from or associated with SEQ ID NO: 648; methylation specifically converted DNA derived from SEQ ID NO: 648; mRNA, cDNA, protein, or peptide each of which derived at least in parts from SEQ ID NO: 648. According to Table 6, the differential methylation of PTPNS1 SEQ ID NO: 649 is a marker for keratinocytes because the CpG dinucleotides of PTPNS1 SEQ ID NO: 649 are methylated within the range of 0-25% in keratinocytes while other tissues show a different extend of methylation. Of course, corresponding markers can also be used alternatively. Thereby corresponding markers of PTPNS1 SEQ ID NO: 649 are, for example but not limited to, genomic DNA derived from or associated with PTPNS1 SEQ ID NO: 649; methylation specifically converted DNA derived from PTPNS1 SEQ ID NO: 649; mRNA, cDNA, protein, or peptide each of which derived at least in parts from PTPNS1 SEQ ID NO: 649. If the case may be, a person skilled in the art knows how to adjust the presented procedures.

[0481] Correspondingly, for example but not limited to, a method for quantifying the number of keratinocytes, fibroblast, melanocytes or combinations thereof comprises:

1. Providing of a sample, the sample comprising one or more cells or genomic DNA.
2. Binding of at least one probe to one or more CpG positions within the sequence of SEQ ID NO: 644, SEQ ID NO: 648, PTPNS1 SEQ ID NO: 649 of the provided sample. Thereby a probe binds specifically with respect to the methylation status of said one or more CpG positions. A probe is either a protein, peptide, nucleic acid, RNA or DNA for example but not limited to, an antibody specific for 5-methylcytosine (e.g. AbCAM Cat. No. ab1884); a methyl-binding protein such as the proteins MeCP2, MBD1, MBD2, MBD4, Kaiso or any domain thereof; or a nucleic acid probe that is specific for the methylated sequence. According to some preferred embodiments, the said probe(s) are labeled with a tag suitable for detection of the probe, isolation of one or more cells, and/or purification of one or more cells. A person skilled in the art knows suitable methods to carry out this step.
3. Identifying keratinocytes, fibroblasts, melanocytes or combinations thereof by detecting the bound probes and/or their respective label(s). A person skilled in the art knows suitable methods for detection of said probes or labels.
4. Quantifying the isolated or purified cells by means of the attached probes and/or their corresponding tags. A person skilled in the art knows suitable methods. For example, but not limited to by cell counting manually or by automatic means. According to a preferred embodiment, the isolated or purified fetal genomic DNA is quantified by means of at least one selected from the group comprising amplification method, PCR method, isothermal amplification method, NASBA method, LCR method, methylation specific amplification method, MSP (Methylation Specific PCR) method, nested MSP method, HeavyMethyl™ method, detection method, methylation specific detection method, bisulfite sequencing method, detection by means of DNA-arrays, detection by means of oligonucleotide microarrays, detection by means of CpG-island-microarrays, detection by means of restriction enzymes, detection by means of methylation sensitive restriction enzymes simultaneous methylation specific amplification and detection method, COBRA method, real-time PCR, HeavyMethyl™ real time PCR method, MSP MethyLight™ method, MethyLight™ method, MethyLight™ Algo™ method, QM method, Headloop MethyLight™ method, HeavyMethyl™ MethyLight™ method, HeavyMethyl™ Scorpion™ method, MSP Scorpion™ method, Headloop Scorpion™ method, methylation sensitive primer extension, Ms-SNuPE (Methylation-sensitive Single Nucleotide Primer Extension) method.

[0482] Alternatively, for example but not limited to, a method for quantifying the number of keratinocytes, fibroblast, melanocytes or combinations thereof comprises:

1. Providing of a sample, the sample comprising one or more cells or genomic DNA. The genomic DNA is purified from said sample, preferably by means of a kit. A person skilled in the art is aware of suitable kits. For example, but not limited to it, the kit for purification of genomic DNA is the DNeasy Tissue Kit (Qiagen) or the Wizard Genomic DNA Purification kit (Promega).
2. Determining the methylation level of at least one CpG position within the sequence of SEQ ID NO: 644, SEQ ID NO: 648, PTPNS1 SEQ ID NO: 649 or combinations thereof of the provided sample. A person skilled in the art knows how to determine the methylation state or the methylation level of one or more CpG positions. For example, but not limited to, the methylation state or level is determined by means of at least one selected from the group comprising amplification method, PCR method, isothermal amplification method, NASBA method, LCR method, methylation specific amplification method, MSP (Methylation Specific PCR) method, nested MSP method, HeavyMethyl™ method, detection method, methylation specific detection method, bisulfite sequencing method, detection by means of DNA-arrays, detection by means of oligonucleotide microarrays, detection by means of CpG-island-microarrays, detection by means of restriction enzymes, detection by means of methylation sensitive restriction enzymes simultaneous methylation specific amplification and detection method, COBRA method, real-time PCR, HeavyMethyl™ real time PCR method, MSP MethyLight™ method, MethyLight™ method, MethyLight™ Algo™ method, QM method, Headloop MethyLight™ method, HeavyMethyl™ MethyLight™ method, HeavyMethyl™ Scorpion™ method, MSP Scorpion™ method, Headloop Scorpion™ method, methylation sensitive primer extension, Ms-SNuPE (Methylation-sensitive Single Nucleotide Primer Extension) method, and proteins binding specifically methylated or unmethylated DNA like the proteins MeCP2, MBD1, MBD2, MBD4, Kaiso or any domain thereof like but not limited to the CXXC-3 domain of the MBD1 protein or methylation-specific antibodies, e.g. anti-5-methylcytosine antibodies.
3. Quantifying the number of keratinocytes, fibroblasts, melanocytes, or combinations thereof by comparing the determined methylation levels of the sample with the respective herein provided methylation levels of keratinocytes, fibroblasts or melanocytes.

[0483] In a preferred embodiment, the herein provided markers of Tables 8D, G, I and Tables 9D, F, H are used in the field of drugs. Said embodiment is of particular use for the development of drugs as well as for the treatment with drugs. The skin, hair, nail or adjacent tissue of an individual can be characterized by means of the provided markers of Tables 8D, 6, I and Tables 9D, F, H. This information can then be used to develop new drugs or to access already existing drugs with regard to skin, hair, nail etc. of an individual or to subgroups of individuals. These subgroups are for example but not limited to be characterized by a disease and/or a defined type of skin or hair, etc. The efficiency of said drugs i.e. the presence or absence of the desired effect is also characterized or monitored by means of the provided markers of Tables 8D, G, I and Tables 9D, F, H. For example but not limited to it, the differential methylation of SEQ ID NO: 773 (no gene associated) is used. According to Table 6, the differential methylation of SEQ ID NO: 773 is a marker for skin, hair, nail, or adjacent tissue because the CpG dinucleotides of SEQ ID NO: 773 are methylated within the range of 0-25% in keratinocytes, melanocytes and fibroblasts while other tissues show a different extend of methylation. Of course, corresponding markers can also be used alternatively. Thereby corresponding markers of SEQ ID NO: 773 are, for example but not limited to, genomic DNA derived from or associated with SEQ ID NO: 773; methylation specifically converted DNA derived from SEQ ID NO: 773; mRNA, cDNA, protein, or peptide each of which derived at least in parts from SEQ ID NO: 773. If the case may be, a person skilled in the art knows how to adjust the presented procedures.

[0484] Correspondingly, for example but not limited to, a method for developing a drug and/or for treating an individual with a drug comprises:

1. Providing a sample obtained from an individual comprising genomic DNA of keratinocytes, melanocytes, fibroblasts or combinations thereof. The genomic DNA is purified from said sample, preferably by means of a kit. A person skilled in the art is aware of suitable kits. For example, but not limited to it, the kit for purification of genomic DNA is the DNeasy Tissue Kit (Qiagen) or the Wizard Genomic DNA Purification kit (Promega).
2. Characterizing said sample by determining the methylation status or level of at least one CpG position within the sequence of SEQ ID NO: 773 of the provided sample. Thereby a SEQ ID NO: 773 profile specific for said sample is generated. A person skilled in the art knows how to determine the methylation state or the methylation level of one or more CpG positions. For example, but not limited to, the methylation state or level is determined by means of at least one selected from the group comprising amplification method, PCR method, isothermal amplification method, NASBA method, LCR method, methylation specific amplification method, MSP (Methylation Specific PCR) method, nested MSP method, HeavyMethyl™ method, detection method, methylation specific detection method, bisulfite sequencing method, detection by means of DNA-arrays, detection by means of oligonucleotide microarrays, detection by means of CpG-island-microarrays, detection by means of restriction enzymes, detection by means of methylation sensitive restriction enzymes simultaneous methylation specific amplification and detection method, COBRA method, real-time PCR, HeavyMethyl™ real time PCR method, MSP MethyLight™ method, MethyLight™ method, MethyLight™ Algo™ method, QM method, Headloop MethyLight™ method, HeavyMethyl™ MethyLight™ method, HeavyMethyl™ Scorpion™ method, MSP Scorpion™ method, Headloop Scorpion™ method, methylation sensitive primer extension, Ms-SNuPE (Methylation-sensitive Single Nucleotide Primer Extension) method, and proteins binding specifically methylated or unmethylated DNA like the proteins MeCP2, MBD1, MBD2, MBD4, Kaiso or any domain thereof like but not limited to the CXXC-3 domain of the MBD1 protein or methylation-specific antibodies, e.g. anti-5-methylcytosine antibodies.
3. Treating said individual with a drug.
4. Providing a sample of said individual after drug treatment.
5. Characterizing said sample after drug treatment by determining the methylation status or level of at least one CpG position within the sequence of SEQ ID NO: 773 of the provided sample. Thereby a SEQ ID NO: 773 profile specific for said sample after drug treatment is generated. A person skilled in the art knows how to determine the methylation state or the methylation level of one or more CpG positions. For example, but not limited to, the methylation state or level is determined by means of at least one selected from the group comprising amplification method, PCR method, isothermal amplification method, NASBA method, LCR method, methylation specific amplification method, MSP (Methylation Specific PCR) method, nested MSP method, HeavyMethyl™ method, detection method, methylation specific detection method, bisulfite sequencing method, detection by means of DNA-arrays, detection by means of oligonucleotide microarrays, detection by means of CpG-island-microarrays, detection by means of restriction enzymes, detection by means of methylation sensitive restriction enzymes simultaneous methylation specific amplification and detection method, COBRA method, real-time PCR, HeavyMethyl™ real time PCR method, MSP MethyLight™ method, MethyLight™ method, MethyLight™ Algo™ method, QM method, Headloop MethyLight™ method, HeavyMethyl™ MethyLight™ method, HeavyMethyl™ Scorpion™ method, MSP Scorpion™ method, Headloop Scorpion™ method, methylation sensitive primer extension, Ms-SNuPE (Methylation-sensitive Single Nucleotide Primer Extension) method, and proteins binding specifically methylated or unmethylated DNA like the proteins MeCP2, MBD1, MBD2, MBD4, Kaiso or any domain thereof like but not limited to the CXXC-3 domain of the MBD1 protein or methylation-specific antibodies, e.g. anti-5-methylcytosine antibodies.
6. Comparing the determined SEQ ID NO: 773 profiles with drug treatment and without drug treatment with each other.

[0485] According to a preferred embodiment, guidelines are drawn from the comparison for the further drug development. According to another preferred embodiment, guidelines are drawn from the comparison for the treatment of an individual with said drug.

[0486] In a preferred embodiment, the herein provided markers of Tables 8D, G, I and Tables 9D, F, H are used as prognostic and/or diagnostic markers for wound healing, in particular in the field of surgery procedures wherein the skin is affected. For example but not limited to it, the differential methylation of SLC35E4 SEQ ID NO: 751 is used. According to Table 6, the differential methylation of SLC35E4 SEQ ID NO: 751 is a marker for wound healing because the CpG dinucleotides of SLC35E4 SEQ ID NO: 751 are methylated within the range of 0-25% in keratinocytes, melanocytes and fibroblasts while other tissues show a different extend of methylation. Of course, corresponding markers can also be used alternatively. Thereby corresponding markers of SLC35E4 SEQ ID NO: 751 are, for example but not limited to, genomic DNA derived from or associated with SLC35E4 SEQ ID NO: 751; methylation specifically converted DNA derived from SLC35E4 SEQ ID NO: 751; mRNA, cDNA, protein, or peptide each of which derived at least in parts from SLC35E4 SEQ ID NO: 751. If the case may be, a person skilled in the art knows how to adjust the presented procedures.

[0487] Correspondingly, for example but not limited to, a method for prognosing or diagnosing would healing comprises:

1. Providing a sample obtained from an individual comprising genomic DNA of keratinocytes, melanocytes, fibroblasts or combinations thereof. The genomic DNA is purified from said sample, preferably by means of a kit. A person skilled in the art is aware of suitable kits. For example, but not limited to it, the kit for purification of genomic DNA is the DNeasy Tissue Kit (Qiagen) or the Wizard Genomic DNA Purification kit (Promega).
2. Characterizing said sample by determining the methylation status or level of at least one CpG position within the sequence of SLC35E4 SEQ ID NO: 751 of the provided sample. Thereby a SLC35E4 profile specific for said sample is generated. A person skilled in the art knows how to determine the methylation state or the methylation level of one or more CpG positions. For example, but not limited to, the methylation state or level is determined by means of at least one selected from the group comprising amplification method, PCR method, isothermal amplification method, NASBA method, LCR method, methylation specific amplification method, MSP (Methylation Specific PCR) method, nested MSP method, HeavyMethyl™ method, detection method, methylation specific detection method, bisulfite sequencing method, detection by means of DNA-arrays, detection by means of oligonucleotide microarrays, detection by means of CpG-island-microarrays, detection by means of restriction enzymes, detection by means of methylation sensitive restriction enzymes simultaneous methylation specific amplification and detection method, COBRA method, real-time PCR, HeavyMethyl™ real time PCR method, MSP MethyLight™ method, MethyLight™ method, MethyLight™ Algo™ method, QM method, Headloop MethyLight™ method, HeavyMethyl™ MethyLight™ method, HeavyMethyl™ Scorpion™ method, MSP Scorpion™ method, Headloop Scorpion™ method, methylation sensitive primer extension, Ms-SNuPE (Methylation-sensitive Single Nucleotide Primer Extension) method, and proteins binding specifically methylated or unmethylated DNA like the proteins MeCP2, MBD1, MBD2, MBD4, Kaiso or any domain thereof like but not limited to the CXXC-3 domain of the MBD1 protein or methylation-specific antibodies, e.g. anti-5-methylcytosine antibodies.
3. Comparing the determined SLC35E4 profile with at least one reference profile obtained from the same individual and/or from one or more other individuals. Preferably, said reference profiles are obtained according to steps 1 and 2. Preferably, said reference profiles comprises pairs of profiles each pair being obtained from an individual. Thereby said pair consists of a first profile specific for the condition of healthy skin (no lesion of skin) and of a second profile specific for a healing state of the wound or affected skin area after lesion. A person skilled in the art knows to deduce the possible grade of scare building and or the time required for healing therefrom.

[0488] In a preferred embodiment, said method is a method for diagnosing wound healing wherein the determined SLC35E4 profile matches a reference profile. In another preferred embodiment, said method is a method for prognosing wound healing wherein the determined SLC35E4 profile matches a first reference profile and wherein a second reference profile exists which was obtained from the same individual as the first reference profile. Thereby the second reference profile was obtained after the first reference profile. Accordingly, the prognosis for the individual for whom the SLC35E4 profile was determined is the condition of wound healing characterized by the second reference profile. In preferred embodiments, at least 1, 2, 4, 6, 10, 15, 25 or 50 reference profiles are considered. The more reference profiles are considered the merrier is the diagnosis or prognosis.

### Liver

[0489] In a preferred embodiment, the herein provided markers of Tables 8H and Tables 9G are used for deducing the presence of absence of an event which affects the liver. For example but not limited to it, said event is at least one select from the group comprising liver cirrhosis; liver cancer; hepatitis A; hepatitis B; hepatitis C; healthy condition, recently or longer chemical, physical or biological exposure; recently or longer exposure to a drug, or alcohol; or treatment procedures. In the case the event is adverse, said event affecting the liver leads to the death of liver cells. In the case the event is benign, said event leads to a reduction of liver cell death. The genomic DNA of dead liver cells can then be found in the body fluids in particular in the blood of a affected individual. As an example but not limited to, the differential methylation of VARS SEQ ID NO: 415 is used. According to Table 6, the differential methylation of VARS SEQ ID NO: 415 is a marker for diseases affecting the liver because the CpG dinucleotides of VARS SEQ ID NO: 415 are methylated within the range of 25-75% in liver while other tissues show a different extend of methylation. Of course, corresponding markers can also be used alternatively. Thereby corresponding markers of VARS SEQ ID NO: 415 are, for example but not limited to, genomic DNA derived from or associated with VARS SEQ ID NO: 415; methylation specifically converted DNA derived from VARS SEQ ID NO: 415; mRNA, cDNA, protein, or peptide each of which derived at least in parts from VARS SEQ ID NO: 415. If the case may be, a person skilled in the art knows how to adjust the presented procedures.

[0490] Correspondingly, for example but not limited to, a method for detecting a liver affecting event comprises:

1. Providing a sample comprising genomic DNA. The genomic DNA is purified from said sample, preferably by means of a kit. A person skilled in the art is aware of suitable kits. For example, but not limited to it, the kit for purification of genomic DNA is the DNeasy Tissue Kit (Qiagen) or the Wizard Genomic DNA Purification kit (Promega). Preferably said sample is a blood sample, plasma sample, or urine sample.
2. Determining the methylation level of at least one CpG position within the sequence of VARS SEQ ID NO: 415 of the provided sample. Thereby a VARS profile specific of said sample is generated. A person skilled in the art knows how to determine the methylation state or the methylation level of one or more CpG positions. For example, but not limited to, the methylation state or level is determined by means of at least one selected from the group comprising amplification method, PCR method, isothermal amplification method, NASBA method, LCR method, methylation specific amplification method, MSP (Methylation Specific PCR) method, nested MSP method, HeavyMethyl™ method, detection method, methylation specific detection method, bisulfite sequencing method, detection by means of DNA-arrays, detection by means of oligonucleotide microarrays, detection by means of CpG-island-microarrays, detection by means of restriction enzymes, detection by means of methylation sensitive restriction enzymes simultaneous methylation specific amplification and detection method, COBRA method, real-time PCR, HeavyMethyl™ real time PCR method, MSP MethyLight™ method, MethyLight™ method, MethyLight™ Algo™ method, QM method, Headloop MethyLight™ method, HeavyMethyl™ MethyLight™ method, HeavyMethyl™ Scorpion™ method, MSP Scorpion™ method, Headloop Scorpion™ method, methylation sensitive primer extension, Ms-SNuPE (Methylation-sensitive Single Nucleotide Primer Extension) method, and proteins binding specifically methylated or unmethylated DNA like the proteins MeCP2, MBD1, MBD2, MBD4, Kaiso or any domain thereof like but not limited to the CXXC-3 domain of the MBD1 protein or methylation-specific antibodies, e.g. anti-5-methylcytosine antibodies.
3. Deducing the presence or absence of a liver affecting event from the comparison of the determined VARS profile with one or more VARS reference profiles. Said reference profiles are specific for a healthy condition or a condition specific for an event. In the case the determined VARS profile matches or is similar to a reference profile specific for an event, said liver affecting event is present. In case the determined VARS profiles is not similar to a reference profile specific for an event, said liver affecting event is absent.

[0491] In addition, for example but not limited to it, a method for detecting a liver affecting event comprises the quantification of the amount of free floating genomic DNA of liver cells. Said method comprises:
[0492] 1. Providing of a sample, comprising genomic DNA;
[0493] 2. Contacting the genomic DNA or a derivative of it with at least one probe which is specific for at least one differentially methylated CpG position of the marker VARS SEQ ID NO: 415. Said probe is selected from the group comprising antibody; 5-methylcytosine specific antibody (e.g. AbCam Cat. No. ab1884); affinity binding protein; protein binding specifically methylated or unmethylated DNA like MeCP2, MBD1, MBD2, MBD4, Kaiso or any domain thereof; nucleic acid; DNA, RNA, PNA or nucleic acid derivative specific for the methylated sequence. In addition, the probe is labeled directly or indirectly with a dye, protein, enzyme, metal, bead or chemical compound suitable for detection.
[0494] 3. Performing a detection reaction by means of the probe and/or the label. A person skilled in the art is aware of suitable detection reactions. For example, but not limited to, the detection reaction comprises Rabbit Peroxidase Anti-Peroxidase (PAP) Soluble Complex (Rockland Catalog#: P300-002); radioactive labeled probes; or probes fluorescently labeled like DNA probes coupled with Cy5 (Invitrogen). A person skilled in the art knows further suitable methods for detection.
[0495] 4. Quantifying the detection reaction in a manner so that the detected signal is indicative for the amount of probe or label and therewith for the number of dead liver cell. A person knows suitable methods for quantification.
[0496] 5. Deducing the presence or absence of a liver affecting event from the comparison of the determined number of dead liver cells with reference numbers of dead liver cells that are specific for an event. In the case the determined number matches or is similar to a reference number specific for a healthy condition, a liver affecting event is absent. In the case the determined number matches or is similar to a reference number specific for a condition specific for an event, a liver affecting event is present.

[0497] Alternatively, for example but not limited to, a method for detecting a liver affecting event comprises the quantification of the amount of free floating genomic DNA of liver cells. Said method comprises:

1. Providing of a sample, the sample comprising one or more cells or genomic DNA. The genomic DNA is purified from said sample, preferably by means of a kit. A person skilled in the art is aware of suitable kits. For example, but not limited to it, the kit for purification of genomic DNA is the DNeasy Tissue Kit (Qiagen) or the Wizard Genomic DNA Purification kit (Promega).
2. Determining the methylation level of at least one CpG position within the sequence of VARS SEQ ID NO: 415 of the provided sample. A person skilled in the art knows how to determine the methylation level of one or more CpG positions. For example, but not limited to, the methylation state or level is determined by means of at least one selected from the group comprising amplification method, PCR method, isothermal amplification method, NASBA method, LCR method, methylation specific amplification method, MSP (Methylation Specific PCR) method, nested MSP method, HeavyMethyl™ method, detection method, methylation specific detection method, bisulfite sequencing method, detection by means of DNA-arrays, detection by means of oligonucleotide microarrays, detection by means of CpG-island-microarrays, detection by means of restriction enzymes, detection by means of methylation sensitive restriction enzymes simultaneous methylation specific amplification and detection method, COBRA method, real-time PCR, HeavyMethyl™ real time PCR method, MSP MethyLight™ method, MethyLight™ method, MethyLight™ Algo™ method, QM method, Headloop MethyLight™ method, HeavyMethyl™ MethyLight™ method, HeavyMethyl™ Scorpion™ method, MSP Scorpion™ method, Headloop Scorpion™ method, methylation sensitive primer extension, Ms-SNuPE (Methylation-sensitive Single Nucleotide Primer Extension) method, and proteins binding specifically methylated or unmethylated DNA like the proteins MeCP2, MBD1, MBD2, MBD4, Kaiso or any domain thereof like but not limited to the CXXC-3 domain of the MBD1 protein or methylation-specific antibodies, e.g. anti-5-methylcytosine antibodies.
3. Quantifying the number of dead liver cells by comparing the determined one or more methylation levels of the sample with the respective herein provided one or more methylation levels of liver cells and with at least one methylation level representing the correspondent tissue, group of cells, or cell of a healthy individual.

[0498] In a preferred embodiment, the herein provided markers of Tables 8H and Tables 9G are used for deducing the sensitivity of an individual to alcohol. Alcohol consumption changes the DNA methylation status as reviewed by Poschl et al, 2004 (Poschl G, Stickel F, Wang X D, Seitz H K. Alcohol and cancer: genetic and nutritional aspects. Proc Nutr Soc. 2004 February; 63(1):65-71.). As an example but not limited to, the differential methylation of BMP7 SEQ ID NO: 684 is used. According to Table 6, the differential methylation of BMP7 SEQ ID NO: 684 is a marker for diseases affecting the liver because the CpG dinucleotides of BMP7 SEQ ID NO: 684 are methylated within the range of 25-75% in liver while other tissues show a different extend of methylation. Of course, corresponding markers can also be used alternatively. Thereby corresponding markers of BMP7 SEQ ID NO: 684 are, for example but not limited to, genomic DNA derived from or associated with BMP7 SEQ ID NO: 684; methylation specifically converted DNA derived from BMP7 SEQ ID NO: 684; mRNA, cDNA, protein, or peptide each of which derived at least in parts from BMP7 SEQ ID NO: 684. If the case may be, a person skilled in the art knows how to adjust the presented procedures.

[0499] Correspondingly, for example but not limited to, a method for deducing the sensitivity of an individual to alcohol comprises:

1. Providing a sample derived from said individual comprising genomic DNA. The genomic DNA is purified from said sample, preferably by means of a kit. A person skilled in the art is aware of suitable kits. For example, but not limited to it, the kit for purification of genomic DNA is the DNeasy Tissue Kit (Qiagen) or the Wizard Genomic DNA Purification kit (Promega). Preferably said sample is a blood sample, plasma sample, or urine sample.
2. Determining the methylation level of at least one CpG position within the sequence of BMP7 SEQ ID NO: 684 of the provided sample. Thereby a BMP7 profile specific of said sample is generated. A person skilled in the art knows how to determine the methylation state or the methylation level of one or more CpG positions. For example, but not limited to, the methylation state or level is determined by means of at least one selected from the group comprising amplification method, PCR method, isothermal amplification method, NASBA method, LCR method, methylation specific amplification method, MSP (Methylation Specific PCR) method, nested MSP method, HeavyMethyl™ method, detection method, methylation specific detection method, bisulfite sequencing method, detection by means of DNA-arrays, detection by means of oligonucleotide microarrays, detection by means of CpG-island-microarrays, detection by means of restriction enzymes, detection by means of methylation sensitive restriction enzymes simultaneous methylation specific amplification and detection method, COBRA method, real-time PCR, HeavyMethyl™ real time PCR method, MSP MethyLight™ method, MethyLight™ method, MethyLight™ Algo™ method, QM method, Headloop MethyLight™ method, HeavyMethyl™ MethyLight™ method, HeavyMethyl™ Scorpion™ method, MSP Scorpion™ method, Headloop Scorpion™ method, methylation sensitive primer extension, Ms-SNuPE (Methylation-sensitive Single Nucleotide Primer Extension) method, and proteins binding specifically methylated or unmethylated DNA like the proteins MeCP2, MBD1, MBD2, MBD4, Kaiso or any domain thereof like but not limited to the CXXC-3 domain of the MBD1 protein or methylation-specific antibodies, e.g. anti-5-methylcytosine antibodies.
3. Deducing the extend of a sensitivity of said individual to alcohol from the comparison of the determined BMP7 profile with one or more BMP7 reference profiles. The reference profiles are specific for different conditions of sensitivity. In the case the determined BMP7 profile matches or is similar to a reference profile, the sensitivity of said individual is identical or similar to the sensitivity for which the reference profile is specific for.

[0500] In a preferred embodiment, the sensitivity to alcohol is determined for a cell, group of cell, or tissue according to the above described procedure.

### Heart Muscle:

[0501] In a preferred embodiment, the herein provided markers of Tables 8E, Table 8F and Tables 9E are used for deducing the presence of absence of an event or condition affecting the heart. For example but not limited to it, said event or condition is at least one select from the group comprising heart failure; heart attack; athletic capacity; healthy condition; recently or longer chemical, physical or biological exposure; recently or longer exposure to a drug; or treatment procedure. In the case the event is adverse, said event or condition affecting the heart leads to death of heart cells. In the case the event is benign, said event leads to a reduction of heart cell death. The genomic DNA of dead heart cells can then be found in the body fluids in particular in the blood of an affected individual. As an example but not limited to, the differential methylation of TBC1D10A SEQ ID NO: 700 is used. According to Table 6, the differential methylation of TBC1D10A SEQ ID NO: 700 is a marker for diseases affecting the heart because the CpG dinucleotides of TBC1D10A SEQ ID NO: 700 are methylated within the range of 75-100% in heart while other tissues show a different extend of methylation. Of course, corresponding markers can also be used alternatively. Thereby corresponding markers of TBC1D10A SEQ ID NO: 700 are, for example but not limited to, genomic DNA derived from or associated with TBC1D10A SEQ ID NO: 700; methylation specifically converted DNA derived from TBC1D10A SEQ ID NO: 700; mRNA, cDNA, protein, or peptide each of which derived at least in parts from TBC1D10A SEQ ID NO: 700. If the case may be, a person skilled in the art knows how to adjust the presented procedures.

[0502] Correspondingly, for example but not limited to, a method for detecting a heart affecting event or condition comprises:

1. Providing a sample comprising genomic DNA. The genomic DNA is purified from said sample, preferably by means of a kit. A person skilled in the art is aware of suitable kits. For example, but not limited to it, the kit for purification of genomic DNA is the DNeasy Tissue Kit (Qiagen) or the Wizard Genomic DNA Purification kit (Promega). Preferably said sample is a blood sample, plasma sample, or urine sample.
2. Determining the methylation level of at least one CpG position within the sequence of TBC1D10A SEQ ID NO: 700 of the provided sample. Thereby a TBC1D10A profile specific of said sample is generated. A person skilled in the art knows how to determine the methylation state or the methylation level of one or more CpG positions. For example, but not limited to, the methylation state or level is determined by means of at least one selected from the group comprising amplification method, PCR method, isothermal amplification method, NASBA method, LCR method, methylation specific amplification method, MSP (Methylation Specific PCR) method, nested MSP method, HeavyMethyl™ method, detection method, methylation specific detection method, bisulfite sequencing method, detection by means of DNA-arrays, detection by means of oligonucleotide microarrays, detection by means of CpG-island-microarrays, detection by means of restriction enzymes, detection by means of methylation sensitive restriction enzymes simultaneous methylation specific amplification and detection method, COBRA method, real-time PCR, HeavyMethyl™ real time PCR method, MSP MethyLight™ method, MethyLight™ method, MethyLight™ Algo™ method, QM method, Headloop MethyLight™ method, HeavyMethyl™ MethyLight™ method, HeavyMethyl™ Scorpion™ method, MSP Scorpion™ method, Headloop Scorpion™ method, methylation sensitive primer extension, Ms-SNuPE (Methylation-sensitive Single Nucleotide Primer Extension) method, and proteins binding specifically methylated or unmethylated DNA like the proteins MeCP2, MBD1, MBD2, MBD4, Kaiso or any domain thereof like but not limited to the CXXC-3 domain of the MBD1 protein or methylation-specific antibodies, e.g. anti-5-methylcytosine antibodies.
3. Deducing the presence or absence of a heart affecting event or condition from the comparison of the determined TBC1D10A profile with one or more TBC1D10A reference profiles. Said reference profiles are specific for a healthy condition or a condition specific for an event. In case the determined TBC1D10A profile matches or is similar to a reference profile specific for an event or condition, the said heart affecting event or condition is present. In case the determined TBC1D10A profile is not similar to a reference profile specific for an event or condition, the said heart affecting event or condition is absent.

[0503] In addition, for example but not limited to it, a method for detecting a heart affecting event comprises the quantification of the amount of free floating genomic DNA of heart cells. Said method comprises:
[0504] 1. Providing of a sample, comprising genomic DNA;
[0505] 2. Contacting the genomic DNA or a derivative of it with at least one probe which is specific for at least one differentially methylated CpG position of the marker TBC1D10A SEQ ID NO: 700. Said probe is selected from the group comprising antibody; 5-methylcytosine specific antibody (e.g. AbCam Cat. No. ab1884); affinity binding protein; protein binding specifically methylated or unmethylated DNA like MeCP2, MBD1, MBD2, MBD4, Kaiso or any domain thereof; nucleic acid; DNA, RNA, PNA or nucleic acid derivative specific for the methylated sequence. In addition, the probe is labeled directly or indirectly with a dye, protein, enzyme, metal, bead or chemical compound suitable for detection.
[0506] 3. Performing a detection reaction by means of the probe and/or the label. A person skilled in the art is aware of suitable detection reactions. For example, but not limited to, the detection reaction comprises Rabbit Peroxidase Anti-Peroxidase (PAP) Soluble Complex (Rockland Catalog#: P300-002); radioactive labeled probes; or probes fluorescently labeled like DNA probes coupled with Cy5 (Invitrogen). A person skilled in the art knows further suitable methods for detection.
[0507] 4. Quantifying the detection reaction in a manner so that the detected signal is indicative for the amount of probe or label and therewith for the number of dead liver cell. A person knows suitable methods for quantification.
[0508] 5. Deducing the presence or absence of a heart affecting event from the comparison of the determined number of dead heart cells with reference numbers of dead heart cells that are specific for an event. In the case the determined number matches or is similar to a reference number specific for an event or condition, said heart affecting event is present. In the case the determined number is not similar to a reference number specific for an event or condition, said heart affecting event is absent.

[0509] Alternatively, for example but not limited to, a method for detecting a heart affecting event comprises the quantification of the amount of free floating genomic DNA of heart cells. Said method comprises:

1. Providing of a sample, the sample comprising one or more cells or genomic DNA. The genomic DNA is purified from said sample, preferably by means of a kit. A person skilled in the art is aware of suitable kits. For example, but not limited to it, the kit for purification of genomic DNA is the DNeasy Tissue Kit (Qiagen) or the Wizard Genomic DNA Purification kit (Promega).
2. Determining the methylation level of at least one CpG position within the sequence of TBC1D10A SEQ ID NO: 700 of the provided sample. A person skilled in the art knows how to determine the methylation level of one or more CpG positions. For example, but not limited to, the methylation state or level is determined by means of at least one selected from the group comprising amplification method, PCR method, isothermal amplification method, NASBA method, LCR method, methylation specific amplification method, MSP (Methylation Specific PCR) method, nested MSP method, HeavyMethyl™ method, detection method, methylation specific detection method, bisulfite sequencing method, detection by means of DNA-arrays, detection by means of oligonucleotide microarrays, detection by means of CpG-island-microarrays, detection by means of restriction enzymes, detection by means of methylation sensitive restriction enzymes simultaneous methylation specific amplification and detection method, COBRA method, real-time PCR, HeavyMethyl™ real time PCR method, MSP MethyLight™ method, MethyLight™ method, MethyLight™ Algo™ method, QM method, Headloop MethyLight™ method, HeavyMethyl™ MethyLight™ method, HeavyMethyl™ Scorpion™ method, MSP Scorpion™ method, Headloop Scorpion™ method, methylation sensitive primer extension, Ms-SNuPE (Methylation-sensitive Single Nucleotide Primer Extension) method, and proteins binding specifically methylated or unmethylated DNA like the proteins MeCP2, MBD1, MBD2, MBD4, Kaiso or any domain thereof like but not limited to the CXXC-3 domain of the MBD1 protein or methylation-specific antibodies, e.g. anti-5-methylcytosine antibodies.
3. Quantifying the number of dead heart cells by comparing the determined one or more methylation levels of the sample with the respective herein provided one or more methylation levels of heart cells and with at least one methylation level representing the correspondent tissue, group of cells, or cell of a healthy individual.

### Placenta:

[0510] In a preferred embodiment, the herein provided markers of Table 8J and Table 9I are used for the study, monitoring, identification and/or quantification of placental cells or placental DNA circulating in maternal blood and/or amniotic fluid. Placenta constitute an extra-embryonic fetal tissue and as such, it shares many genetic characteristics with the fetal tissue. Therefore, cells from the placenta as well as DNA from placental cells can surrogate fetal cells and fetal DNA for diagnostic means. Fetal cells and fetal DNA have a diagnostic potential in monitoring the health status of the fetus as reviewed by Bianchi D, 2004 (Bianchi D W. Circulating fetal DNA: its origin and diagnostic potential-a review. Placenta. 2004 April; 25 Suppl A:S93-S100). During pregnancy placenta cells are de-attached and brought to the maternal blood stream as well as the amniotic fluid. For example but not limited to it, the differential methylation of PRAME SEQ ID NO: 419 is used. According to Table 6, the differential methylation of PRAME SEQ ID NO: 419 is a marker for placenta because the CpG dinucleotides of PRAME SEQ ID NO: 419 are methylated within the range of 0-25% in placenta while other tissues show a different extend of methylation. Of course, corresponding markers can also be alternatively used. Thereby corresponding markers of PRAME SEQ ID NO: 419 are, for example but not limited to, genomic DNA derived from or associated with PRAME SEQ ID NO: 419; methylation specifically converted DNA derived from PRAME SEQ ID NO: 419; mRNA, cDNA, protein, or peptide each of which derived at least in parts from PRAME SEQ ID NO: 419. If the case may be, a person skilled in the art knows how to adjust the presented procedures.

[0511] Correspondingly, for example but not limited to, a method for identifying one or more placental cells or placental DNA comprises:

1. Providing of a sample, the sample comprising one or more cells or genomic DNA.
2. Binding of at least one probe to one or more CpG positions within the sequence of PRAME SEQ ID NO: 419 of the provided sample. Thereby a probe binds specifically with respect to the methylation status of said one or more CpG positions. A probe is either a protein, peptide, nucleic acid, RNA or DNA for example but not limited to, an antibody specific for 5-methylcytosine (e.g. AbCAM Cat. No. ab1884); a methyl-binding protein such as the proteins MeCP2, MBD1, MBD2, MBD4, Kaiso or any domain thereof; or a nucleic acid probe that is specific for the methylated sequence. According to some preferred embodiments, the said probe(s) are labeled with a tag suitable for detection of the probe, isolation of one or more cells, and/or purification of one or more cells. A person skilled in the art knows suitable methods to carry out this step.
3. Identifying placental cells or placental genomic DNA by detecting the bound probes and/or their respective label(s). A person skilled in the art knows suitable methods for detection of said probes or labels.

[0512] In preferred embodiments, a probe of step 2 binds specifically with respect to the methylation status of 1, 2, 3, 4, 5, 6, 7, 8, 9, 10, 11, 12, 13, 14, 15, 16, 17, 18, 19, 20, 22, 25, or 30 CpG dinucleotides.

[0513] For particular applications it is necessary to isolate or purify placental cell or placental genomic DNA. Accordingly, as an example but not limited to, a method for isolating and/or purifying placental cells or placental genomic DNA comprises in addition to the steps of the said method for identifying placental cells or placental genomic DNA:

3. Isolating and/or purifying of the identified placental cells or placental genomic DNA from the provided sample by means of the attached probes and their corresponding tags, respectively. A person skilled in the art knows suitable methods. Said methods are based on chemical, physical or biological properties of the attached probes or corresponding tags. For example but not limited to, the isolation is performed (i) by means of affinity cromatography, wherein the probe (e.g. a nucleic acid) is directly or indirectly bound to a solid surface; (ii) by means of affinity cromatography, wherein the probe is attached to a tag that is recognized by an antibody immobilized on a column; (iii) by means of magnetic beads, wherein a magnetic bead is directly or indirectly bound to an attached probe and wherein a magnetic field is applied; or (iv) by means of fluorescent activated cell sorting, wherein the used tag is a fluorescent dye.

[0514] According to a preferred embodiment, the isolated or purified placental cells or placental genomic DNA are quantified by means of the attached probes and/or their corresponding tags. A person skilled in the art knows suitable methods. For example, but not limited to by cell counting manually or by automatic means. According to a preferred embodiment, the isolated or purified placental genomic DNA is quantified by means of at least one selected from the group comprising amplification method, PCR method, isothermal amplification method, NASBA method, LCR method, methylation specific amplification method, MSP (Methylation Specific PCR) method, nested MSP method, HeavyMethyl™ method, detection method, methylation specific detection method, bisulfite sequencing method, detection by means of DNA-arrays, detection by means of oligonucleotide microarrays, detection by means of CpG-island-microarrays, detection by means of restriction enzymes, detection by means of methylation sensitive restriction enzymes simultaneous methylation specific amplification and detection method, COBRA method, real-time PCR, HeavyMethyl™ real time PCR method, MSP MethyLight™ method, MethyLight™ method, MethyLight™ Algo™ method, QM method, Headloop MethyLight™ method, HeavyMethyl™ MethyLight™ method, HeavyMethyl™ Scorpion™ method, MSP Scorpion™ method, Headloop Scorpion™ method, methylation sensitive primer extension, Ms-SNuPE (Methylation-sensitive Single Nucleotide Primer Extension) method.

[0515] Alternatively, for example but not limited to, a method for quantifying the number of placental cells or the amount of placental genomic DNA comprises:

1. Providing of a sample, the sample comprising one or more cells or genomic DNA. The genomic DNA is purified from said sample, preferably by means of a kit. A person skilled in the art is aware of suitable kits. For example, but not limited to it, the kit for purification of genomic DNA is the DNeasy Tissue Kit (Qiagen) or the Wizard Genomic DNA Purification kit (Promega).
2. Determining the methylation level of at least one CpG position within the sequence of PRAME SEQ ID NO: 419 of the provided sample. A person skilled in the art knows how to determine the methylation state or the methylation level of one or more CpG positions. For example, but not limited to, the methylation state or level is determined by means of at least one selected from the group comprising amplification method, PCR method, isothermal amplification method, NASBA method, LCR method, methylation specific amplification method, MSP (Methylation Specific PCR) method, nested MSP method, HeavyMethyl™ method, detection method, methylation specific detection method, bisulfite sequencing method, detection by means of DNA-arrays, detection by means of oligonucleotide microarrays, detection by means of CpG-island-microarrays, detection by means of restriction enzymes, detection by means of methylation sensitive restriction enzymes simultaneous methylation specific amplification and detection method, COBRA method, real-time PCR, HeavyMethyl™ real time PCR method, MSP MethyLight™ method, MethyLight™ method, MethyLight™ Algo™ method, QM method, Headloop MethyLight™ method, HeavyMethyl™ MethyLight™ method, HeavyMethyl™ Scorpion™ method, MSP Scorpion™ method, Headloop Scorpion™ method, methylation sensitive primer extension, Ms-SNuPE (Methylation-sensitive Single Nucleotide Primer Extension) method, and proteins binding specifically methylated or unmethylated DNA like the proteins MeCP2, MBD1, MBD2, MBD4, Kaiso or any domain thereof like but not limited to the CXXC-3 domain of the MBD1 protein or methylation-specific antibodies, e.g. anti-5-methylcytosine antibodies.
3. Quantifying the number of placental cells or the amount of placental genomic DNA by comparing the determined one or more methylation levels of the sample with the respective herein provided one or more methylation levels specific for placenta and with at least one methylation level representing the correspondent tissue, group of cells, or cell comprising no placental DNA.

[0516] For example but not limited to it, a method for characterizing one or more placental cells or placental genomic DNA comprises

1. Providing of a sample comprising one or more placental cells or placental genomic DNA. The placental cell(s) or the placental genomic DNA are isolated for example but not limited to the methods described herein.
2. Characterizing said sample by determining the methylation state or the methylation level of at least one CpG position within the sequence of PRAME SEQ ID NO: 419 of the provided sample. Thereby a profile is generated comprising the methylation information of all characterized CpG positions of PRAME SEQ ID NO: 419 of the respective sample. A person skilled in the art knows how to determine the methylation state or the methylation level of one or more CpG positions. For example, but not limited to, the methylation state or level is determined by means of at least one selected from the group comprising amplification method, PCR method, isothermal amplification method, NASBA method, LCR method, methylation specific amplification method, MSP (Methylation Specific PCR) method, nested MSP method, HeavyMethyl™ method, detection method, methylation specific detection method, bisulfite sequencing method, detection by means of DNA-arrays, detection by means of oligonucleotide microarrays, detection by means of CpG-island-microarrays, detection by means of restriction enzymes, detection by means of methylation sensitive restriction enzymes simultaneous methylation specific amplification and detection method, COBRA method, real-time PCR, HeavyMethyl™ real time PCR method, MSP MethyLight™ method, MethyLight™ method, MethyLight™ Algo™ method, QM method, Headloop MethyLight™ method, HeavyMethyl™ MethyLight™ method, HeavyMethyl™ Scorpion™ method, MSP Scorpion™ method, Headloop Scorpion™ method, methylation sensitive primer extension, Ms-SNuPE (Methylation-sensitive Single Nucleotide Primer Extension) method, and proteins binding specifically methylated or unmethylated DNA like the proteins MeCP2, MBD1, MBD2, MBD4, Kaiso or any domain thereof like but not limited to the CXXC-3 domain of the MBD1 protein or methylation-specific antibodies, e.g. anti-5-methylcytosine antibodies.

[0517] In a preferred embodiment of step 1, the genomic DNA comprising placental genomic DNA is isolated/purified from the provided sample, preferably by means of a kit. A person skilled in the art is aware of suitable kits. For example, but not limited to it, the kit for purification of genomic DNA is the DNeasy Tissue Kit (Qiagen) or the Wizard Genomic DNA Purification kit (Promega).

[0518] In a preferred embodiment, the determined PRAME profile is compared with one or more PRAME profiles obtained from other samples of the same individual and/or with one or more PRAME reference profiles of a normal pregnancy.

[0519] In a preferred embodiment, the herein provided markers of Table 8J and Table 9I are used for to the monitoring of embryonic development or the monitoring of placental development, in particular of extra-embryonic tissue or of interaction of extra-embryonic tissue with maternal placental tissue. Said embodiment comprises one or more of said methods for identifying one or more placental cells or placental DNA; one or more of said methods for isolating and/or purifying one or more placental cells or placental genomic DNA; one or more of said methods for quantifying the number of placental cells or the amount of placental genomic DNA; one or more of said methods for characterizing one or more placental cells or placental genomic DNA; or combinations thereof. application is for example but not limited

[0520] In a preferred embodiment, the herein provided markers of Table 8J and Table 9I are used for the study, monitoring, identification and/or quantification of placental cells in regenerative medicine, in particular in the field of tissue engineering. Therefore the above described methods (a method for identifying one or more placental cells or placental DNA; a method for isolating and/or purifying one or more placental cells or placental genomic DNA; a method for quantifying the number of placental cells or the amount of placental genomic DNA; a method for characterizing one or more placental cells or placental genomic DNA; a method for monitoring one or more placental cells) or combinations thereof are used. Thereby the said methods are applied to placental cells or to cells derived from placental cells. Furthermore the methods are applied in particular before and after storage, before and after cell differentiation, before and after cell proliferation, before and after cell culture expansion, and before and after tissue expansion as well as before and after transplantation. For example but not limited to, the differential methylation of GPR24 SEQ ID NO: 436 is used. According to Table 6, the differential methylation of GPR24 SEQ ID NO: 436 is a marker for placenta because the CpG dinucleotides of GPR24 SEQ ID NO: 436 are methylated within the range of 25-75% in placenta while other tissues show a different extend of methylation. Said methods (a method for identifying one or more placental cells or placental DNA; a method for isolating and/or purifying one or more placental cells or placental genomic DNA; a method for quantifying the number of placental cells or the amount of placental genomic DNA; a method for characterizing one or more placental cells or placental genomic DNA; a method for monitoring one or more placental cells) are carried out as described above, wherein PRAME SEQ ID NO: 419 is substituted by GPR24 SEQ ID NO: 436. Of course, corresponding markers can also be alternatively used. Thereby corresponding markers of GPR24 SEQ ID NO: 436 are, for example but not limited to, genomic DNA derived from or associated with GPR24 SEQ ID NO: 436; methylation specifically converted DNA derived from GPR24 SEQ ID NO: 436; mRNA, cDNA, protein, or peptide each of which derived at least in parts from GPR24 SEQ ID NO: 436. If the case may be, a person skilled in the art knows how to adjust the said methods.

### Sperm:

[0521] The herein provided markers of Table 8L are used for diagnosing a male infertility related disease. A major cause of male infertility is either a low amount of sperm cells (spermatozoa) in the ejaculate (oligospermia) or a complete lack of sperm cells (spermatozoa) in the ejaculate (azoospermia). Thus, methods for the quantification of sperm cells are widely used in diagnosis of male infertility. In addition methylation analysis of sperm cells can be used as a tool to access the viability of the said. For example but not limited to, the differential methylation of GAL3ST1 SEQ ID NO: 437 is used. According to Table 6, the differential methylation of GAL3ST1 SEQ ID NO: 437 is a marker for sperm because the CpG dinucleotides of GAL3ST1 SEQ ID NO: 437 are methylated within the range of 0-25% in sperm while other tissues show a different extend of methylation. Of course, corresponding markers can also be alternatively used. Thereby corresponding markers of GAL3ST1 SEQ ID NO: 437 are, for example but not limited to, genomic DNA derived from or associated with GAL3ST1 SEQ ID NO: 437; methylation specifically converted DNA derived from GAL3ST1 SEQ ID NO: 437; mRNA, cDNA, protein, or peptide each of which derived at least in parts from GAL3ST1 SEQ ID NO: 437. If the case may be, a person skilled in the art knows how to adjust the presented procedures.

[0522] Correspondingly, for example but not limited to, a method for diagnosing a male infertility related disease comprises the quantification and/or characterization of sperm cells in the ejaculate.

[0523] For example, but not limited to, a method for characterization of sperm cells in the ejaculate comprises:

1. Providing of a sample comprising ejaculate or genomic DNA derived from an ejaculate. The genomic DNA is isolated/purified from the provided sample, preferably by means of a kit. A person skilled in the art is aware of suitable kits. For example, but not limited to it, the kit for purification of genomic DNA is the DNeasy Tissue Kit (Qiagen) or the Wizard Genomic DNA Purification kit (Promega).
2. Characterizing said sample by determining the methylation state or the methylation level of at least one CpG position within the sequence of GAL3ST1 SEQ ID NO: 437 of the provided sample. Thereby a profile is generated comprising the methylation information of all characterized CpG positions of GAL3ST1 SEQ ID NO: 437 of the respective sample. A person skilled in the art knows how to determine the methylation state or the methylation level of one or more CpG positions. For example, but not limited to, the methylation state or level is determined by means of at least one selected from the group comprising amplification method, PCR method, isothermal amplification method, NASBA method, LCR method, methylation specific amplification method, MSP (Methylation Specific PCR) method, nested MSP method, HeavyMethyl™ method, detection method, methylation specific detection method, bisulfite sequencing method, detection by means of DNA-arrays, detection by means of oligonucleotide microarrays, detection by means of CpG-island-microarrays, detection by means of restriction enzymes, detection by means of methylation sensitive restriction enzymes simultaneous methylation specific amplification and detection method, COBRA method, real-time PCR, HeavyMethyl™ real time PCR method, MSP MethyLight™ method, MethyLight™ method, MethyLight™ Algo™ method, QM method, Headloop MethyLight™ method, HeavyMethyl™ MethyLight™ method, HeavyMethyl™ Scorpion™ method, MSP Scorpion™ method, Headloop Scorpion™ method, methylation sensitive primer extension, Ms-SNuPE (Methylation-sensitive Single Nucleotide Primer Extension) method, and proteins binding specifically methylated or unmethylated DNA like the proteins MeCP2, MBD1, MBD2, MBD4, Kaiso or any domain thereof like but not limited to the CXXC-3 domain of the MBD1 protein or methylation-specific antibodies, e.g. anti-5-methylcytosine antibodies.

[0524] According to a preferred embodiment, the determined GAL3ST1 profile of a provided sample is compared with at least one GAL3ST1 reference profile. Said reference profile is either obtained from a different individual or from the same individual. The reference profile is characterized in that it is specific for a defined state of viability of sperm cells. In a preferred embodiment several reference profiles are used each of which is specific for a defined state of viability of sperm cells in the ejaculate and therefore for a defined value of infertility or fertility. In case a determined GAL3ST1 profile matches or is similar to a reference profile, it is deduced that the viability of sperm cells of the correspondent individual is characterized by the said defined state of viability of the reference.

[0525] Alternatively, for example, but not limited to, a method for characterizing sperm cells in an ejaculate comprises:
[0526] 1. Providing of a sample comprising ejaculate or genomic DNA derived from an ejaculate.
[0527] 2. Binding of at least one probe to one or more CpG positions within the sequence of GAL3ST1 SEQ ID NO: 437 of the provided sample. Thereby a probe binds specifically with respect to the methylation status of said one or more CpG positions creating a characteristic binding pattern. A probe is either a protein, peptide, nucleic acid, RNA or DNA for example but not limited to, an antibody specific for 5-methylcytosine (e.g. AbCAM Cat. No. ab1884); a methyl-binding protein such as the proteins MeCP2, MBD1, MBD2, MBD4, Kaiso or any domain thereof, or a nucleic acid probe that is specific for the methylated sequence. According to some preferred embodiments, the said probe(s) are labeled with a tag suitable for detection of the probe, isolation of one or more cells, and/or purification of one or more cells. A person skilled in the art knows suitable methods to carry out this step.

[0528] According to a preferred embodiment, the determined GAL3ST1 binding pattern is compared with at least one GAL3ST1 reference binding pattern. Said reference binding pattern is either obtained from a different individual or from the same individual. The reference binding pattern is characterized in that it is specific for a defined state of viability of sperm cells. In a preferred embodiment several reference binding patterns are used each of which is specific for a defined state of viability of sperm cells in the ejaculate and therefore for a defined value of infertility or fertility. In case a determined GAL3ST1 binding pattern matches or is similar to a reference binding pattern, it is deduced that the viability of sperm cells of the correspondent individual is characterized by the said defined state of viability of the reference.

[0529] For example, but not limited to, a method for quantification of sperm cells in the ejaculate comprises the identification of sperm cells. For example, but not limited to, a method for identification of sperm cells comprises:

1. Providing of a sample comprising ejaculate or genomic DNA derived from an ejaculate.
2. Binding of at least one probe to one or more CpG positions within the sequence of GAL3ST1 SEQ ID NO: 437 of the provided sample. Thereby a probe binds specifically with respect to the methylation status of said one or more CpG positions creating a characteristic binding pattern. A probe is either a protein, peptide, nucleic acid, RNA or DNA for example but not limited to, an antibody specific for 5-methylcytosine (e.g. AbCAM Cat. No. ab1884); a methyl-binding protein such as the proteins MeCP2, MBD1, MBD2, MBD4, Kaiso or any domain thereof; or a nucleic acid probe that is specific for the methylated sequence. According to some preferred embodiments, the said probe(s) are labeled with a tag suitable for detection of the probe, isolation of one or more cells, and/or purification of one or more cells. A person skilled in the art knows suitable methods to carry out this step.
3. Identifying sperm cells or sperm genomic DNA by detecting the bound probes and/or their respective label(s). A person skilled in the art knows suitable methods for detection of said probes or labels.

[0530] In preferred embodiments, a probe of step 2 binds specifically with respect to the methylation status of 1, 2, 3, 4, 5, 6, 7, 8, 9, 10, 11, 12, 13, 14, 15, 16, 17, 18, 19, 20, 22, 25, or 30 CpG dinucleotides.

[0531] The said method for quantification of sperm cells in the ejaculate comprising the identification of sperm cells additional comprises:

[0532] Quantifying the identified sperm cells by counting or quantifying the labeled sperm genomic DNA by quantifying the bound probes and/or their respective label(s). A person skilled in the art knows suitable methods for quantification and/or counting.

[0533] Alternatively, for example but not limited to, a method for quantification of sperm cells in the ejaculate comprises:

1. Providing of a sample comprising ejaculate or genomic DNA derived from an ejaculate. The genomic DNA is isolated/purified from the provided sample, preferably by means of a kit. A person skilled in the art is aware of suitable kits. For example, but not limited to it, the kit for purification of genomic DNA is the DNeasy Tissue Kit (Qiagen) or the Wizard Genomic DNA Purification kit (Promega).
2. Determining the methylation level of at least one CpG position within the sequence of GAL3ST1 SEQ ID NO: 437 of the provided sample. A person skilled in the art knows how to determine the methylation state or the methylation level of one or more CpG positions. For example, but not limited to, the methylation state or level is determined by means of at least one selected from the group comprising amplification method, PCR method, isothermal amplification method, NASBA method, LCR method, methylation specific amplification method, MSP (Methylation Specific PCR) method, nested MSP method, HeavyMethyl™ method, detection method, methylation specific detection method, bisulfite sequencing method, detection by means of DNA-arrays, detection by means of oligonucleotide microarrays, detection by means of CpG-island-microarrays, detection by means of restriction enzymes, detection by means of methylation sensitive restriction enzymes simultaneous methylation specific amplification and detection method, COBRA method, real-time PCR, HeavyMethyl™ real time PCR method, MSP MethyLight™ method, MethyLight™ method, MethyLight™ Algo™ method, QM method, Headloop MethyLight™ method, HeavyMethyl™ MethyLight™ method, HeavyMethyl™ Scorpion™ method, MSP Scorpion™ method, Headloop Scorpion™ method, methylation sensitive primer extension, Ms-SNuPE (Methylation-sensitive Single Nucleotide Primer Extension) method, and proteins binding specifically methylated or unmethylated DNA like the proteins MeCP2, MBD1, MBD2, MBD4, Kaiso or any domain thereof like but not limited to the CXXC-3 domain of the MBD1 protein or methylation-specific antibodies, e.g. anti-5-methylcytosine antibodies.
3. Quantifying the number of sperm cells or the amount of sperm genomic DNA by comparing the determined one or more methylation levels of the sample with the respective herein provided one or more methylation levels specific for sperm and with at least one methylation level representing an ejaculate comprising no sperm cell or a defined amount of sperm cells.

[0534] For example but not limited to, a method for diagnosing fertility or infertility for a male individual comprises:
[0535] 1. Quantifying the amount of sperm cells in the ejaculate of said individual.
[0536] 2. Comparing said amount with at least one reference value. The reference value is specific for a defined fertility or infertility state. In case the quantified amount of sperm cells matches or is similar to the reference value, it is deduced that the fertility or infertility of said individual has the same fertility or infertility which is specific for the reference value.

[0537] In a preferred embodiment, the herein provided markers of Table 8L are used for increasing the fertility of a male individual. As said above male fertility is often limited by the amount of sperm cells in the ejaculate. Thus, male fertility can be enhanced by enriching, isolating or purifying sperm cells. For example but not limited to, the differential methylation of APOL4 SEQ ID NO: 486 is used. According to Table 6, the differential methylation of APOL4 SEQ ID NO: 486 is a marker for sperm because the CpG dinucleotides of APOL4 SEQ ID NO: 486 are methylated within the range of 75-100% in sperm while other tissues show a different extend of methylation. Of course, corresponding markers can also be alternatively used. Thereby corresponding markers of APOL4 SEQ ID NO: 486 are, for example but not limited to, genomic DNA derived from or associated with APOL4 SEQ ID NO: 486; methylation specifically converted DNA derived from APOL4 SEQ ID NO: 486; mRNA, cDNA, protein, or peptide each of which derived at least in parts from APOL4 SEQ ID NO: 486. If the case may be, a person skilled in the art knows how to adjust the presented procedures.

[0538] Correspondingly, for example but not limited to, a method for increasing the fertility of a male individual comprises:

1. Identification of sperm cells in an ejaculate by means of the above described method for identification of sperm cells, wherein GAL3ST1 SEQ ID NO: 437 is substitutes by APOL4 SEQ ID NO: 486.
2. Enriching, isolating or purifying sperm cells by means of the attached probes and their corresponding tags, respectively. A person skilled in the art knows suitable methods. Said methods are based on chemical, physical or biological properties of the attached probes or corresponding tags. For example but not limited to, the isolation is performed (i) by means of affinity cromatography, wherein the probe (e.g. a nucleic acid) is directly or indirectly bound to a solid surface; (ii) by means of affinity cromatography, wherein the probe is attached to a tag that is recognized by an antibody immobilized on a column; (iii) by means of magnetic beads, wherein a magnetic bead is directly or indirectly bound to an attached probe and wherein a magnetic field is applied; or (iv) by means of fluorescent activated cell sorting, wherein the used tag is a fluorescent dye.

[0539] In a preferred embodiment, the herein provided markers of Table 8L are used for assisted fertilization procedures. Assisted fertilization procedures are for example but not limited to intracytoplasmic sperm injection (ICSI) or in vitro fertilization (IVF). All assisted fertilization procedures require the management of sperm cells prior to the procedure. Such management comprises at least the characterization, identification, quantification, enrichment, isolation, purification of sperm cells or combinations thereof. Therefore the above described methods for characterizing, identifying, quantifying, enriching, isolating and purifying sperm cells are applied.

[0540] In a preferred embodiment, the herein provided markers of Table 8L are used in the fields of forensic and/or legal medicine. By use of the said markers it is possible to determine the presence or absence of sperm in a sample. Furthermore, it is possible to identify an individual by use of said markers. For example but not limited to, the differential methylation of TCN2 SEQ ID NO: 470 is used. According to Table 6, the differential methylation of TCN2 SEQ ID NO: 470 is a marker for sperm because the CpG dinucleotides of TCN2 SEQ ID NO: 470 are methylated within the range of 75-100% in sperm while other tissues show a different extend of methylation. Of course, corresponding markers can also be alternatively used. Thereby corresponding markers of TCN2 SEQ ID NO: 470 are, for example but not limited to, genomic DNA derived from or associated with TCN2 SEQ ID NO: 470; methylation specifically converted DNA derived from TCN2 SEQ ID NO: 470; mRNA, cDNA, protein, or peptide each of which derived at least in parts from TCN2 SEQ ID NO: 470. If the case may be, a person skilled in the art knows how to adjust the presented procedures.

[0541] Correspondingly, for example but not limited to, a method for identifying sperm cells in a sample and/or for identifying an individual comprises:
[0542] 1. Providing a sample comprising genomic DNA.
[0543] 2. Binding of at least one probe to one or more CpG positions within the sequence of TCN2 SEQ ID NO: 470 of the provided sample. Thereby a probe binds specifically with respect to the methylation status of said one or more CpG positions and/or with respect to the methylation status of said one or more CpG positions and an individual. A probe is either a protein, peptide, nucleic acid, RNA or DNA for example but not limited to, an antibody specific for 5-methylcytosine (e.g. AbCAM Cat. No. ab1884); a methyl-binding protein such as the proteins MeCP2, MBD1, MBD2, MBD4, Kaiso or any domain thereof, or a nucleic acid probe that is specific for the methylated sequence. According to some preferred embodiments, the said probe(s) are labeled with a tag suitable for detection of the probe, isolation of one or more cells, and/or purification of one or more cells. A person skilled in the art knows suitable methods to carry out this step.
[0544] 3. Identifying sperm cells or sperm genomic DNA or identifying sperm cells or sperm genomic DNA of an individual by detecting the bound probes and/or their respective label(s). A person skilled in the art knows suitable methods for detection of said probes or labels.

[0545] In addition, for example but not limited to, an alternative method for identifying an individual comprises:

1. Providing of a sample comprising genomic DNA. The genomic DNA is purified from said sample, preferably by means of a kit. A person skilled in the art is aware of suitable kits. For example, but not limited to it, the kit for purification of genomic DNA is the DNeasy Tissue Kit (Qiagen) or the Wizard Genomic DNA Purification kit (Promega).
2. Determining the methylation level of at least one CpG position within the sequence of TCN2 SEQ ID NO: 470 of the provided sample. A person skilled in the art knows how to determine the methylation state or the methylation level of one or more CpG positions. For example, but not limited to, the methylation state or level is determined by means of at least one selected from the group comprising amplification method, PCR method, isothermal amplification method, NASBA method, LCR method, methylation specific amplification method, MSP (Methylation Specific PCR) method, nested MSP method, HeavyMethyl™ method, detection method, methylation specific detection method, bisulfite sequencing method, detection by means of DNA-arrays, detection by means of oligonucleotide microarrays, detection by means of CpG-island-microarrays, detection by means of restriction enzymes, detection by means of methylation sensitive restriction enzymes simultaneous methylation specific amplification and detection method, COBRA method, real-time PCR, HeavyMethyl™ real time PCR method, MSP MethyLight™ method, MethyLight™ method, MethyLight™ Algo™ method, QM method, Headloop MethyLight™ method, HeavyMethyl™ MethyLight™ method, HeavyMethyl™ Scorpion™ method, MSP Scorpion™ method, Headloop Scorpion™ method, methylation sensitive primer extension, Ms-SNuPE (Methylation-sensitive Single Nucleotide Primer Extension) method, and proteins binding specifically methylated or unmethylated DNA like the proteins MeCP2, MBD1, MBD2, MBD4, Kaiso or any domain thereof like but not limited to the CXXC-3 domain of the MBD1 protein or methylation-specific antibodies, e.g. anti-5-methylcytosine antibodies.
3. Comparing the determined methylation level(s) of said sample with respective TCN2 SEQ ID NO: 470 methylation level(s) of at least one sample obtained from at least one candidate individual. Wherein the determined methylation level(s) matches or is similar to the respective methylation level(s) of an individual, it its deduced that the provided sample comprises sperm genomic DNA or sperm cells of said individual. Thereby an individual is identified.

### Skeletal Muscle

[0546] In a preferred embodiment, the herein provided markers of Table 8F, 8K and Table 9J are used for characterizing the efficiency of skeletal muscle cells. This embodiment is of particular value in the field of sports medicine. For example but not limited to, the differential methylation of CARD10 SEQ ID NO: 498 is used. According to Table 6, the differential methylation of CARD10 SEQ ID NO: 498 is a marker for skeletal muscle because the CpG dinucleotides of CARD10 SEQ ID NO: 498 are methylated within the range of 0-25% in skeletal muscle while other tissues show a different extend of methylation. Of course, corresponding markers can also be alternatively used. Thereby corresponding markers of CARD10 SEQ ID NO: 498 are, for example but not limited to, genomic DNA derived from or associated with CARD10 SEQ ID NO: 498; methylation specifically converted DNA derived from CARD10 SEQ ID NO: 498; mRNA, cDNA, protein, or peptide each of which derived at least in parts from CARD10 SEQ ID NO: 498. If the case may be, a person skilled in the art knows how to adjust the presented procedures.

[0547] Correspondingly, for example but not limited to, a method for characterizing the efficiency of a skeletal muscle comprises:

1. Providing of a sample comprising genomic DNA of a skeletal muscle. The genomic DNA is purified from said sample, preferably by means of a kit. A person skilled in the art is aware of suitable kits. For example, but not limited to it, the kit for purification of genomic DNA is the DNeasy Tissue Kit (Qiagen) or the Wizard Genomic DNA Purification kit (Promega).
2. Characterizing the provided sample by Determining the methylation level of at least one CpG position within the sequence of CARD10 SEQ ID NO: 498 of the provided sample. Thereby a CARD 10 profile is generated. A person skilled in the art knows how to determine the methylation state or the methylation level of one or more CpG positions. For example, but not limited to, the methylation state or level is determined by means of at least one selected from the group comprising amplification method, PCR method, isothermal amplification method, NASBA method, LCR method, methylation specific amplification method, MSP (Methylation Specific PCR) method, nested MSP method, HeavyMethyl™ method, detection method, methylation specific detection method, bisulfite sequencing method, detection by means of DNA-arrays, detection by means of oligonucleotide microarrays, detection by means of CpG-island-microarrays, detection by means of restriction enzymes, detection by means of methylation sensitive restriction enzymes simultaneous methylation specific amplification and detection method, COBRA method, real-time PCR, HeavyMethyl™ real time PCR method, MSP MethyLight™ method, MethyLight™ method, MethyLight™ Algo™ method, QM method, Headloop MethyLight™ method, HeavyMethyl™ MethyLight™ method, HeavyMethyl™ Scorpion™ method, MSP Scorpion™ method, Headloop Scorpion™ method, methylation sensitive primer extension, Ms-SNuPE (Methylation-sensitive Single Nucleotide Primer Extension) method, and proteins binding specifically methylated or unmethylated DNA like the proteins MeCP2, MBD1, MBD2, MBD4, Kaiso or any domain thereof like but not limited to the CXXC-3 domain of the MBD1 protein or methylation-specific antibodies, e.g. anti-5-methylcytosine antibodies.
3. Comparing the generated CARD10 profile with at least one CARD10 reference profile. Thereby each reference profile is characteristic for a defined efficiency. Wherein the determined CARD10 profile matches or is similar to a CARD10 reference profile, the skeletal muscle from whom the analyzed sample is provided has the same efficiency as the said reference.

[0548] In a preferred embodiment, the herein provided markers of Table 8F, 8K and Table 9J are used for identifying fully differentiated muscle cells in cell culture. This is of particular value in the field of tissue engineering. Muscle cells are generate in cell culture by cultivation and differentiation of muscle cell progenitor cells. Fully differentiated skeletal muscle cells can be identified by means of the provided markers of Table 8F, 8K and Table 9J. For example but not limited to, the differential methylation of HTF9C_HUMAN SEQ ID NO: 500 is used. According to Table 6, the differential methylation of HTF9C_HUMAN SEQ ID NO: 500 is a marker for skeletal muscle because the CpG dinucleotides of HTF9C_HUMAN SEQ ID NO: 500 are methylated within the range of 25-75% in skeletal muscle while other tissues show a different extend of methylation. Of course, corresponding markers can also be alternatively used. Thereby corresponding markers of HTF9C_HUMAN SEQ ID NO: 500 are, for example but not limited to, genomic DNA derived from or associated with HTF9C_HUMAN SEQ ID NO: 500; methylation specifically converted DNA derived from HTF9C_HUMAN SEQ ID NO: 500; mRNA, cDNA, protein, or peptide each of which derived at least in parts from HTF9C_HUMAN SEQ ID NO: 500. If the case may be, a person skilled in the art knows how to adjust the presented procedures.

[0549] Correspondingly, for example but not limited to, a method for identifying fully in vitro differentiated muscle cell comprises:

1. Providing of a sample comprising genomic DNA of a skeletal muscle. The genomic DNA is purified from said sample, preferably by means of a kit. A person skilled in the art is aware of suitable kits. For example, but not limited to it, the kit for purification of genomic DNA is the DNeasy Tissue Kit (Qiagen) or the Wizard Genomic DNA Purification kit (Promega).
2. Characterizing the provided sample by Determining the methylation level of at least one CpG position within the sequence of HTF9C_HUMAN SEQ ID NO: 500 of the provided sample. Thereby a HTF9C_HUMAN profile is generated. A person skilled in the art knows how to determine the methylation state or the methylation level of one or more CpG positions. For example, but not limited to, the methylation state or level is determined by means of at least one selected from the group comprising amplification method, PCR method, isothermal amplification method, NASBA method, LCR method, methylation specific amplification method, MSP (Methylation Specific PCR) method, nested MSP method, HeavyMethyl™ method, detection method, methylation specific detection method, bisulfite sequencing method, detection by means of DNA-arrays, detection by means of oligonucleotide microarrays, detection by means of CpG-island-microarrays, detection by means of restriction enzymes, detection by means of methylation sensitive restriction enzymes simultaneous methylation specific amplification and detection method, COBRA method, real-time PCR, HeavyMethyl™ real time PCR method, MSP MethyLight™ method, MethyLight™ method, MethyLight™ Algo™ method, QM method, Headloop MethyLight™ method, HeavyMethyl™ MethyLight™ method, HeavyMethyl™ Scorpion™ method, MSP Scorpion™ method, Headloop Scorpion™ method, methylation sensitive primer extension, Ms-SNuPE (Methylation-sensitive Single Nucleotide Primer Extension) method, and proteins binding specifically methylated or unmethylated DNA like the proteins MeCP2, MBD1, MBD2, MBD4, Kaiso or any domain thereof like but not limited to the CXXC-3 domain of the MBD1 protein or methylation-specific antibodies, e.g. anti-5-methylcytosine antibodies.
3. Comparing the generated HTF9C_HUMAN profile with a HTF9C_HUMAN reference profile which is characteristic for a fully differentiated muscle cell. Wherein the determined HTF9C_HUMAN profile matches or is similar to the reference profile, the analyzed skeletal muscle cell is considered as fully differentiated.

[0550] In a preferred embodiment, the herein provided markers of Table 8F, 8K and Table 9J are used for diagnosing muscle cell associated diseases, in particular disease which are characterized by a death of muscle cells like muscular distrophy. The DNA of dead muscle cells is found in body fluids such as blood or urine. This DNA is identified by means of the herein provided markers of Table 8F, 8K and Table 9J. For example but not limited to, the differential methylation of EYA2 SEQ ID NO: 678 is used. According to Table 6, the differential methylation of EYA2 SEQ ID NO: 678 is a marker for skeletal muscle because the CpG dinucleotides of EYA2 SEQ ID NO: 678 are methylated within the range of 25-75% in skeletal muscle while other tissues show a different extend of methylation. Of course, corresponding markers can also be alternatively used. Thereby corresponding markers of EYA2 SEQ ID NO: 678 are, for example but not limited to, genomic DNA derived from or associated with EYA2 SEQ ID NO: 678; methylation specifically converted DNA derived from EYA2 SEQ ID NO: 678; mRNA, cDNA, protein, or peptide each of which derived at least in parts from EYA2 SEQ ID NO: 678. If the case may be, a person skilled in the art knows how to adjust the presented procedures.

[0551] Correspondingly, for example but not limited to, a method for diagnosing muscle cell associated diseases comprises:

1. Providing of a sample derived from blood or urine, the sample comprising genomic DNA. The genomic DNA is isolated/purified from the provided sample, preferably by means of a kit. A person skilled in the art is aware of suitable kits. For example, but not limited to it, the kit for purification of genomic DNA is the DNeasy Tissue Kit (Qiagen) or the Wizard Genomic DNA Purification kit (Promega).
2. Characterizing the sample by Determining the methylation level of at least one CpG position within the sequence of EYA2 SEQ ID NO: 678 of the provided sample. Thereby a EAY2 profile is generated. A person skilled in the art knows how to determine the methylation state or the methylation level of one or more CpG positions. For example, but not limited to, the methylation state or level is determined by means of at least one selected from the group comprising amplification method, PCR method, isothermal amplification method, NASBA method, LCR method, methylation specific amplification method, MSP (Methylation Specific PCR) method, nested MSP method, HeavyMethyl™ method, detection method, methylation specific detection method, bisulfite sequencing method, detection by means of DNA-arrays, detection by means of oligonucleotide microarrays, detection by means of CpG-island-microarrays, detection by means of restriction enzymes, detection by means of methylation sensitive restriction enzymes simultaneous methylation specific amplification and detection method, COBRA method, real-time PCR, HeavyMethyl™ real time PCR method, MSP MethyLight™ method, MethyLight™ method, MethyLight™ Algo™ method, QM method, Headloop MethyLight™ method, HeavyMethyl™ MethyLight™ method, HeavyMethyl™ Scorpion™ method, MSP Scorpion™ method, Headloop Scorpion™ method, methylation sensitive primer extension, Ms-SNuPE (Methylation-sensitive Single Nucleotide Primer Extension) method, and proteins binding specifically methylated or unmethylated DNA like the proteins MeCP2, MBD1, MBD2, MBD4, Kaiso or any domain thereof like but not limited to the CXXC-3 domain of the MBD1 protein or methylation-specific antibodies, e.g. anti-5-methylcytosine antibodies.
3. Deducing the presence or absence of a muscle associated disease from comparison of the determined EYA2 profile with at least one EYA2 reference profile. A EYA2 reference profile comprises the same position(s) as the determined profile. In addition a EYA2 profile is specific for either skeletal muscle cells (as herein provided by Table 8F, 8K and Table 9J), blood or urine comprising no skeletal muscle cell DNA, or blood or urine derived from a healthy individual.

### CD8 T-Lymphocytes

[0552] In a preferred embodiment, the herein provided markers of Table 8A specific only for CD8 T-lymphocytes are used for quantifying CD8 T-lymphocytes, in particular for monitoring the immune system of individuals infected with HIV. The periodically determining of the number of CD8 T-lymphocytes for patients infected with HIV is a standard procedure in the art. It is necessary to decide whether and when a drug or treatment is necessary, whether a drug or treatment is still effective, and which drug or treatment can be selected. The said is necessary with respect to the HIV infection itself but also with respect to secondary infection. For example but not limited to, the differential methylation of RP4-695O20_B.9 SEQ ID NO: 706 is used. According to FIG. 1.296 and to Table 6, the differential methylation of RP4-695O20_B.9 SEQ ID NO: 706 is a marker for CD8 T-lymphocytes because the CpG dinucleotides of RP4-695O20_B.9 SEQ ID NO: 706 are methylated within the range of 75-100% in CD8 T-lymphocytes, sperm and liver while other tissues show a different extend of methylation. Furthermore CD8 T-lymphocytes can easily be distinguished from sperm or liver morphologically or by means of other markers. Of course, corresponding markers can also be alternatively used. Thereby corresponding markers of RP4-695O20_B.9 SEQ ID NO: 706 are, for example but not limited to, genomic DNA derived from or associated with RP4-695O20_B.9 SEQ ID NO: 706; methylation specifically converted DNA derived from RP4-695O20_B.9 SEQ ID NO: 706; mRNA, cDNA, protein, or peptide each of which derived at least in parts from RP4-695O20_B.9 SEQ ID NO: 706. If the case may be, a person skilled in the art knows how to adjust the presented procedures.

[0553] Correspondingly, for example but not limited to, a method for quantifying CD8 T-lymphocytes comprises:

1. Providing a sample comprising genomic DNA. The genomic DNA is purified from said sample, preferably by means of a kit. A person skilled in the art is aware of suitable kits. For example, but not limited to it, the kit for purification of genomic DNA is the DNeasy Tissue Kit (Qiagen) or the Wizard Genomic DNA Purification kit (Promega). Preferably said sample is a blood sample, plasma sample, or urine sample.
2. Determining the methylation level of at least one CpG position within the sequence of RP4-695O20_B.9 SEQ ID NO: 706 of the provided sample. Thereby a RP4-695O20_B.9 profile specific of said sample is generated. A person skilled in the art knows how to determine the methylation state or the methylation level of one or more CpG positions. For example, but not limited to, the methylation state or level is determined by means of at least one selected from the group comprising amplification method, PCR method, isothermal amplification method, NASBA method, LCR method, methylation specific amplification method, MSP (Methylation Specific PCR) method, nested MSP method, HeavyMethyl™ method, detection method, methylation specific detection method, bisulfite sequencing method, detection by means of DNA-arrays, detection by means of oligonucleotide microarrays, detection by means of CpG-island-microarrays, detection by means of restriction enzymes, detection by means of methylation sensitive restriction enzymes simultaneous methylation specific amplification and detection method, COBRA method, real-time PCR, HeavyMethyl™ real time PCR method, MSP MethyLight™ method, MethyLight™ method, MethyLight™ Algo™ method, QM method, Headloop MethyLight™ method, HeavyMethyl™ MethyLight™ method, HeavyMethyl™ Scorpion™ method, MSP Scorpion™ method, Headloop Scorpion™ method, methylation sensitive primer extension, Ms-SNuPE (Methylation-sensitive Single Nucleotide Primer Extension) method, and proteins binding specifically methylated or unmethylated DNA like the proteins MeCP2, MBD1, MBD2, MBD4, Kaiso or any domain thereof like but not limited to the CXXC-3 domain of the MBD1 protein or methylation-specific antibodies, e.g. anti-5-methylcytosine antibodies.
3. Deducing the number of CD8 T-lymphocytes from the comparison of the determined RP4-695O20_B.9 profile with one or more RP4-695O20_B.9 reference profiles. Said reference profiles are specific for a defined number of CD8 T-lymphocytes. In addition the reference profiles are obtained from the same sample type as the provided sample. For example but not limited to, blood is the sample type for the provided sample and the reference profiles. In a preferred embodiment, wherein the determined RP4-695O20_B.9 profile matches or is similar to a reference profile specific for a defined number of CD8 T-lymphocytes, the said number of CD8 T-lymphocytes is present in the analyzed sample. In a preferred embodiment, a calibration curve is prepared form the reference profiles. The number of CD8 T-lymphocytes is then deduced by comparing the determined RP4-695O20_B.9 profile with the calibration curve. Of course, other algorithms as the are known in the art are also preferred.

[0554] In addition, for example but not limited to it, a method for quantifying CD8 T-lymphocytes comprises:
[0555] 1. Providing of a sample, comprising genomic DNA;
[0556] 2. Contacting the genomic DNA or a derivative of it with at least one probe which is specific for at least one differentially methylated CpG position of the marker RP4-695O20_B.9 SEQ ID NO: 706. Said probe is selected from the group comprising antibody; 5-methylcytosine specific antibody (e.g. AbCam Cat. No. ab1884); affinity binding protein; protein binding specifically methylated or unmethylated DNA like MeCP2, MBD1, MBD2, MBD4, Kaiso or any domain thereof; nucleic acid; DNA, RNA, PNA or nucleic acid derivative specific for the methylated sequence. In addition, the probe is labeled directly or indirectly with a dye, protein, enzyme, metal, bead or chemical compound suitable for detection.
[0557] 3. Performing a detection reaction by means of the probe and/or the label. A person skilled in the art is aware of suitable detection reactions. For example, but not limited to, the detection reaction comprises Rabbit Peroxidase Anti-Peroxidase (PAP) Soluble Complex (Rockland Catalog#: P300-002); radioactive labeled probes; or probes fluorescently labeled like DNA probes coupled with Cy5 (Invitrogen). A person skilled in the art knows further suitable methods for detection.
[0558] 4. Quantifying the detection reaction in a manner so that the detected signal is indicative for the amount of probe or label and therewith for the number of dead liver cell. A person knows suitable methods for quantification.

[0559] Alternatively, for example but not limited to, a method for quantifying CD8 T-lymphocytes comprises:

1. Providing of a sample, the sample comprising one or more cells or genomic DNA. The genomic DNA is purified from said sample, preferably by means of a kit. A person skilled in the art is aware of suitable kits. For example, but not limited to it, the kit for purification of genomic DNA is the DNeasy Tissue Kit (Qiagen) or the Wizard Genomic DNA Purification kit (Promega).
2. Determining the methylation level of at least one CpG position within the sequence of RP4-695O20_B.9 SEQ ID NO: 706 of the provided sample. A person skilled in the art knows how to determine the methylation level of one or more CpG positions. For example, but not limited to, the methylation state or level is determined by means of at least one selected from the group comprising amplification method, PCR method, isothermal amplification method, NASBA method, LCR method, methylation specific amplification method, MSP (Methylation Specific PCR) method, nested MSP method, HeavyMethyl™ method, detection method, methylation specific detection method, bisulfite sequencing method, detection by means of DNA-arrays, detection by means of oligonucleotide microarrays, detection by means of CpG-island-microarrays, detection by means of restriction enzymes, detection by means of methylation sensitive restriction enzymes simultaneous methylation specific amplification and detection method, COBRA method, real-time PCR, HeavyMethyl™ real time PCR method, MSP MethyLight™ method, MethyLight™ method, MethyLight™ Algo™ method, QM method, Headloop MethyLight™ method, HeavyMethyl™ MethyLight™ method, HeavyMethyl™ Scorpion™ method, MSP Scorpion™ method, Headloop Scorpion™ method, methylation sensitive primer extension, Ms-SNuPE (Methylation-sensitive Single Nucleotide Primer Extension) method, and proteins binding specifically methylated or unmethylated DNA like the proteins MeCP2, MBD1, MBD2, MBD4, Kaiso or any domain thereof like but not limited to the CXXC-3 domain of the MBD1 protein or methylation-specific antibodies, e.g. anti-5-methylcytosine antibodies.
3. Quantifying the number of CD8 T-lymphocytes by comparing the determined one or more methylation levels of the sample with the respective herein provided one or more methylation levels of CD8 T-lymphocytes and with at least one methylation level representing the correspondent tissue, group of cells, or cell. Thereby said correspondent tissue, group of cells, or cell is derived from a healthy individual or is completely free of CD8 T-lymphocytes.

### CD4+ Lymphocytes:

[0560] In a preferred embodiment, the herein provided markers of Table 8A specific only for CD4 T-lymphocytes are used for quantifying CD4 T-lymphocytes, in particular for monitoring the immune system of individuals infected with HIV. The periodically determining of the number of CD4 T-lymphocytes for patients infected with HIV is a standard procedure in the art. It is necessary to decide whether and when a drug or treatment is necessary, whether a drug or treatment is still effective, and which drug or treatment can be selected. The said is necessary with respect to the HIV infection itself but also with respect to secondary infection. For example but not limited to, the differential methylation of SEQ ID NO: 652 (no gene associated) is used. According to Table 6, the differential methylation of SEQ ID NO: 652 is a marker for CD4 T-lymphocytes because the CpG dinucleotides of SEQ ID NO: 652 are methylated within the range of 25-75% in CD4 T-lymphocytes while other tissues show a different extend of methylation. For example but not limited to, the quantification of CD4 T-lymphocytes is carried out as the above described methods for quantifying CD8 T-lymphocytes wherein the marker RP4-695O20_B.9 SEQ ID NO: 706 is substituted by SEQ ID NO: 652. Of course, corresponding markers can also be alternatively used. Thereby corresponding markers of SEQ ID NO: 652 are, for example but not limited to, genomic DNA derived from or associated with SEQ ID NO: 652; methylation specifically converted DNA derived from SEQ ID NO: 652; mRNA, cDNA, protein, or peptide each of which derived at least in parts from SEQ ID NO: 652. If the case may be, a person skilled in the art knows how to adjust the presented procedures.

[0561] All methods named in the above embodiments are known in the art. They are described for example in EP06075376.1 or in PCT/US2006/014667 both of which is hereby incorporated by reference.

[0562] While the present invention has been described with specificity in accordance with certain of its preferred embodiments, the following EXAMPLES and TABLES serve only to illustrate the invention and are not intended to limit the invention within the principles and scope of the broadest interpretations and equivalent configurations thereof.

### Tables

TABLE 1
Overview of the genes or genomic regions according ot the present invention, with HUGO
ID and the SEQ ID NO.

| | | SEQ ID NO: |
|---|---|---|
| Gene | HUGO ID | Genomic |
| FLOT1, flotillin 1, ENSG00000137312 | FLOT1 | 413 |
| C6orf25, chromosome 6 open reading frame 25, | C6orf25 | 414 |
| ENSG00000096148 | | |
| VARS, valyl-tRNA synthetase, ENSG00000096171 | VARS | 415 |
| major histocompatibility complex, class II, DP beta 1, | HLA-DPB1 | 416 |
| OTTHUMG00000031076, HLA-DPB1 | | |
| HLA-DRB5, major histocompatibility complex, class II, DR | HLA-DRB5 | 417 |
| beta 5, OTTHUMG00000031027 | | |
| COL11A2, collagen, type XI, alpha 2, | COL11A2 | 418 |
| OTTHUMG00000031036 | | |
| PRAME, Melanoma antigen preferentially expressed in | PRAME | 419 |
| tumors (Preferentially expressed antigen of melanoma) (OPA- | | |
| interacting protein 4) (OIP4), ENSG00000185686 | | |
| ZNRF3 protein (Fragment), ENSG00000183579, ZNRF3 zinc | ZNRF3 | 420 |
| and ring finger 3 (ZNRF3) | | |
| AP000357.2 (Vega gene ID), Pseudogene | AP000357.2 (Vega | 421 |
| | gene ID) | |
| AP000357.3 (Vega gene ID), Pseudogene | AP000357.3 (Vega | 422 |
| | gene ID) | |
| solute carrier family 7 (cationic amino acid transporter, y+ | SLC7A4 | 423 |
| system), member 4, OTTHUMG00000030129, SLC7A4 | | |
| Myosin-18B (Myosin XVIIIb), ENSG00000133454, | MYO18B | 424 |
| MYO18B | | |
| Q6ICL0_HUMAN (Predicted UniProt/TrEMBL ID), | Q6ICL0_HUMAN | 425 |
| hypothetical protein FLJ3257; ENSG00000184004 | (Predicted | |
| | UniProt/TrEMBL | |
| | ID) | |
| FBLN1; fibulin 1; ENSG00000077942 | FBLN1 | 426 |
| CYP2D6; cytochrome P450, family 2, subfamily D, | CYP2D6 | 427 |
| polypeptide 6; ENSG00000100197 | | |
| AC008132.9 (Vega gene ID); Pseudogene; | AC008132.9 (Vega | 428 |
| OTTHUMG00000030688 | gene ID) | |
| glycoprotein Ib (platelet), beta polypeptide, | GP1BB | 429 |
| OTTHUMT00000075045, GP1BB-001 | | |
| no gene associated | | 430 |
| AC006548.8 (Vega gene ID) | AC006548.8 (Vega | 431 |
| | gene ID) | |
| OTTHUMG00000030650, AC005399.2, putative processed | AC005399.2 (Vega | 432 |
| transcribed | gene ID) | |
| topoisomerase (DNA) III beta, OTTHUMG00000030764, | TOP3B | 433 |
| TOP3B | | |
| no gene associated | | 434 |
| KB-1269D1.3 (Vega gene ID); Pseudogene; | KB-1269D1.3 (Vega | 435 |
| OTTHUMG00000030694 | gene ID) | |
| GPR24; G protein-coupled receptor 24; ENSG00000128285 | GPR24 | 436 |
| GAL3ST1; galactose-3-O-sulfotransferase 1; | GAL3ST1 | 437 |
| ENSG00000128242 | | |
| Cat eye syndrome critical region protein 5 precursor, | CECR5 | 438 |
| ENSG00000069998, CECR5 and (head to head), | | |
| OTTHUMG00000030478, AC006946.7 | | |
| HORMAD2; HORMA domain containing 2; | HORMAD2 | 439 |
| ENSG00000176635 | | |
| OTTHUMG00000030922, RP3-438O4.2 | RP3-438O4.2 | 440 |
| | (Vega_gene ID) | |
| NP_997357.1 (RefSeq peptide ID); ENSG00000169668 | NP_997357.1 | 441 |
| | (RefSeq peptide ID) | |
| OTTHUMG00000030574, AP000357.3, novel pseudogene | AP000357.2 (Vega | 442 |
| | gene ID) | |
| LA16c-4G1.2 (Vega gene ID); Pseudogene; | LA16c-4G1.2 (Vega | 443 |
| OTTHUMG00000030832 | gene ID) | |
| KB-226F1.11 (Vega gene ID), embryonic marker, | KB-226F1.11 (Vega | 444 |
| OTTHUMG00000030123 | gene ID) | |
| OTTHUMG00000030780, CTA-373H7.4, novel pseudogene | CTA-373H7.4 (Vega | 445 |
| | gene ID) | |
| RP1-47A17.8 (Vega gene ID); OTTHUMG00000030878 | RP1-47A17.8 (Vega | 446 |
| | gene ID); | |
| RP4-539M6.7 (Vega gene ID); Pseudogene; | RP4-539M6.7 (Vega | 447 |
| OTTHUMG00000030918 | gene ID) | |
| CSDC2; cold shock domain containing C2, RNA binding; | CSDC2 | 448 |
| ENSG00000172346 | | |
| Gamma-parvin, ENSG00000138964, PARVG | PARVG | 449 |
| OTTHUMG00000030167, CTA-243E7.3 | CTA-243E7.3 (Vega | 450 |
| | gene ID) | |
| Oncostatin M precursor (OSM), ENSG00000099985, OSM | OSM | 451 |
| Oncostatin M precursor (OSM), ENSG00000099985, OSM | OSM | 452 |
| Myosin-18B (Myosin XVIIIb), ENSG00000133454, | MYO18B | 453 |
| MYO18B | | |
| Q6ICL0_HUMAN (Predicted UniProt/TrEMBL ID), | Q6ICL0_HUMAN | 454 |
| hypothetical protein FLJ3257; ENSG00000184004 | (Predicted | |
| | UniProt/TrEMBL | |
| | ID) | |
| OTTHUMG00000030140, CTA-299D3.6 | CTA-299D3.6 (Vega | 455 |
| | gene ID) | |
| GALR3; galanin receptor 3; ENSG00000128310 | GALR3 | 456 |
| GALR3; galanin receptor 3; ENSG00000128310 | GALR3 | 457 |
| IL2RB; interleukin 2 receptor, beta; ENSG00000100385 | IL2RB | 458 |
| CTA-343C1.3 (Vega gene ID); Putative Processed transcript; | CTA-343C1.3 (Vega | 459 |
| OTTHUMG00000030151 | gene ID) | |
| CTA-941F9.6 (Vega_gene ID) | CTA-941F9.6 | 460 |
| | (Vega_gene ID) | |
| CTA-941F9.6 (Vega_gene ID) | CTA-941F9.6 | 461 |
| | (Vega_gene ID) | |
| LL22NC03-121E8.1 (Vega gene ID); Novel Protein coding; | LL22NC03-121E8.1 | 462 |
| OTTHUMG00000030676 | (Vega gene ID) | |
| Cytohesin-4, ENSG00000100055, PSCD4 | PSCD4 | 463 |
| RP4-754E20_A.4 (Vega gene ID); Putative Processed | RP4-754E20_A.4 | 464 |
| transcript; OTTHUMG00000030716 | (Vega gene ID) | |
| PIB5PA; phosphatidylinositol (4,5) bisphosphate 5- | PIB5PA | 465 |
| phosphatase, A; ENSG00000185133; embryonic marker | | |
| no gene associated | | 466 |
| PLA2G3; ENSG00000100078; phospholipase A2, group III | PLA2G3 | 467 |
| PLA2G3; ENSG00000100078; phospholipase A2, group III | PLA2G3 | 468 |
| DGCR2; DiGeorge syndrome critical region gene 2; | DGCR2 | 469 |
| ENSG00000070413 | | |
| TCN2; transcobalamin II; macrocytic anemia; | TCN2 | 470 |
| ENSG00000185339 | | |
| IGLL1; immunoglobulin lambda-like polypeptide 1; | IGLL1 | 471 |
| ENSG00000128322 | | |
| RP1-29C18.7 (Vega gene ID); Novel Processed transcript; | RP1-29C18.7 (Vega | 472 |
| OTTHUMG00000030424 | gene ID) | |
| IGLC1; immunoglobulin lambda constant 1 (Mcg marker); | IGLC1 | 473 |
| ENSG00000100208 | | |
| APOBEC3B; apolipoprotein B mRNA editing enzyme, | APOBEC3B | 474 |
| catalytic polypeptide-like 3B; ENSG00000179750 | | |
| CRYBB1; crystallin, beta B1; ENSG00000100122 | CRYBB1 | 475 |
| CRYBA4; crystallin, beta A4; ENSG00000196431 | CRYBA4 | 476 |
| sushi domain containing 2, ENSG00000099994, SUSD2 | SUSD2 | 477 |
| sushi domain containing 2, ENSG00000099994, SUSD2 | SUSD2 | 478 |
| OTTHUMG00000030870, Putative Processed transcript, | CTA-503F6.1 (Vega | 479 |
| CTA-503F6.1 | gene ID) | |
| embryonic marker, OTTHUMG00000030800, KB-1323B2.3 | KB-1323B2.3 (Vega | 480 |
| | gene ID) | |
| no gene associated | | 481 |
| IGLV1-44; immunoglobulin lambda variable 1-44; | IGLV1-44 | 482 |
| ENSG00000186751 | | |
| IGLV1-44; immunoglobulin lambda variable 1-44; | IGLV1-44 | 483 |
| ENSG00000186751 | | |
| OTTHUMG00000030922, RP3-438O4.2 | RP3-438O4.2 | 484 |
| | (Vega_gene ID) | |
| OTTHUMG00000030922, RP3-438O4.2 | RP3-438O4.2 | 485 |
| | (Vega_gene ID) | |
| APOL4; apolipoprotein L, 4; ENSG00000100336 | APOL4 | 486 |
| OTTHUMG00000030852, RP4-756G23.1, novel processed | RP4-756G23.1 | 487 |
| transcript | (Vega gene ID) | |
| ENSG00000100399, Q96E60_HUMAN | Q96E60_HUMAN | 488 |
| | (Predicted | |
| | UniProt/TrEMBL | |
| | ID) | |
| Neutrophil cytosol factor 4 (NCF-4) (Neutrophil NADPH | NCF4 | 489 |
| oxidase factor 4) (p40-phox) (p40phox)., ENSG00000100365, | | |
| NCF4 | | |
| Neutrophil cytosol factor 4 (NCF-4) (Neutrophil NADPH | NCF4 | 490 |
| oxidase factor 4) (p40-phox) (p40phox)., ENSG00000100365, | | |
| NCF4 | | |
| Somatostatin receptor type 3 (SS3R) (SSR-28), D | SSTR3 | 491 |
| ENSG00000183473, SSTR3 | | |
| Somatostatin receptor type 3 (SS3R) (SSR-28), D | SSTR3 | 492 |
| ENSG00000183473, SSTR3 | | |
| Bcl-2 interacting killer (Apoptosis inducer NBK) (BP4) | BIK | 493 |
| (BIP1)., ENSG00000100290, BIK | | |
| GAS2-like protein 1 (Growth arrest-specific 2-like 1) (GAS2- | GAS2L1 | 494 |
| related protein on chromosome 22) (GAR22 protein), | | |
| ENSG00000185340, GAS2L1 | | |
| RP3-355C18.2 (Vega gene ID) | RP3-355C18.2 | 495 |
| | (Vega gene ID) | |
| SOX10; SRY (sex determining region Y)-box 10; | SOX10 | 496 |
| ENSG00000100146 | | |
| Gamma-parvin ENSG00000138964 | PARVG | 497 |
| Caspase recruitment domain protein 10 (CARD-containing | CARD10 | 498 |
| MAGUK protein 3) (Carma 3). ENSG00000100065, CARD10 | | |
| ENSG00000100101, NP_077289.1 | NP_077289.1 | 499 |
| HTF9C; HpaII tiny fragments locus 9C; ENSG00000099899 | HTF9C_HUMAN | 500 |
| | (UniProt/Swiss-Prot | |
| | ID) | |
| Oncostatin M precursor (OSM), ENSG00000099985, OSM | OSM | 501 |
| CTA-407F11.4 (Vega gene ID); Novel Processed transcript; | CTA-407F11.4 | 502 |
| OTTHUMG00000030804 | (Vega gene ID) | |
| Q6ICL0_HUMAN (Predicted UniProt/TrEMBL ID), | Q6ICL0_HUMAN | 503 |
| hypothetical protein FLJ3257; ENSG00000184004 | (Predicted | |
| | UniProt/TrEMBL | |
| | ID) | |
| CTA-989H11.2 (Vega gene ID); Putative Processed transcript; | CTA-989H11.2 | 504 |
| OTTHUMG00000030141 | (Vega gene ID) | |
| transmembrane protease, serine 6 | TMPRSS6 | 505 |
| HMG2L1; high-mobility group protein 2-like 1; | HMG2L1 | 506 |
| ENSG00000100281 | | |
| NP_001017964.1 (RefSeq peptide ID); hypothetical protein | NP_001017964.1 | 507 |
| LOC150223; ENSG00000161179 | (RefSeq peptide ID) | |
| Platelet-derived growth factor B chain precursor (PDGF B- | PDGFB | 508 |
| chain), ENSG00000100311, PDGFB | | |
| OTTHUMG00000030815, CTA-384D8.15 | CTA-384D8.15 | 509 |
| | (Vega gene ID) | |
| MGAT3; mannosyl (beta-1,4-)-glycoprotein beta-1,4-N- | MGAT3 | 510 |
| acetylglucosaminyltransferase; ENSG00000128268 | | |
| Ceramide kinase (EC 2.7.1.138), Acylsphingosine kinase, | CERK | 511 |
| CERK, Lipid kinase 4, LK4, ENSG00000100422, CERK | | |
| Reticulon 4 receptor precursor (Nogo receptor) (NgR) (Nogo- | RTN4R | 512 |
| 66 receptor), ENSG00000040608, RTN4R | | |
| UNC84B; unc-84 homolog B (C. Elegans); | UNC84B | 513 |
| ENSG00000100242 | | |
| RABL4; RAB, member of RAS oncogene family-like 4; | RABL4 | 514 |
| ENSG00000100360 | | |
| Cadherin EGF LAG seven-pass G-type receptor 1 precursor | CELSR1 | 515 |
| (Flamingo homolog 2) (hFmi2), ENSG00000075275, | | |
| CELSR1 | | |
| OTTHUMG00000030326, LL22NC03-5H6.1 | LL22NC03-5H6.1 | 516 |
| | (Vega gene ID) | |
| OTTHUMG00000030656, RP3-515N1.6 | RP3-515N1.6 (Vega | 517 |
| | gene ID) | |
| SMTN; smoothelin; ENSG00000183963 | SMTN | 518 |
| ZNRF3 protein (Fragment), ENSG00000183579, ZNRF3 zinc | ZNRF3 | 519 |
| and ring finger 3 (ZNRF3) | | |
| OTTHUMG00000030700, GRB2-related adaptor protein 2, | GRAP2 | 520 |
| GRAP2 | | |
| CAP-binding protein complex interacting protein 1 isoform a | NP_073622.2 | 521 |
| Source: RefSeq_peptide NP_073622 | (RefSeq peptide ID) | |
| SAM50_HUMAN (UniProt/Swiss-Prot ID), | SAMM50 | 522 |
| ENSG00000100347, SAM50-like protein CGI-51; sorting | | |
| and assembly machinery component 50 homolog (S. Cerevisiae) | | |
| SULT4A1; sulfotransferase family 4A, member 1; | SULT4A1 | 523 |
| ENSG00000130540 | | |
| TIMP3; TIMP metallopeptidase inhibitor 3 (Sorsby fundus | TIMP3 | 524 |
| dystrophy, pseudoinflammatory); ENSG00000100234 | | |
| T-box transcription factor TBX1 (T-box protein 1) (Testis- | TBX1 | 525 |
| specific T-box protein), ENSG00000184058, TBX1, TBX1 | | |
| is involved in heart development-Great | | |
| ENSG00000186732, metallophosphoesterase domain | MPPED1 | 526 |
| containing 1, NM_001585.2 | | |
| ENSG00000188511, NP_942148.1 novel Gene hypothetical | NP_942148.1 | 527 |
| protein LOC348645 | (RefSeq peptide ID) | |
| Cdc42 effector protein 1, ENSG00000128283, CDC42EP1 | CDC42EP1 | 528 |
| RPL3; ribosomal protein L3; ENSG00000100316 | RPL3 | 529 |
| APOL2; apolipoprotein L, 2; ENSG00000128335 | APOL2 | 530 |
| RAC2; ras-related C3 botulinum toxin substrate 2 (rho family, | RAC2 | 531 |
| small GTP binding protein Rac2); ENSG00000128340 | | |
| OTTHUMP00000028917, ENSG00000100399, | Q96E60_HUMAN | 532 |
| Q96E60_HUMAN | (Predicted | |
| | UniProt/TrEMBL | |
| | ID) | |
| Neutrophil cytosol factor 4 (NCF-4) (Neutrophil NADPH | NCF4 | 533 |
| oxidase factor 4) (p40-phox) (p40phox)., ENSG00000100365, | | |
| NCF4 | | |
| XP_371837.1 (RefSeq peptide predicted ID); PREDICTED: | XP_371837.1 | 534 |
| similar to oxidoreductase UCPA Source: | (RefSeq peptide | |
| RefSeq_peptide_predicted XP_371837; ENSG00000168768 | predicted ID) | |
| triggering receptor expressed on myeloid cells-like 2, | TREML2 | 535 |
| ENSG00000112195, TREML2 | | |
| TREML1; triggering receptor expressed on myeloid cells-like | TREML1 | 536 |
| 1; ENSG00000161911 | | |
| ENSG00000178199, Q6ZRW2_HUMAN; zinc finger | ZC3H12D | 537 |
| CCCH-type containing 12D | | |
| AIM1; absent in melanoma1; ENSG00000112297 | AIM1 | 538 |
| NKG2D ligand 4 precursor (NKG2D ligand 4) (NKG2DL4) | RAET1E | 539 |
| (N2DL-4) (Retinoic acid early transcript 1E) (Lymphocyte | | |
| effector toxicity activation ligand) (RAE-1-like transcript 4) | | |
| (RL-4), ENSG00000164520, RAET1E | | |
| Disheveled associated activator of morphogenesis 2, | DAAM2 | 540 |
| ENSG00000146122, DAAM2 | | |
| RP11-535K1.1 (Vega gene ID); Putative Processed transcript; | RP11-535K1.1 | 541 |
| OTTHUMG00000014660 | (Vega gene ID) | |
| OTTHUMG00000015679; Novel Protein coding; RP3- | RP3-509I19.3 (Vega | 542 |
| 509I19.3 | gene ID) | |
| RP11-503C24.1 (Vega gene ID); Putative Processed | RP11-503C24.1 | 543 |
| transcript; OTTHUMG00000016040 | (Vega gene ID) | |
| GABRR2; gamma-aminobutyric acid (GABA) receptor, rho | GABRR2 | 544 |
| 2; ENSG00000111886 | | |
| ANKRD6; ankyrin repeat domain 6; ENSG00000135299 | ANKRD6 | 545 |
| TXLNB; taxilin beta; ENSG00000164440 | TXLNB | 546 |
| TXLNB; taxilin beta; ENSG00000164440 | TXLNB | 547 |
| RP5-899B16.2 (Vega gene ID); Putative Processed transcript; | RP5-899B16.2 | 548 |
| OTTHUMG00000015698 | (Vega gene ID) | |
| Probable G-protein coupled receptor 116 precursor, | GPR116 | 549 |
| ENSG00000069122, GPR116 | | |
| RP11-146I2.1 (Vega gene ID); Novel Processed transcript; | RP11-146I2.1 (Vega | 550 |
| OTTHUMG00000014290 | gene ID) | |
| GPR115; G protein-coupled receptor 115; | GPR115 | 551 |
| ENSG00000153294 | | |
| GPR126; G protein-coupled receptor 126; | GPR126 | 552 |
| ENSG00000112414 embryonic marker | | |
| RP1-60O19.1 (Vega gene ID); Known Processed transcript; | RP1-60O19.1 (Vega | 553 |
| OTTHUMG00000015305 | gene ID) | |
| OTTHUMG00000015313, RP1-47M23.1 SCML4 sex comb | SCML4 | 554 |
| on midleg-like 4 (Drosophila) [Homo sapiens] | | |
| OTTHUMG00006004170, TPX1testis specific protein 1 | CRISP2 | 555 |
| (probe H4-1 p3-1) | | |
| OTTHUMG00000014829, RP11-397G17.1, novel processed | RP11-397G17.1 | 556 |
| transcript. | (Vega gene ID) | |
| OTTHUMG00000015337RP11-487F23.3 hypothetical | RP11-487F23.3 | 557 |
| LOC389422 | (Vega gene ID) | |
| Nesprin-1 (Nuclear envelope spectrin repeat protein 1) | SYNE1 | 558 |
| (Synaptic nuclear envelope protein 1) (Syne-1) (Myocyte | | |
| nuclear envelope protein 1) (Myne-1) (Enaptin), | | |
| ENSG00000131018, SYNE1 | | |
| Nesprin-1 (Nuclear envelope spectrin repeat protein 1) | SYNE1 | 559 |
| (Synaptic nuclear envelope protein 1) (Syne-1) (Myocyte | | |
| nuclear envelope protein 1) (Myne-1) (Enaptin), | | |
| ENSG00000131018, SYNE1 | | |
| RP11-398K22.4 (Vega gene ID); Putative Processed | RP11-398K22.4 | 560 |
| transcript; OTTHUMG00000015024 | (Vega gene ID) | |
| MyoD family inhibitor (Myogenic repressor I-mf), | MDFI | 561 |
| ENSG00000112559, MDFI | | |
| OTTHUMG00000014691, putative processed transcript, | RP11-533O20.2 | 562 |
| RP11-533O20.2 | (Vega gene ID) | |
| RP3-398D13.4 (Vega gene ID); OTTHUMG00000014188 | RP3-398D13.4 | 563 |
| | (Vega gene ID); | |
| RP3-429O6.1 (Vega gene ID); Putative Processed transcript; | RP3-429O6.1 (Vega | 564 |
| OTTHUMG00000014195 | gene ID) | |
| MOG; myelin oligodendrocyte glycoprotein; | MOG | 565 |
| ENSG00000137345 | | |
| RP3-495K2.2 (Vega gene ID); Putative Processed transcript; | RP3-495K2.2 (Vega | 566 |
| OTTHUMG00000016052 | gene ID) | |
| RP11-417E7.1 (Vega gene ID); Putative Processed transcript; | RP11-417E7.1 (Vega | 567 |
| OTTHUMG00000016054 | gene ID) | |
| yrosine-protein kinase-like 7 precursor (Colon carcinoma | PTK7 | 568 |
| kinase 4) (CCK-4)., ENSG00000112655, PTK7 | | |
| RP11-174C7.4 (Vega gene ID) | RP11-174C7.4 | 569 |
| | (Vega gene ID) | |
| cytidine monophosphate-N-acetylneuraminic acid | CMAH | 570 |
| hydroxylase (CMP-N-acetylneuraminate monooxygenase); | | |
| CMAH | | |
| PKHD1; polycystic kidney and hepatic disease 1 (autosomal | PKHD1 | 571 |
| recessive); ENSG00000170927 | | |
| RP3-471C18.2 (Vega gene ID); Novel Processed transcript; | RP3-471C18.2 | 572 |
| OTTHUMG00000014332 | (Vega gene ID) | |
| RP11-204E9.1 (Vega gene ID); Putative Processed transcript; | RP11-204E9.1 (Vega | 573 |
| OTTHUMG00000014342 | gene ID) | |
| glutathione peroxidase 5, OTTHUMG00000016307, GPX5 | GPX5 | 574 |
| RP11-411K7.1 (Vega gene ID); Putative Processed transcript; | RP11-411K7.1 | 575 |
| OTTHUMG00000014887 | (Vega gene ID) | |
| skin marker, Glutamate receptor, ionotropic kainate 2 | GRIK2 | 576 |
| precursor (Glutamate receptor 6) (GluR-6) (GluR6) | | |
| (Excitatory amino acid receptor 4) (EAA4) | | |
| C6orf142; chromosome 6 open reading frame 142; | C6orf142 | 577 |
| ENSG00000146147 | | |
| HDGFL1; hepatoma derived growth factor-like 1; | HDGFL1 | 578 |
| ENSG00000112273 | | |
| forkhead box C1, OTTHUMG00000016182, FOXC1 | FOXC1 | 579 |
| C6orf188; chromosome 6 open reading frame 188; | C6orf188 | 580 |
| ENSG00000178033 | | |
| ME1; malic enzyme 1, NADP(+)-dependent, cytosolic; | ME1 | 581 |
| ENSG00000065833 | | |
| SLC22A1; solute carrier family 22 (organic cation | SLC22A1 | 582 |
| transporter), member 1 | | |
| RP11-235G24.1 (Vega gene ID) | RP11-235G24.1 | 583 |
| | (Vega gene ID) | |
| T-box 18; TBX18 | TBX18 | 584 |
| CTA-31J9.2, putative processed transcript, | CTA-31J9.2 (Vega | 585 |
| OTTHUMG00000015619 | gene ID) | |
| RP1-32B1.4 (Vega gene ID); Putative Processed transcript | RP1-32B1.4 (Vega | 586 |
| OTTHUMG00000015628 | gene ID) | |
| OTTHUMG00000014223, RP11-203H2.2, novel processed | RP11-203H2.2 | 587 |
| treanscript | (Vega gene ID) | |
| OTTHUMG00000014737, C6orf154 and Name: chromosome | C6orf154 | 588 |
| 6 open reading frame 154; RP3-337H4.2 | | |
| transcription factor AP-2 alpha, OTTHUMG00000014235, | TFAP2A | 589 |
| TFAP2A | | |
| IL20RA; interleukin 20 receptor, alpha; ENSG00000016402 | IL20RA | 590 |
| KAAG1; kidney associated antigen 1; ENSG00000146049 | KAAG1 | 591 |
| TGM3; transglutaminase 3 (E polypeptide, protein-glutamine- | TGM3 | 592 |
| gamma-glutamyltransferase); ENSG00000125780 | | |
| RASSF2; Ras association (RalGDS/AF-6) domain family 2; | RASSF2 | 593 |
| ENSG00000101265 | | |
| no gene associated | | 594 |
| no gene associated | | 595 |
| no gene associated | | 596 |
| no gene associated | | 597 |
| no gene associated | | 598 |
| no gene associated | | 599 |
| no gene associated | | 600 |
| no gene associated | | 601 |
| no gene associated | | 602 |
| no gene associated | | 603 |
| no gene associated | | 604 |
| RP4-697P8.2 (Vega gene ID); Putative Processed transcript; | RP4-697P8.2 (Vega | 605 |
| OTTHUMG00000031879 | gene ID) | |
| no gene associated | | 606 |
| OTTHUMG00000031883, | RP4-734C18.1 | 607 |
| RP4-734C18.1, putative processed transcript | (Vega gene ID) | |
| no gene associated | | 608 |
| no gene associated | | 609 |
| no gene associated | | 610 |
| no gene associated | | 611 |
| no gene associated | | 612 |
| Ras and Rab interactor 2, | RIN2 | 613 |
| OTTHUMG00000031996, RIN2 | | |
| no gene associated | | 614 |
| no gene associated | | 615 |
| no gene associated | | 616 |
| no gene associated | | 617 |
| no gene associated | | 618 |
| no gene associated | | 619 |
| no gene associated | | 620 |
| no gene associated | | 621 |
| no gene associated | | 622 |
| no gene associated | | 623 |
| C20orf112; chromosome 20 open reading frame 112; | C20orf112 | 624 |
| OTTHUMG00000032219 | | |
| FER1L4; fer-1-like 4 (C. Elegans); OTTHUMG00000032354 | FER1L4 | 625 |
| no gene associated | | 626 |
| no gene associated | | 627 |
| Protein C20orf102 precursor, ENSG00000132821, | | 628 |
| CT102_HUMAN | | |
| no gene associated | | 629 |
| no gene associated | | 630 |
| no gene associated | | 631 |
| no gene associated | | 632 |
| no gene associated - Nearest transcript CDH22 (~18 kb | | 633 |
| upstream) | | |
| no gene associated | | 634 |
| no gene associated | | 635 |
| no gene associated | | 636 |
| no gene associated | | 637 |
| no gene associated | | 638 |
| no gene associated | | 639 |
| no gene associated | | 640 |
| ZHX3; zinc fingers and homeoboxes 3; | ZHX3 | 641 |
| OTTHUMG00000032481 | | |
| no gene associated | | 642 |
| CHD6; chromodomain helicase DNA binding protein 6; | CHD6 | 643 |
| ENSG00000124177 | | |
| no gene associated | | 644 |
| PTPRG; protein tyrosine phosphatase, receptor type G; | PTPRG | 645 |
| ENSG00000144724 | | |
| no gene associated | | 646 |
| no gene associated | | 647 |
| no gene associated | | 648 |
| PTPNS1; protein tyrosine phosphatase, non-receptor type | PTPNS1 | 649 |
| substrate 1; ENSG00000198053 | | |
| Q7Z5T1_HUMAN (Predicted UniProt/TrEMBL ID); | Q7Z5T1_HUMAN | 650 |
| KIAA1442 protein; ENSG00000088881 | (Predicted | |
| | UniProt/TrEMBL | |
| | ID) | |
| NP_689717.2 (RefSeq peptide ID); ENSG00000171984 | NP_689717.2 | 651 |
| | (RefSeq peptide ID) | |
| ENSG00000149346, NP_001009608.1, hypothetical protein | C20orf94 | 652 |
| LOC128710, chromosome 20 open reading frame 94 | | |
| C20orf82; chromosome 20 open reading frame 82; | C20orf82 | 653 |
| ENSG00000101230 | | |
| C20orf23; chromosome 20 open reading frame 23; | C20orf23 | 654 |
| ENSG00000089177; embryonic marker | | |
| PCSK2; proprotein convertase subtilisin/kexin type 2; | PCSK2 | 655 |
| ENSG00000125851 | | |
| PCSK2; proprotein convertase subtilisin/kexin type 2; | PCSK2 | 656 |
| ENSG00000125851 | | |
| solute carrier family 24 (sodiumVpotassiumVcalcium | SLC24A3 | 657 |
| exchanger), member 3, OTTHUMG00000031993, | | |
| SLC24A3 | | |
| solute carrier family 24 (sodiumVpotassiumVcalcium | SLC24A3 | 658 |
| exchanger), member 3, OTTHUMG00000031993, | | |
| SLC24A3 | | |
| ENSG00000089101, CT026_HUMAN | C20orf26 | 659 |
| ENSG00000089101, CT026_HUMAN | C20orf26 | 660 |
| C20orf74 protein, ENSG00000188559, Q9ULE8_HUMAN | Q9ULE8_HUMAN | 661 |
| | (Predicted | |
| | UniProt/TrEMBL | |
| | ID) | |
| C20orf74 protein, ENSG00000188559, Q9ULE8_HUMAN | Q9ULE8_HUMAN | 662 |
| | (Predicted | |
| | UniProt/TrEMBL | |
| | ID) | |
| C20orf74 protein, ENSG00000188559, Q9ULE8_HUMAN | Q9ULE8_HUMAN | 663 |
| | (Predicted | |
| | UniProt/TrEMBL | |
| | ID) | |
| PLAGL2; pleiomorphic adenoma gene-like 2; | PLAGL2 | 664 |
| ENSG00000126003 | | |
| GGTL3; gamma-glutamyltransferase-like 3; | GGTL3 | 665 |
| ENSG00000131067 | | |
| MYH7B; myosin, heavy polypeptide 7B, cardiac muscle, | MYH7B | 666 |
| beta; ENSG00000078814 | | |
| TRPC4AP; transient receptor potential cation channel, | TRPC4AP | 667 |
| subfamily C, member 4 associated protein; | | |
| ENSG00000100991 | | |
| EPB41L1; erythrocyte membrane protein band 4.1-like 1; | EPB41L1 | 668 |
| ENSG00000088367 | | |
| C20orf117; chromosome 20 open reading frame 117; | C20orf117 | 669 |
| OTTHUMG00000032395 | | |
| PTPRT; protein tyrosine phosphatase, receptor type, T; | PTPRT | 670 |
| ENSG00000196090 | | |
| PTPRT; protein tyrosine phosphatase, receptor type, T; | PTPRT | 671 |
| ENSG00000196090 | | |
| PTPRT; protein tyrosine phosphatase, receptor type, T; | PTPRT | 672 |
| ENSG00000196090 | | |
| PTPRT; protein tyrosine phosphatase, receptor type, T; | PTPRT | 673 |
| ENSG00000196090 | | |
| PTPRT; protein tyrosine phosphatase, receptor type, T; | PTPRT | 674 |
| ENSG00000196090 | | |
| SDC4; syndecan 4 (amphiglycan, ryudocan); | SDC4 | 675 |
| ENSG00000124145 | | |
| SDC4; syndecan 4 (amphiglycan, ryudocan); | SDC4 | 676 |
| ENSG00000124145 | | |
| cadherin-like 22, OTTHUMG00000033073, CDH22 | CDH22 | 677 |
| EYA2; eyes absent homolog 2 (Drosophila); | EYA2 | 678 |
| ENSG00000064655 | | |
| SULF2; sulfatase 2; ENSG00000196562 | SULF2 | 679 |
| KCNB1; potassium voltage-gated channel, Shab-related | KCNB1 | 680 |
| subfamily, member 1; ENSG00000158445 | | |
| Breast carcinoma amplified sequence 4, | BCAS4 | 681 |
| ENSG00000124243, | | |
| BCAS4 | | |
| nuclear factor of activated T-cells, cytoplasmic, calcineurin- | NFATC2 | 682 |
| dependent 2, OTTHUMG00000032747, NFATC2 | | |
| Nuclear factor of activated T-cells, cytoplasmic 2 (T cell | NFATC2 | 683 |
| transcription factor NFAT1) (NFAT pre-existing subunit) | | |
| (NF-ATp), ENSG00000101096, NFATC2 | | |
| Bone morphogenetic protein 7 precursor (BMP-7) | BMP7 | 684 |
| (Osteogenic protein 1) (OP-1) (Eptotermin alfa), | | |
| ENSG00000101144, BMP7 | | |
| transmembrane, prostate androgen induced RNA, | TMEPAI | 685 |
| OTTHUMG00000032831, TMEPAI | | |
| ENSG00000176659, NP_775915.1 | NP_775915.1 | 686 |
| | (RefSeq peptide ID) | |
| CDH4; cadherin 4, type 1, R-cadherin (retinal); | CDH4 | 687 |
| ENSG00000179242 | | |
| NP_001002034.1 (RefSeq peptide ID); ENSG00000177096 | NP_001002034.1 | 688 |
| | (RefSeq peptide ID) | |
| NP_612444.1 (RefSeq peptide ID); ENSG00000133477 | NP_612444.1 | 689 |
| | (RefSeq peptide ID) | |
| no gene associated | | 690 |
| OTTHUMG00000030780, CTA-373H7.4, novel pseudogene | CTA-373H7.4 (Vega | 691 |
| | gene ID) | |
| no gene associated | | 692 |
| Cat eye syndrome critical region protein 1 precursor, | CECR1 | 693 |
| ENSG00000093072, CECR1 | | |
| IGLC1; immunoglobulin lambda constant 1 (Mcg marker); | IGLC1 | 694 |
| ENSG00000100208 | | |
| OTTHUMG00000030521, AC000095.4 putative processed | AC000095.4 (Vega | 695 |
| transcript; | gene ID) | |
| Uroplakin-3A precursor (Uroplakin III) (UPIII)., | UPK3A | 696 |
| ENSG00000100373, UPK3A | | |
| Sp1 site_no gene associated | | 697 |
| USP18; ubiquitin specific peptidase 18; | USP18 | 698 |
| OTTHUMG00000030949 | | |
| BCR; breakpoint cluster region; ENSG00000186716 | BCR | 699 |
| TBC1D10A; TBC1 domain family, member 10A; | TBC1D10A | 700 |
| ENSG00000099992 | | |
| signal peptide-CUB domian-EGF-related 1, | SCUBE1 | 701 |
| ENSG00000159307, SCUBE1 | | |
| MAPK8IP2; mitogen-activated protein kinase 8 interacting | MAPK8IP2 | 702 |
| protein 2; ENSG00000008735 | | |
| ENSG00000192797, miRNA | Not Available | 703 |
| RPL3; ribosomal protein L3; ENSG00000100316 | RPL3 | 704 |
| RPL3; ribosomal protein L3; ENSG00000100316 | RPL3 | 705 |
| RP4-695O20_B.9 (Vega gene ID); Putative Processed | RP4-695O20_B.9 | 706 |
| transcript; OTTHUMG00000030111 | (Vega gene ID) | |
| No associated gene | | 707 |
| MN1; meningioma (disrupted in balanced translocation) 1; | MN1 | 708 |
| ENSG00000169184 | | |
| no gene associated | | 709 |
| RTDR1; rhabdoid tumor deletion region gene 1; | RTDR1 | 710 |
| ENSG00000100218 | | |
| RPL3; ribosomal protein L3; ENSG00000100316 | RPL3 | 711 |
| embryonic marker, GRB2-related adaptor protein 2, | GRAP2 | 712 |
| OTTHUMG00000030700, GRAP2 | | |
| Serine/threonine-protein kinase 19 (EC 2.7.1.37) (RP1 | STK19 | 713 |
| protein) (G11 protein). | | |
| Transcription factor 19 (Transcription factor SC1). | TCF19_HUMAN | 714 |
| Pannexin-2 | PANX2 | 715 |
| | CTA-243E7.3 | 716 |
| signal peptide-CUB domian-EGF-related 1 | SCUBE1 | 717 |
| Reticulon 4 receptor precursor (Nogo receptor) (NgR) (Nogo- | RTN4R | 718 |
| 66 receptor) | | |
| Arylsulfatase A precursor (EC 3.1.6.8) (ASA) (Cerebroside- | ARSA | 719 |
| sulfatase) [Contains: Arylsulfatase A component B; | | |
| Arylsulfatase A component C] | | |
| glycoprotein Ib (platelet), beta polypeptide | GP1BB | 720 |
| | No gene associated | 721 |
| | No gene associated | 722 |
| Mitochondrial glutamate carrier 2 (Glutamate/H(+) symporter | SLC25A18 | 723 |
| 2) (Solute carrier family 25 member 18, ENSG00000182902, | | |
| SLC25A18 | | |
| Thioredoxin reductase 2, mitochondrial precursor (EC | TXNRD2 | 724 |
| 1.8.1.9) (TR3) (TR-beta) (Selenoprotein Z) (SelZ) | | |
| Somatostatin receptor type 3 (SS3R) (SSR-28) | SSTR3 | 725 |
| | RP11-191L9.1 | 726 |
| No description-pseudogene | AP000357.3 | 727 |
| Cat eye syndrome critical region protein 1 precursor | CECR1 | 728 |
| | No gene associated | 729 |
| Membrane protein MLC1 | MLC1 | 730 |
| BAI1-associated protein 2-like 2 | BAIAP2L2 | 731 |
| No description | NP_056185.1 | 732 |
| No description | RP4-695O20_B.9 | 733 |
| OTTHUMG00000030167, CTA-243E7.3 | CTA-243E7.3 (Vega | 734 |
| | gene ID) | |
| novel transcript | XXbac-B444P24.7 | 735 |
| | LL22NC03-121E8.1- | 736 |
| | 001 | |
| No description | Q6ZN90_HUMAN | 737 |
| NFAT activation molecule 1 precursor (Calcineurin/NFAT- | NFAM1 | 738 |
| activating ITAM-containing protein) (NFAT activating | | |
| protein with ITAM motif 1). | | |
| immunoglobulin lambda constant 2 | IGLC2 | 739 |
| immunoglobulin lambda constant 2 | IGLC2 | 740 |
| OTTHUMG00000030870, CTA-503F6.1 | CTA-503F6.1 | 741 |
| | (Vega_gene ID) | |
| Lactosylceramide 4-alpha-galactosyltransferase (EC | A4GALT | 742 |
| 2.4.1.228) | | |
| | RP11-191L9.3 | 743 |
| Cold shock domain protein C2 (RNA-binding protein PIPPin) | CSDC2_HUMAN | 744 |
| GAS2-like protein 1 (Growth arrest-specific 2-like 1) (GAS2- | GAS2L1 | 745 |
| related protein on chromosome 22) (GAR22 protein), | | |
| ENSG00000185340, GAS2L1 | | |
| BAI1-associated protein 2-like 2 | BAIAP2L2 | 746 |
| | NP_997360.1 | 747 |
| OTTHUMG00000030991, LL22NC03-75B3.6 | LL22NC03-75B3.6 | 748 |
| | (Vega gene ID) | |
| Reticulon 4 receptor precursor (Nogo receptor) (NgR) (Nogo- | RTN4R | 749 |
| 66 receptor) | | |
| Smoothelin | SMTN | 750 |
| solute carrier family 35, member E4 | SLC35E4 | 751 |
| Protein C22orf13 (Protein LLN4) | CV013_HUMAN | 752 |
| | No gene associated | 753 |
| Histone | HIST1H3A | 754 |
| Gamma-aminobutyric-acid receptor rho-1 subunit precursor | GABRR1 | 755 |
| (GABA(A) receptor). | | |
| OTTHUMG00000015693, RP11-12A2.3 | RP11-12A2.3 | 756 |
| | (Vega_gene ID) | |
| | RP5-899B16.1 | 757 |
| | RP11-146I2.2 | 758 |
| | NP_060483.2 | 759 |
| Forkhead box protein O3A, ENSG00000118689, FOXO3A | FOXO3A | 760 |
| nuclear receptor coactivator 7 | NCOA7 | 761 |
| | RP11-554D15.1 | 762 |
| chromosome 6 open reading frame 190 | C6orf190 | 763 |
| phosphatase and actin regulator 2 | PHACTR2 | 764 |
| High mobility group protein HMG-I/HMG-Y, HMG-I(Y), | HMGA1 | 765 |
| High mobility group AT-hook 1, High mobility group protein | | |
| A1, ENSG00000137309, HMGA1 | | |
| Pantetheinase precursor (EC 3.5.1.—), ENSG00000112299, | VNN1 | 766 |
| VNN1 | | |
| histone H2A | HIST1H2AA | 767 |
| transcription factor AP-2 alpha (activating enhancer binding | TFAP2A | 768 |
| protein 2 alpha) | | |
| N-acetyllactosaminide beta-1,6-N-acetylglucosaminyl- | GCNT2 | 769 |
| transferase (EC 2.4.1.150), ENSG00000111846, GCNT2 | | |
| | No gene associated | 770 |
| | No gene associated | 771 |
| | No gene associated | 772 |
| | No gene associated | 773 |
| | No gene associated | 774 |
| | No gene associated | 775 |
| | No gene associated | 776 |
| | No gene associated | 777 |
| | No gene associated | 778 |
| | No gene associated | 779 |
| | RP11-318C17.1 | 780 |
| | No gene associated | 781 |
| | No gene associated | 782 |
| | No gene associated | 783 |
| | No gene associated | 784 |
| | No gene associated | 785 |
| | No gene associated | 786 |
| novel transcript | RP11-216C10.1 | 787 |
| | No gene associated | 788 |
| | No gene associated | 789 |
| | No gene associated | 790 |
| | RP11-410N8.3 | 791 |
| TIMP3; TIMP metallopeptidase inhibitor 3 (Sorsby fundus | TIMP3 | 792 |
| dystrophy, pseudoinflammatory); ENSG00000100234 | | |
| | No gene associated | 793 |
| | No gene associated | 794 |
| | No gene associated | 795 |
| | No gene associated | 796 |
| | No gene associated | 797 |
| | No gene associated | 798 |
| | No gene associated | 799 |
| | No gene associated | 800 |
| | No gene associated | 801 |
| | No gene associated | 802 |
| | No gene associated | 803 |
| sorting nexin 5 | SNX5 | 804 |
| Probable D-tyrosyl-tRNA(Tyr) deacylase (EC 3.1.—.—) | HARS2 | 805 |
| solute carrier family 24 (sodium/potassium/calcium | SLC24A3 | 806 |
| exchanger) member 3, OTTHUMG00000031993, SLC24A3 | | |
| ENSG00000089101, CT026_HUMAN, C20orf26 | CT026_HUMAN | 807 |
| RNA-binding protein Raly (hnRNP associated with lethal | RALY | 808 |
| yellow homolog) D; ENSG00000125970, RALY | | |
| Protein phosphatase 1 regulatory inhibitor subunit 16B (TGF- | PPP1R16B | 809 |
| beta-inhibited membrane-associated protein) (hTIMAP) | | |
| (CAAX box protein TIMAP) (Ankyrin repeat domain protein | | |
| 4) | | |
| protein tyrosine phosphatase, receptor type, T | PTPRT | 810 |
| protein tyrosine phosphatase, receptor type, T | PTPRT | 811 |
| protein tyrosine phosphatase, receptor type, T | PTPRT | 812 |
| Receptor-type tyrosine-protein phosphatase T precursor (EC | PTPRT | 813 |
| 3.1.3.48) (R-PTP-T) (RPTP-rho) | | |
| cadherin-like 22 | CDH22 | 814 |
| potassium voltage-gated channel, Shab-related subfamily, | KCNB1 | 815 |
| member 1 | | |
| potassium voltage-gated channel, Shab-related subfamily, | KCNB1 | 816 |
| member 1 | | |
| Zinc finger protein SNAI1 (Snail protein homolog) (Sna | SNAI1 | 817 |
| protein) | | |
| Cadherin-4 precursor (Retinal-cadherin) (R-cadherin) (R- | CDH4 | 818 |
| CAD) | | |
| cadherin 4, type 1, R-cadherin (retinal) | CDH4 | 819 |
| Cadherin-4 precursor (Retinal-cadherin) (R-cadherin) (R- | CDH4 | 820 |
| CAD) | | |
| Metalloproteinase inhibitor 3 precursor (TIMP-3) (Tissue | TIMP3 | 821 |
| inhibitor of metalloproteinases-3) (MIG-5 protein). | | |
| Tubulin alpha-8 chain (Alpha-tubulin 8) | TUBA8 | 822 |
| | No gene associated | 823 |
| | No gene associated | 824 |

TABLE 2
Overview of SEQ ID NO of the genes or genomic regions and the
SEQ ID NOs of corresponding bisulfite treated nucleic acids (DNA
upmethylated sense strand, DNA upmethylated antisense strand,
DNA downmethylated sense strand, DNA downmethylated antisense
strand).

| | | | SEQ ID NO: | SEQ ID NO: |
|---|---|---|---|---|
| SEQ ID | SEQ ID NO | SEQ ID NO: | Down- | Down- |
| NO: | Upmethylated | Upmethylated | methylated | methylated |
| Genomic | Sense | Antisense | Sense | Antisense |
| 413 | 1649 | 1650 | 3297 | 3298 |
| 414 | 1651 | 1652 | 3299 | 3300 |
| 415 | 1653 | 1654 | 3301 | 3302 |
| 416 | 1655 | 1656 | 3303 | 3304 |
| 417 | 1657 | 1658 | 3305 | 3306 |
| 418 | 1659 | 1660 | 3307 | 3308 |
| 419 | 1661 | 1662 | 3309 | 3310 |
| 420 | 1663 | 1664 | 3311 | 3312 |
| 421 | 1665 | 1666 | 3313 | 3314 |
| 422 | 1667 | 1668 | 3315 | 3316 |
| 423 | 1669 | 1670 | 3317 | 3318 |
| 424 | 1671 | 1672 | 3319 | 3320 |
| 425 | 1673 | 1674 | 3321 | 3322 |
| 426 | 1675 | 1676 | 3323 | 3324 |
| 427 | 1677 | 1678 | 3325 | 3326 |
| 428 | 1679 | 1680 | 3327 | 3328 |
| 429 | 1681 | 1682 | 3329 | 3330 |
| 430 | 1683 | 1684 | 3331 | 3332 |
| 431 | 1685 | 1686 | 3333 | 3334 |
| 432 | 1687 | 1688 | 3335 | 3336 |
| 433 | 1689 | 1690 | 3337 | 3338 |
| 434 | 1691 | 1692 | 3339 | 3340 |
| 435 | 1693 | 1694 | 3341 | 3342 |
| 436 | 1695 | 1696 | 3343 | 3344 |
| 437 | 1697 | 1698 | 3345 | 3346 |
| 438 | 1699 | 1700 | 3347 | 3348 |
| 439 | 1701 | 1702 | 3349 | 3350 |
| 440 | 1703 | 1704 | 3351 | 3352 |
| 441 | 1705 | 1706 | 3353 | 3354 |
| 442 | 1707 | 1708 | 3355 | 3356 |
| 443 | 1709 | 1710 | 3357 | 3358 |
| 444 | 1711 | 1712 | 3359 | 3360 |
| 445 | 1713 | 1714 | 3361 | 3362 |
| 446 | 1715 | 1716 | 3363 | 3364 |
| 447 | 1717 | 1718 | 3365 | 3366 |
| 448 | 1719 | 1720 | 3367 | 3368 |
| 449 | 1721 | 1722 | 3369 | 3370 |
| 450 | 1723 | 1724 | 3371 | 3372 |
| 451 | 1725 | 1726 | 3373 | 3374 |
| 452 | 1727 | 1728 | 3375 | 3376 |
| 453 | 1729 | 1730 | 3377 | 3378 |
| 454 | 1731 | 1732 | 3379 | 3380 |
| 455 | 1733 | 1734 | 3381 | 3382 |
| 456 | 1735 | 1736 | 3383 | 3384 |
| 457 | 1737 | 1738 | 3385 | 3386 |
| 458 | 1739 | 1740 | 3387 | 3388 |
| 459 | 1741 | 1742 | 3389 | 3390 |
| 460 | 1743 | 1744 | 3391 | 3392 |
| 461 | 1745 | 1746 | 3393 | 3394 |
| 462 | 1747 | 1748 | 3395 | 3396 |
| 463 | 1749 | 1750 | 3397 | 3398 |
| 464 | 1751 | 1752 | 3399 | 3400 |
| 465 | 1753 | 1754 | 3401 | 3402 |
| 466 | 1755 | 1756 | 3403 | 3404 |
| 467 | 1757 | 1758 | 3405 | 3406 |
| 468 | 1759 | 1760 | 3407 | 3408 |
| 469 | 1761 | 1762 | 3409 | 3410 |
| 470 | 1763 | 1764 | 3411 | 3412 |
| 471 | 1765 | 1766 | 3413 | 3414 |
| 472 | 1767 | 1768 | 3415 | 3416 |
| 473 | 1769 | 1770 | 3417 | 3418 |
| 474 | 1771 | 1772 | 3419 | 3420 |
| 475 | 1773 | 1774 | 3421 | 3422 |
| 476 | 1775 | 1776 | 3423 | 3424 |
| 477 | 1777 | 1778 | 3425 | 3426 |
| 478 | 1779 | 1780 | 3427 | 3428 |
| 479 | 1781 | 1782 | 3429 | 3430 |
| 480 | 1783 | 1784 | 3431 | 3432 |
| 481 | 1785 | 1786 | 3433 | 3434 |
| 482 | 1787 | 1788 | 3435 | 3436 |
| 483 | 1789 | 1790 | 3437 | 3438 |
| 484 | 1791 | 1792 | 3439 | 3440 |
| 485 | 1793 | 1794 | 3441 | 3442 |
| 486 | 1795 | 1796 | 3443 | 3444 |
| 487 | 1797 | 1798 | 3445 | 3446 |
| 488 | 1799 | 1800 | 3447 | 3448 |
| 489 | 1801 | 1802 | 3449 | 3450 |
| 490 | 1803 | 1804 | 3451 | 3452 |
| 491 | 1805 | 1806 | 3453 | 3454 |
| 492 | 1807 | 1808 | 3455 | 3456 |
| 493 | 1809 | 1810 | 3457 | 3458 |
| 494 | 1811 | 1812 | 3459 | 3460 |
| 495 | 1813 | 1814 | 3461 | 3462 |
| 496 | 1815 | 1816 | 3463 | 3464 |
| 497 | 1817 | 1818 | 3465 | 3466 |
| 498 | 1819 | 1820 | 3467 | 3468 |
| 499 | 1821 | 1822 | 3469 | 3470 |
| 500 | 1823 | 1824 | 3471 | 3472 |
| 501 | 1825 | 1826 | 3473 | 3474 |
| 502 | 1827 | 1828 | 3475 | 3476 |
| 503 | 1829 | 1830 | 3477 | 3478 |
| 504 | 1831 | 1832 | 3479 | 3480 |
| 505 | 1833 | 1834 | 3481 | 3482 |
| 506 | 1835 | 1836 | 3483 | 3484 |
| 507 | 1837 | 1838 | 3485 | 3486 |
| 508 | 1839 | 1840 | 3487 | 3488 |
| 509 | 1841 | 1842 | 3489 | 3490 |
| 510 | 1843 | 1844 | 3491 | 3492 |
| 511 | 1845 | 1846 | 3493 | 3494 |
| 512 | 1847 | 1848 | 3495 | 3496 |
| 513 | 1849 | 1850 | 3497 | 3498 |
| 514 | 1851 | 1852 | 3499 | 3500 |
| 515 | 1853 | 1854 | 3501 | 3502 |
| 516 | 1855 | 1856 | 3503 | 3504 |
| 517 | 1857 | 1858 | 3505 | 3506 |
| 518 | 1859 | 1860 | 3507 | 3508 |
| 519 | 1861 | 1862 | 3509 | 3510 |
| 520 | 1863 | 1864 | 3511 | 3512 |
| 521 | 1865 | 1866 | 3513 | 3514 |
| 522 | 1867 | 1868 | 3515 | 3516 |
| 523 | 1869 | 1870 | 3517 | 3518 |
| 524 | 1871 | 1872 | 3519 | 3520 |
| 525 | 1873 | 1874 | 3521 | 3522 |
| 526 | 1875 | 1876 | 3523 | 3524 |
| 527 | 1877 | 1878 | 3525 | 3526 |
| 528 | 1879 | 1880 | 3527 | 3528 |
| 529 | 1881 | 1882 | 3529 | 3530 |
| 530 | 1883 | 1884 | 3531 | 3532 |
| 531 | 1885 | 1886 | 3533 | 3534 |
| 532 | 1887 | 1888 | 3535 | 3536 |
| 533 | 1889 | 1890 | 3537 | 3538 |
| 534 | 1891 | 1892 | 3539 | 3540 |
| 535 | 1893 | 1894 | 3541 | 3542 |
| 536 | 1895 | 1896 | 3543 | 3544 |
| 537 | 1897 | 1898 | 3545 | 3546 |
| 538 | 1899 | 1900 | 3547 | 3548 |
| 539 | 1901 | 1902 | 3549 | 3550 |
| 540 | 1903 | 1904 | 3551 | 3552 |
| 541 | 1905 | 1906 | 3553 | 3554 |
| 542 | 1907 | 1908 | 3555 | 3556 |
| 543 | 1909 | 1910 | 3557 | 3558 |
| 544 | 1911 | 1912 | 3559 | 3560 |
| 545 | 1913 | 1914 | 3561 | 3562 |
| 546 | 1915 | 1916 | 3563 | 3564 |
| 547 | 1917 | 1918 | 3565 | 3566 |
| 548 | 1919 | 1920 | 3567 | 3568 |
| 549 | 1921 | 1922 | 3569 | 3570 |
| 550 | 1923 | 1924 | 3571 | 3572 |
| 551 | 1925 | 1926 | 3573 | 3574 |
| 552 | 1927 | 1928 | 3575 | 3576 |
| 553 | 1929 | 1930 | 3577 | 3578 |
| 554 | 1931 | 1932 | 3579 | 3580 |
| 555 | 1933 | 1934 | 3581 | 3582 |
| 556 | 1935 | 1936 | 3583 | 3584 |
| 557 | 1937 | 1938 | 3585 | 3586 |
| 558 | 1939 | 1940 | 3587 | 3588 |
| 559 | 1941 | 1942 | 3589 | 3590 |
| 560 | 1943 | 1944 | 3591 | 3592 |
| 561 | 1945 | 1946 | 3593 | 3594 |
| 562 | 1947 | 1948 | 3595 | 3596 |
| 563 | 1949 | 1950 | 3597 | 3598 |
| 564 | 1951 | 1952 | 3599 | 3600 |
| 565 | 1953 | 1954 | 3601 | 3602 |
| 566 | 1955 | 1956 | 3603 | 3604 |
| 567 | 1957 | 1958 | 3605 | 3606 |
| 568 | 1959 | 1960 | 3607 | 3608 |
| 569 | 1961 | 1962 | 3609 | 3610 |
| 570 | 1963 | 1964 | 3611 | 3612 |
| 571 | 1965 | 1966 | 3613 | 3614 |
| 572 | 1967 | 1968 | 3615 | 3616 |
| 573 | 1969 | 1970 | 3617 | 3618 |
| 574 | 1971 | 1972 | 3619 | 3620 |
| 575 | 1973 | 1974 | 3621 | 3622 |
| 576 | 1975 | 1976 | 3623 | 3624 |
| 577 | 1977 | 1978 | 3625 | 3626 |
| 578 | 1979 | 1980 | 3627 | 3628 |
| 579 | 1981 | 1982 | 3629 | 3630 |
| 580 | 1983 | 1984 | 3631 | 3632 |
| 581 | 1985 | 1986 | 3633 | 3634 |
| 582 | 1987 | 1988 | 3635 | 3636 |
| 583 | 1989 | 1990 | 3637 | 3638 |
| 584 | 1991 | 1992 | 3639 | 3640 |
| 585 | 1993 | 1994 | 3641 | 3642 |
| 586 | 1995 | 1996 | 3643 | 3644 |
| 587 | 1997 | 1998 | 3645 | 3646 |
| 588 | 1999 | 2000 | 3647 | 3648 |
| 589 | 2001 | 2002 | 3649 | 3650 |
| 590 | 2003 | 2004 | 3651 | 3652 |
| 591 | 2005 | 2006 | 3653 | 3654 |
| 592 | 2007 | 2008 | 3655 | 3656 |
| 593 | 2009 | 2010 | 3657 | 3658 |
| 594 | 2011 | 2012 | 3659 | 3660 |
| 595 | 2013 | 2014 | 3661 | 3662 |
| 596 | 2015 | 2016 | 3663 | 3664 |
| 597 | 2017 | 2018 | 3665 | 3666 |
| 598 | 2019 | 2020 | 3667 | 3668 |
| 599 | 2021 | 2022 | 3669 | 3670 |
| 600 | 2023 | 2024 | 3671 | 3672 |
| 601 | 2025 | 2026 | 3673 | 3674 |
| 602 | 2027 | 2028 | 3675 | 3676 |
| 603 | 2029 | 2030 | 3677 | 3678 |
| 604 | 2031 | 2032 | 3679 | 3680 |
| 605 | 2033 | 2034 | 3681 | 3682 |
| 606 | 2035 | 2036 | 3683 | 3684 |
| 607 | 2037 | 2038 | 3685 | 3686 |
| 608 | 2039 | 2040 | 3687 | 3688 |
| 609 | 2041 | 2042 | 3689 | 3690 |
| 610 | 2043 | 2044 | 3691 | 3692 |
| 611 | 2045 | 2046 | 3693 | 3694 |
| 612 | 2047 | 2048 | 3695 | 3696 |
| 613 | 2049 | 2050 | 3697 | 3698 |
| 614 | 2051 | 2052 | 3699 | 3700 |
| 615 | 2053 | 2054 | 3701 | 3702 |
| 616 | 2055 | 2056 | 3703 | 3704 |
| 617 | 2057 | 2058 | 3705 | 3706 |
| 618 | 2059 | 2060 | 3707 | 3708 |
| 619 | 2061 | 2062 | 3709 | 3710 |
| 620 | 2063 | 2064 | 3711 | 3712 |
| 621 | 2065 | 2066 | 3713 | 3714 |
| 622 | 2067 | 2068 | 3715 | 3716 |
| 623 | 2069 | 2070 | 3717 | 3718 |
| 624 | 2071 | 2072 | 3719 | 3720 |
| 625 | 2073 | 2074 | 3721 | 3722 |
| 626 | 2075 | 2076 | 3723 | 3724 |
| 627 | 2077 | 2078 | 3725 | 3726 |
| 628 | 2079 | 2080 | 3727 | 3728 |
| 629 | 2081 | 2082 | 3729 | 3730 |
| 630 | 2083 | 2084 | 3731 | 3732 |
| 631 | 2085 | 2086 | 3733 | 3734 |
| 632 | 2087 | 2088 | 3735 | 3736 |
| 633 | 2089 | 2090 | 3737 | 3738 |
| 634 | 2091 | 2092 | 3739 | 3740 |
| 635 | 2093 | 2094 | 3741 | 3742 |
| 636 | 2095 | 2096 | 3743 | 3744 |
| 637 | 2097 | 2098 | 3745 | 3746 |
| 638 | 2099 | 2100 | 3747 | 3748 |
| 639 | 2101 | 2102 | 3749 | 3750 |
| 640 | 2103 | 2104 | 3751 | 3752 |
| 641 | 2105 | 2106 | 3753 | 3754 |
| 642 | 2107 | 2108 | 3755 | 3756 |
| 643 | 2109 | 2110 | 3757 | 3758 |
| 644 | 2111 | 2112 | 3759 | 3760 |
| 645 | 2113 | 2114 | 3761 | 3762 |
| 646 | 2115 | 2116 | 3763 | 3764 |
| 647 | 2117 | 2118 | 3765 | 3766 |
| 648 | 2119 | 2120 | 3767 | 3768 |
| 649 | 2121 | 2122 | 3769 | 3770 |
| 650 | 2123 | 2124 | 3771 | 3772 |
| 651 | 2125 | 2126 | 3773 | 3774 |
| 652 | 2127 | 2128 | 3775 | 3776 |
| 653 | 2129 | 2130 | 3777 | 3778 |
| 654 | 2131 | 2132 | 3779 | 3780 |
| 655 | 2133 | 2134 | 3781 | 3782 |
| 656 | 2135 | 2136 | 3783 | 3784 |
| 657 | 2137 | 2138 | 3785 | 3786 |
| 658 | 2139 | 2140 | 3787 | 3788 |
| 659 | 2141 | 2142 | 3789 | 3790 |
| 660 | 2143 | 2144 | 3791 | 3792 |
| 661 | 2145 | 2146 | 3793 | 3794 |
| 662 | 2147 | 2148 | 3795 | 3796 |
| 663 | 2149 | 2150 | 3797 | 3798 |
| 664 | 2151 | 2152 | 3799 | 3800 |
| 665 | 2153 | 2154 | 3801 | 3802 |
| 666 | 2155 | 2156 | 3803 | 3804 |
| 667 | 2157 | 2158 | 3805 | 3806 |
| 668 | 2159 | 2160 | 3807 | 3808 |
| 669 | 2161 | 2162 | 3809 | 3810 |
| 670 | 2163 | 2164 | 3811 | 3812 |
| 671 | 2165 | 2166 | 3813 | 3814 |
| 672 | 2167 | 2168 | 3815 | 3816 |
| 673 | 2169 | 2170 | 3817 | 3818 |
| 674 | 2171 | 2172 | 3819 | 3820 |
| 675 | 2173 | 2174 | 3821 | 3822 |
| 676 | 2175 | 2176 | 3823 | 3824 |
| 677 | 2177 | 2178 | 3825 | 3826 |
| 678 | 2179 | 2180 | 3827 | 3828 |
| 679 | 2181 | 2182 | 3829 | 3830 |
| 680 | 2183 | 2184 | 3831 | 3832 |
| 681 | 2185 | 2186 | 3833 | 3834 |
| 682 | 2187 | 2188 | 3835 | 3836 |
| 683 | 2189 | 2190 | 3837 | 3838 |
| 684 | 2191 | 2192 | 3839 | 3840 |
| 685 | 2193 | 2194 | 3841 | 3842 |
| 686 | 2195 | 2196 | 3843 | 3844 |
| 687 | 2197 | 2198 | 3845 | 3846 |
| 688 | 2199 | 2200 | 3847 | 3848 |
| 689 | 2201 | 2202 | 3849 | 3850 |
| 690 | 2203 | 2204 | 3851 | 3852 |
| 691 | 2205 | 2206 | 3853 | 3854 |
| 692 | 2207 | 2208 | 3855 | 3856 |
| 693 | 2209 | 2210 | 3857 | 3858 |
| 694 | 2211 | 2212 | 3859 | 3860 |
| 695 | 2213 | 2214 | 3861 | 3862 |
| 696 | 2215 | 2216 | 3863 | 3864 |
| 697 | 2217 | 2218 | 3865 | 3866 |
| 698 | 2219 | 2220 | 3867 | 3868 |
| 699 | 2221 | 2222 | 3869 | 3870 |
| 700 | 2223 | 2224 | 3871 | 3872 |
| 701 | 2225 | 2226 | 3873 | 3874 |
| 702 | 2227 | 2228 | 3875 | 3876 |
| 703 | 2229 | 2230 | 3877 | 3878 |
| 704 | 2231 | 2232 | 3879 | 3880 |
| 705 | 2233 | 2234 | 3881 | 3882 |
| 706 | 2235 | 2236 | 3883 | 3884 |
| 707 | 2237 | 2238 | 3885 | 3886 |
| 708 | 2239 | 2240 | 3887 | 3888 |
| 709 | 2241 | 2242 | 3889 | 3890 |
| 710 | 2243 | 2244 | 3891 | 3892 |
| 711 | 2245 | 2246 | 3893 | 3894 |
| 712 | 2247 | 2248 | 3895 | 3896 |
| 713 | 2249 | 2250 | 3897 | 3898 |
| 714 | 2251 | 2252 | 3899 | 3900 |
| 715 | 2253 | 2254 | 3901 | 3902 |
| 716 | 2255 | 2256 | 3903 | 3904 |
| 717 | 2257 | 2258 | 3905 | 3906 |
| 718 | 2259 | 2260 | 3907 | 3908 |
| 719 | 2261 | 2262 | 3909 | 3910 |
| 720 | 2263 | 2264 | 3911 | 3912 |
| 721 | 2265 | 2266 | 3913 | 3914 |
| 722 | 2267 | 2268 | 3915 | 3916 |
| 723 | 2269 | 2270 | 3917 | 3918 |
| 724 | 2271 | 2272 | 3919 | 3920 |
| 725 | 2273 | 2274 | 3921 | 3922 |
| 726 | 2275 | 2276 | 3923 | 3924 |
| 727 | 2277 | 2278 | 3925 | 3926 |
| 728 | 2279 | 2280 | 3927 | 3928 |
| 729 | 2281 | 2282 | 3929 | 3930 |
| 730 | 2283 | 2284 | 3931 | 3932 |
| 731 | 2285 | 2286 | 3933 | 3934 |
| 732 | 2287 | 2288 | 3935 | 3936 |
| 733 | 2289 | 2290 | 3937 | 3938 |
| 734 | 2291 | 2292 | 3939 | 3940 |
| 735 | 2293 | 2294 | 3941 | 3942 |
| 736 | 2295 | 2296 | 3943 | 3944 |
| 737 | 2297 | 2298 | 3945 | 3946 |
| 738 | 2299 | 2300 | 3947 | 3948 |
| 739 | 2301 | 2302 | 3949 | 3950 |
| 740 | 2303 | 2304 | 3951 | 3952 |
| 741 | 2305 | 2306 | 3953 | 3954 |
| 742 | 2307 | 2308 | 3955 | 3956 |
| 743 | 2309 | 2310 | 3957 | 3958 |
| 744 | 2311 | 2312 | 3959 | 3960 |
| 745 | 2313 | 2314 | 3961 | 3962 |
| 746 | 2315 | 2316 | 3963 | 3964 |
| 747 | 2317 | 2318 | 3965 | 3966 |
| 748 | 2319 | 2320 | 3967 | 3968 |
| 749 | 2321 | 2322 | 3969 | 3970 |
| 750 | 2323 | 2324 | 3971 | 3972 |
| 751 | 2325 | 2326 | 3973 | 3974 |
| 752 | 2327 | 2328 | 3975 | 3976 |
| 753 | 2329 | 2330 | 3977 | 3978 |
| 754 | 2331 | 2332 | 3979 | 3980 |
| 755 | 2333 | 2334 | 3981 | 3982 |
| 756 | 2335 | 2336 | 3983 | 3984 |
| 757 | 2337 | 2338 | 3985 | 3986 |
| 758 | 2339 | 2340 | 3987 | 3988 |
| 759 | 2341 | 2342 | 3989 | 3990 |
| 760 | 2343 | 2344 | 3991 | 3992 |
| 761 | 2345 | 2346 | 3993 | 3994 |
| 762 | 2347 | 2348 | 3995 | 3996 |
| 763 | 2349 | 2350 | 3997 | 3998 |
| 764 | 2351 | 2352 | 3999 | 4000 |
| 765 | 2353 | 2354 | 4001 | 4002 |
| 766 | 2355 | 2356 | 4003 | 4004 |
| 767 | 2357 | 2358 | 4005 | 4006 |
| 768 | 2359 | 2360 | 4007 | 4008 |
| 769 | 2361 | 2362 | 4009 | 4010 |
| 770 | 2363 | 2364 | 4011 | 4012 |
| 771 | 2365 | 2366 | 4013 | 4014 |
| 772 | 2367 | 2368 | 4015 | 4016 |
| 773 | 2369 | 2370 | 4017 | 4018 |
| 774 | 2371 | 2372 | 4019 | 4020 |
| 775 | 2373 | 2374 | 4021 | 4022 |
| 776 | 2375 | 2376 | 4023 | 4024 |
| 777 | 2377 | 2378 | 4025 | 4026 |
| 778 | 2379 | 2380 | 4027 | 4028 |
| 779 | 2381 | 2382 | 4029 | 4030 |
| 780 | 2383 | 2384 | 4031 | 4032 |
| 781 | 2385 | 2386 | 4033 | 4034 |
| 782 | 2387 | 2388 | 4035 | 4036 |
| 783 | 2389 | 2390 | 4037 | 4038 |
| 784 | 2391 | 2392 | 4039 | 4040 |
| 785 | 2393 | 2394 | 4041 | 4042 |
| 786 | 2395 | 2396 | 4043 | 4044 |
| 787 | 2397 | 2398 | 4045 | 4046 |
| 788 | 2399 | 2400 | 4047 | 4048 |
| 789 | 2401 | 2402 | 4049 | 4050 |
| 790 | 2403 | 2404 | 4051 | 4052 |
| 791 | 2405 | 2406 | 4053 | 4054 |
| 792 | 2407 | 2408 | 4055 | 4056 |
| 793 | 2409 | 2410 | 4057 | 4058 |
| 794 | 2411 | 2412 | 4059 | 4060 |
| 795 | 2413 | 2414 | 4061 | 4062 |
| 796 | 2415 | 2416 | 4063 | 4064 |
| 797 | 2417 | 2418 | 4065 | 4066 |
| 798 | 2419 | 2420 | 4067 | 4068 |
| 799 | 2421 | 2422 | 4069 | 4070 |
| 800 | 2423 | 2424 | 4071 | 4072 |
| 801 | 2425 | 2426 | 4073 | 4074 |
| 802 | 2427 | 2428 | 4075 | 4076 |
| 803 | 2429 | 2430 | 4077 | 4078 |
| 804 | 2431 | 2432 | 4079 | 4080 |
| 805 | 2433 | 2434 | 4081 | 4082 |
| 806 | 2435 | 2436 | 4083 | 4084 |
| 807 | 2437 | 2438 | 4085 | 4086 |
| 808 | 2439 | 2440 | 4087 | 4088 |
| 809 | 2441 | 2442 | 4089 | 4090 |
| 810 | 2443 | 2444 | 4091 | 4092 |
| 811 | 2445 | 2446 | 4093 | 4094 |
| 812 | 2447 | 2448 | 4095 | 4096 |
| 813 | 2449 | 2450 | 4097 | 4098 |
| 814 | 2451 | 2452 | 4099 | 4100 |
| 815 | 2453 | 2454 | 4101 | 4102 |
| 816 | 2455 | 2456 | 4103 | 4104 |
| 817 | 2457 | 2458 | 4105 | 4106 |
| 818 | 2459 | 2460 | 4107 | 4108 |
| 819 | 2461 | 2462 | 4109 | 4110 |
| 820 | 2463 | 2464 | 4111 | 4112 |
| 821 | 2465 | 2466 | 4113 | 4114 |
| 822 | 2467 | 2468 | 4115 | 4116 |
| 823 | 2469 | 2470 | 4117 | 4118 |
| 824 | 2471 | 2472 | 4119 | 4120 |

TABLE 3
Overview of SEQ ID NO of amplificates derived from the genes or
genomic regions and the SEQ ID NOs of corresponding bisulfite treated
nucleic acids (DNA upmethylated sense strand, DNA upmethylated
antisense strand, DNA downmethylated sense strand, DNA
downmethylated antisense strand).

| | | | SEQ ID NO: | SEQ ID NO: |
|---|---|---|---|---|
| SEQ ID | SEQ ID NO: | SEQ ID NO: | Down- | Down- |
| NO: | Upmethylated | Upmethylated | methylated | methylated |
| Genomic | Sense | Antisense | Sense | Antisense |
| 1 | 825 | 826 | 2473 | 2474 |
| 2 | 827 | 828 | 2475 | 2476 |
| 3 | 829 | 830 | 2477 | 2478 |
| 4 | 831 | 832 | 2479 | 2480 |
| 5 | 833 | 834 | 2481 | 2482 |
| 6 | 835 | 836 | 2483 | 2484 |
| 7 | 837 | 838 | 2485 | 2486 |
| 8 | 839 | 840 | 2487 | 2488 |
| 9 | 841 | 842 | 2489 | 2490 |
| 10 | 843 | 844 | 2491 | 2492 |
| 11 | 845 | 846 | 2493 | 2494 |
| 12 | 847 | 848 | 2495 | 2496 |
| 13 | 849 | 850 | 2497 | 2498 |
| 14 | 851 | 852 | 2499 | 2500 |
| 15 | 853 | 854 | 2501 | 2502 |
| 16 | 855 | 856 | 2503 | 2504 |
| 17 | 857 | 858 | 2505 | 2506 |
| 18 | 859 | 860 | 2507 | 2508 |
| 19 | 861 | 862 | 2509 | 2510 |
| 20 | 863 | 864 | 2511 | 2512 |
| 21 | 865 | 866 | 2513 | 2514 |
| 22 | 867 | 868 | 2515 | 2516 |
| 23 | 869 | 870 | 2517 | 2518 |
| 24 | 871 | 872 | 2519 | 2520 |
| 25 | 873 | 874 | 2521 | 2522 |
| 26 | 875 | 876 | 2523 | 2524 |
| 27 | 877 | 878 | 2525 | 2526 |
| 28 | 879 | 880 | 2527 | 2528 |
| 29 | 881 | 882 | 2529 | 2530 |
| 30 | 883 | 884 | 2531 | 2532 |
| 31 | 885 | 886 | 2533 | 2534 |
| 32 | 887 | 888 | 2535 | 2536 |
| 33 | 889 | 890 | 2537 | 2538 |
| 34 | 891 | 892 | 2539 | 2540 |
| 35 | 893 | 894 | 2541 | 2542 |
| 36 | 895 | 896 | 2543 | 2544 |
| 37 | 897 | 898 | 2545 | 2546 |
| 38 | 899 | 900 | 2547 | 2548 |
| 39 | 901 | 902 | 2549 | 2550 |
| 40 | 903 | 904 | 2551 | 2552 |
| 41 | 905 | 906 | 2553 | 2554 |
| 42 | 907 | 908 | 2555 | 2556 |
| 43 | 909 | 910 | 2557 | 2558 |
| 44 | 911 | 912 | 2559 | 2560 |
| 45 | 913 | 914 | 2561 | 2562 |
| 46 | 915 | 916 | 2563 | 2564 |
| 47 | 917 | 918 | 2565 | 2566 |
| 48 | 919 | 920 | 2567 | 2568 |
| 49 | 921 | 922 | 2569 | 2570 |
| 50 | 923 | 924 | 2571 | 2572 |
| 51 | 925 | 926 | 2573 | 2574 |
| 52 | 927 | 928 | 2575 | 2576 |
| 53 | 929 | 930 | 2577 | 2578 |
| 54 | 931 | 932 | 2579 | 2580 |
| 55 | 933 | 934 | 2581 | 2582 |
| 56 | 935 | 936 | 2583 | 2584 |
| 57 | 937 | 938 | 2585 | 2586 |
| 58 | 939 | 940 | 2587 | 2588 |
| 59 | 941 | 942 | 2589 | 2590 |
| 60 | 943 | 944 | 2591 | 2592 |
| 61 | 945 | 946 | 2593 | 2594 |
| 62 | 947 | 948 | 2595 | 2596 |
| 63 | 949 | 950 | 2597 | 2598 |
| 64 | 951 | 952 | 2599 | 2600 |
| 65 | 953 | 954 | 2601 | 2602 |
| 66 | 955 | 956 | 2603 | 2604 |
| 67 | 957 | 958 | 2605 | 2606 |
| 68 | 959 | 960 | 2607 | 2608 |
| 69 | 961 | 962 | 2609 | 2610 |
| 70 | 963 | 964 | 2611 | 2612 |
| 71 | 965 | 966 | 2613 | 2614 |
| 72 | 967 | 968 | 2615 | 2616 |
| 73 | 969 | 970 | 2617 | 2618 |
| 74 | 971 | 972 | 2619 | 2620 |
| 75 | 973 | 974 | 2621 | 2622 |
| 76 | 975 | 976 | 2623 | 2624 |
| 77 | 977 | 978 | 2625 | 2626 |
| 78 | 979 | 980 | 2627 | 2628 |
| 79 | 981 | 982 | 2629 | 2630 |
| 80 | 983 | 984 | 2631 | 2632 |
| 81 | 985 | 986 | 2633 | 2634 |
| 82 | 987 | 988 | 2635 | 2636 |
| 83 | 989 | 990 | 2637 | 2638 |
| 84 | 991 | 992 | 2639 | 2640 |
| 85 | 993 | 994 | 2641 | 2642 |
| 86 | 995 | 996 | 2643 | 2644 |
| 87 | 997 | 998 | 2645 | 2646 |
| 88 | 999 | 1000 | 2647 | 2648 |
| 89 | 1001 | 1002 | 2649 | 2650 |
| 90 | 1003 | 1004 | 2651 | 2652 |
| 91 | 1005 | 1006 | 2653 | 2654 |
| 92 | 1007 | 1008 | 2655 | 2656 |
| 93 | 1009 | 1010 | 2657 | 2658 |
| 94 | 1011 | 1012 | 2659 | 2660 |
| 95 | 1013 | 1014 | 2661 | 2662 |
| 96 | 1015 | 1016 | 2663 | 2664 |
| 97 | 1017 | 1018 | 2665 | 2666 |
| 98 | 1019 | 1020 | 2667 | 2668 |
| 99 | 1021 | 1022 | 2669 | 2670 |
| 100 | 1023 | 1024 | 2671 | 2672 |
| 101 | 1025 | 1026 | 2673 | 2674 |
| 102 | 1027 | 1028 | 2675 | 2676 |
| 103 | 1029 | 1030 | 2677 | 2678 |
| 104 | 1031 | 1032 | 2679 | 2680 |
| 105 | 1033 | 1034 | 2681 | 2682 |
| 106 | 1035 | 1036 | 2683 | 2684 |
| 107 | 1037 | 1038 | 2685 | 2686 |
| 108 | 1039 | 1040 | 2687 | 2688 |
| 109 | 1041 | 1042 | 2689 | 2690 |
| 110 | 1043 | 1044 | 2691 | 2692 |
| 111 | 1045 | 1046 | 2693 | 2694 |
| 112 | 1047 | 1048 | 2695 | 2696 |
| 113 | 1049 | 1050 | 2697 | 2698 |
| 114 | 1051 | 1052 | 2699 | 2700 |
| 115 | 1053 | 1054 | 2701 | 2702 |
| 116 | 1055 | 1056 | 2703 | 2704 |
| 117 | 1057 | 1058 | 2705 | 2706 |
| 118 | 1059 | 1060 | 2707 | 2708 |
| 119 | 1061 | 1062 | 2709 | 2710 |
| 120 | 1063 | 1064 | 2711 | 2712 |
| 121 | 1065 | 1066 | 2713 | 2714 |
| 122 | 1067 | 1068 | 2715 | 2716 |
| 123 | 1069 | 1070 | 2717 | 2718 |
| 124 | 1071 | 1072 | 2719 | 2720 |
| 125 | 1073 | 1074 | 2721 | 2722 |
| 126 | 1075 | 1076 | 2723 | 2724 |
| 127 | 1077 | 1078 | 2725 | 2726 |
| 128 | 1079 | 1080 | 2727 | 2728 |
| 129 | 1081 | 1082 | 2729 | 2730 |
| 130 | 1083 | 1084 | 2731 | 2732 |
| 131 | 1085 | 1086 | 2733 | 2734 |
| 132 | 1087 | 1088 | 2735 | 2736 |
| 133 | 1089 | 1090 | 2737 | 2738 |
| 134 | 1091 | 1092 | 2739 | 2740 |
| 135 | 1093 | 1094 | 2741 | 2742 |
| 136 | 1095 | 1096 | 2743 | 2744 |
| 137 | 1097 | 1098 | 2745 | 2746 |
| 138 | 1099 | 1100 | 2747 | 2748 |
| 139 | 1101 | 1102 | 2749 | 2750 |
| 140 | 1103 | 1104 | 2751 | 2752 |
| 141 | 1105 | 1106 | 2753 | 2754 |
| 142 | 1107 | 1108 | 2755 | 2756 |
| 143 | 1109 | 1110 | 2757 | 2758 |
| 144 | 1111 | 1112 | 2759 | 2760 |
| 145 | 1113 | 1114 | 2761 | 2762 |
| 146 | 1115 | 1116 | 2763 | 2764 |
| 147 | 1117 | 1118 | 2765 | 2766 |
| 148 | 1119 | 1120 | 2767 | 2768 |
| 149 | 1121 | 1122 | 2769 | 2770 |
| 150 | 1123 | 1124 | 2771 | 2772 |
| 151 | 1125 | 1126 | 2773 | 2774 |
| 152 | 1127 | 1128 | 2775 | 2776 |
| 153 | 1129 | 1130 | 2777 | 2778 |
| 154 | 1131 | 1132 | 2779 | 2780 |
| 155 | 1133 | 1134 | 2781 | 2782 |
| 156 | 1135 | 1136 | 2783 | 2784 |
| 157 | 1137 | 1138 | 2785 | 2786 |
| 158 | 1139 | 1140 | 2787 | 2788 |
| 159 | 1141 | 1142 | 2789 | 2790 |
| 160 | 1143 | 1144 | 2791 | 2792 |
| 161 | 1145 | 1146 | 2793 | 2794 |
| 162 | 1147 | 1148 | 2795 | 2796 |
| 163 | 1149 | 1150 | 2797 | 2798 |
| 164 | 1151 | 1152 | 2799 | 2800 |
| 165 | 1153 | 1154 | 2801 | 2802 |
| 166 | 1155 | 1156 | 2803 | 2804 |
| 167 | 1157 | 1158 | 2805 | 2806 |
| 168 | 1159 | 1160 | 2807 | 2808 |
| 169 | 1161 | 1162 | 2809 | 2810 |
| 170 | 1163 | 1164 | 2811 | 2812 |
| 171 | 1165 | 1166 | 2813 | 2814 |
| 172 | 1167 | 1168 | 2815 | 2816 |
| 173 | 1169 | 1170 | 2817 | 2818 |
| 174 | 1171 | 1172 | 2819 | 2820 |
| 175 | 1173 | 1174 | 2821 | 2822 |
| 176 | 1175 | 1176 | 2823 | 2824 |
| 177 | 1177 | 1178 | 2825 | 2826 |
| 178 | 1179 | 1180 | 2827 | 2828 |
| 179 | 1181 | 1182 | 2829 | 2830 |
| 180 | 1183 | 1184 | 2831 | 2832 |
| 181 | 1185 | 1186 | 2833 | 2834 |
| 182 | 1187 | 1188 | 2835 | 2836 |
| 183 | 1189 | 1190 | 2837 | 2838 |
| 184 | 1191 | 1192 | 2839 | 2840 |
| 185 | 1193 | 1194 | 2841 | 2842 |
| 186 | 1195 | 1196 | 2843 | 2844 |
| 187 | 1197 | 1198 | 2845 | 2846 |
| 188 | 1199 | 1200 | 2847 | 2848 |
| 189 | 1201 | 1202 | 2849 | 2850 |
| 190 | 1203 | 1204 | 2851 | 2852 |
| 191 | 1205 | 1206 | 2853 | 2854 |
| 192 | 1207 | 1208 | 2855 | 2856 |
| 193 | 1209 | 1210 | 2857 | 2858 |
| 194 | 1211 | 1212 | 2859 | 2860 |
| 195 | 1213 | 1214 | 2861 | 2862 |
| 196 | 1215 | 1216 | 2863 | 2864 |
| 197 | 1217 | 1218 | 2865 | 2866 |
| 198 | 1219 | 1220 | 2867 | 2868 |
| 199 | 1221 | 1222 | 2869 | 2870 |
| 200 | 1223 | 1224 | 2871 | 2872 |
| 201 | 1225 | 1226 | 2873 | 2874 |
| 202 | 1227 | 1228 | 2875 | 2876 |
| 203 | 1229 | 1230 | 2877 | 2878 |
| 204 | 1231 | 1232 | 2879 | 2880 |
| 205 | 1233 | 1234 | 2881 | 2882 |
| 206 | 1235 | 1236 | 2883 | 2884 |
| 207 | 1237 | 1238 | 2885 | 2886 |
| 208 | 1239 | 1240 | 2887 | 2888 |
| 209 | 1241 | 1242 | 2889 | 2890 |
| 210 | 1243 | 1244 | 2891 | 2892 |
| 211 | 1245 | 1246 | 2893 | 2894 |
| 212 | 1247 | 1248 | 2895 | 2896 |
| 213 | 1249 | 1250 | 2897 | 2898 |
| 214 | 1251 | 1252 | 2899 | 2900 |
| 215 | 1253 | 1254 | 2901 | 2902 |
| 216 | 1255 | 1256 | 2903 | 2904 |
| 217 | 1257 | 1258 | 2905 | 2906 |
| 218 | 1259 | 1260 | 2907 | 2908 |
| 219 | 1261 | 1262 | 2909 | 2910 |
| 220 | 1263 | 1264 | 2911 | 2912 |
| 221 | 1265 | 1266 | 2913 | 2914 |
| 222 | 1267 | 1268 | 2915 | 2916 |
| 223 | 1269 | 1270 | 2917 | 2918 |
| 224 | 1271 | 1272 | 2919 | 2920 |
| 225 | 1273 | 1274 | 2921 | 2922 |
| 226 | 1275 | 1276 | 2923 | 2924 |
| 227 | 1277 | 1278 | 2925 | 2926 |
| 228 | 1279 | 1280 | 2927 | 2928 |
| 229 | 1281 | 1282 | 2929 | 2930 |
| 230 | 1283 | 1284 | 2931 | 2932 |
| 231 | 1285 | 1286 | 2933 | 2934 |
| 232 | 1287 | 1288 | 2935 | 2936 |
| 233 | 1289 | 1290 | 2937 | 2938 |
| 234 | 1291 | 1292 | 2939 | 2940 |
| 235 | 1293 | 1294 | 2941 | 2942 |
| 236 | 1295 | 1296 | 2943 | 2944 |
| 237 | 1297 | 1298 | 2945 | 2946 |
| 238 | 1299 | 1300 | 2947 | 2948 |
| 239 | 1301 | 1302 | 2949 | 2950 |
| 240 | 1303 | 1304 | 2951 | 2952 |
| 241 | 1305 | 1306 | 2953 | 2954 |
| 242 | 1307 | 1308 | 2955 | 2956 |
| 243 | 1309 | 1310 | 2957 | 2958 |
| 244 | 1311 | 1312 | 2959 | 2960 |
| 245 | 1313 | 1314 | 2961 | 2962 |
| 246 | 1315 | 1316 | 2963 | 2964 |
| 247 | 1317 | 1318 | 2965 | 2966 |
| 248 | 1319 | 1320 | 2967 | 2968 |
| 249 | 1321 | 1322 | 2969 | 2970 |
| 250 | 1323 | 1324 | 2971 | 2972 |
| 251 | 1325 | 1326 | 2973 | 2974 |
| 252 | 1327 | 1328 | 2975 | 2976 |
| 253 | 1329 | 1330 | 2977 | 2978 |
| 254 | 1331 | 1332 | 2979 | 2980 |
| 255 | 1333 | 1334 | 2981 | 2982 |
| 256 | 1335 | 1336 | 2983 | 2984 |
| 257 | 1337 | 1338 | 2985 | 2986 |
| 258 | 1339 | 1340 | 2987 | 2988 |
| 259 | 1341 | 1342 | 2989 | 2990 |
| 260 | 1343 | 1344 | 2991 | 2992 |
| 261 | 1345 | 1346 | 2993 | 2994 |
| 262 | 1347 | 1348 | 2995 | 2996 |
| 263 | 1349 | 1350 | 2997 | 2998 |
| 264 | 1351 | 1352 | 2999 | 3000 |
| 265 | 1353 | 1354 | 3001 | 3002 |
| 266 | 1355 | 1356 | 3003 | 3004 |
| 267 | 1357 | 1358 | 3005 | 3006 |
| 268 | 1359 | 1360 | 3007 | 3008 |
| 269 | 1361 | 1362 | 3009 | 3010 |
| 270 | 1363 | 1364 | 3011 | 3012 |
| 271 | 1365 | 1366 | 3013 | 3014 |
| 272 | 1367 | 1368 | 3015 | 3016 |
| 273 | 1369 | 1370 | 3017 | 3018 |
| 274 | 1371 | 1372 | 3019 | 3020 |
| 275 | 1373 | 1374 | 3021 | 3022 |
| 276 | 1375 | 1376 | 3023 | 3024 |
| 277 | 1377 | 1378 | 3025 | 3026 |
| 278 | 1379 | 1380 | 3027 | 3028 |
| 279 | 1381 | 1382 | 3029 | 3030 |
| 280 | 1383 | 1384 | 3031 | 3032 |
| 281 | 1385 | 1386 | 3033 | 3034 |
| 282 | 1387 | 1388 | 3035 | 3036 |
| 283 | 1389 | 1390 | 3037 | 3038 |
| 284 | 1391 | 1392 | 3039 | 3040 |
| 285 | 1393 | 1394 | 3041 | 3042 |
| 286 | 1395 | 1396 | 3043 | 3044 |
| 287 | 1397 | 1398 | 3045 | 3046 |
| 288 | 1399 | 1400 | 3047 | 3048 |
| 289 | 1401 | 1402 | 3049 | 3050 |
| 290 | 1403 | 1404 | 3051 | 3052 |
| 291 | 1405 | 1406 | 3053 | 3054 |
| 292 | 1407 | 1408 | 3055 | 3056 |
| 293 | 1409 | 1410 | 3057 | 3058 |
| 294 | 1411 | 1412 | 3059 | 3060 |
| 295 | 1413 | 1414 | 3061 | 3062 |
| 296 | 1415 | 1416 | 3063 | 3064 |
| 297 | 1417 | 1418 | 3065 | 3066 |
| 298 | 1419 | 1420 | 3067 | 3068 |
| 299 | 1421 | 1422 | 3069 | 3070 |
| 300 | 1423 | 1424 | 3071 | 3072 |
| 301 | 1425 | 1426 | 3073 | 3074 |
| 302 | 1427 | 1428 | 3075 | 3076 |
| 303 | 1429 | 1430 | 3077 | 3078 |
| 304 | 1431 | 1432 | 3079 | 3080 |
| 305 | 1433 | 1434 | 3081 | 3082 |
| 306 | 1435 | 1436 | 3083 | 3084 |
| 307 | 1437 | 1438 | 3085 | 3086 |
| 308 | 1439 | 1440 | 3087 | 3088 |
| 309 | 1441 | 1442 | 3089 | 3090 |
| 310 | 1443 | 1444 | 3091 | 3092 |
| 311 | 1445 | 1446 | 3093 | 3094 |
| 312 | 1447 | 1448 | 3095 | 3096 |
| 313 | 1449 | 1450 | 3097 | 3098 |
| 314 | 1451 | 1452 | 3099 | 3100 |
| 315 | 1453 | 1454 | 3101 | 3102 |
| 316 | 1455 | 1456 | 3103 | 3104 |
| 317 | 1457 | 1458 | 3105 | 3106 |
| 318 | 1459 | 1460 | 3107 | 3108 |
| 319 | 1461 | 1462 | 3109 | 3110 |
| 320 | 1463 | 1464 | 3111 | 3112 |
| 321 | 1465 | 1466 | 3113 | 3114 |
| 322 | 1467 | 1468 | 3115 | 3116 |
| 323 | 1469 | 1470 | 3117 | 3118 |
| 324 | 1471 | 1472 | 3119 | 3120 |
| 325 | 1473 | 1474 | 3121 | 3122 |
| 326 | 1475 | 1476 | 3123 | 3124 |
| 327 | 1477 | 1478 | 3125 | 3126 |
| 328 | 1479 | 1480 | 3127 | 3128 |
| 329 | 1481 | 1482 | 3129 | 3130 |
| 330 | 1483 | 1484 | 3131 | 3132 |
| 331 | 1485 | 1486 | 3133 | 3134 |
| 332 | 1487 | 1488 | 3135 | 3136 |
| 333 | 1489 | 1490 | 3137 | 3138 |
| 334 | 1491 | 1492 | 3139 | 3140 |
| 335 | 1493 | 1494 | 3141 | 3142 |
| 336 | 1495 | 1496 | 3143 | 3144 |
| 337 | 1497 | 1498 | 3145 | 3146 |
| 338 | 1499 | 1500 | 3147 | 3148 |
| 339 | 1501 | 1502 | 3149 | 3150 |
| 340 | 1503 | 1504 | 3151 | 3152 |
| 341 | 1505 | 1506 | 3153 | 3154 |
| 342 | 1507 | 1508 | 3155 | 3156 |
| 343 | 1509 | 1510 | 3157 | 3158 |
| 344 | 1511 | 1512 | 3159 | 3160 |
| 345 | 1513 | 1514 | 3161 | 3162 |
| 346 | 1515 | 1516 | 3163 | 3164 |
| 347 | 1517 | 1518 | 3165 | 3166 |
| 348 | 1519 | 1520 | 3167 | 3168 |
| 349 | 1521 | 1522 | 3169 | 3170 |
| 350 | 1523 | 1524 | 3171 | 3172 |
| 351 | 1525 | 1526 | 3173 | 3174 |
| 352 | 1527 | 1528 | 3175 | 3176 |
| 353 | 1529 | 1530 | 3177 | 3178 |
| 354 | 1531 | 1532 | 3179 | 3180 |
| 355 | 1533 | 1534 | 3181 | 3182 |
| 356 | 1535 | 1536 | 3183 | 3184 |
| 357 | 1537 | 1538 | 3185 | 3186 |
| 358 | 1539 | 1540 | 3187 | 3188 |
| 359 | 1541 | 1542 | 3189 | 3190 |
| 360 | 1543 | 1544 | 3191 | 3192 |
| 361 | 1545 | 1546 | 3193 | 3194 |
| 362 | 1547 | 1548 | 3195 | 3196 |
| 363 | 1549 | 1550 | 3197 | 3198 |
| 364 | 1551 | 1552 | 3199 | 3200 |
| 365 | 1553 | 1554 | 3201 | 3202 |
| 366 | 1555 | 1556 | 3203 | 3204 |
| 367 | 1557 | 1558 | 3205 | 3206 |
| 368 | 1559 | 1560 | 3207 | 3208 |
| 369 | 1561 | 1562 | 3209 | 3210 |
| 370 | 1563 | 1564 | 3211 | 3212 |
| 371 | 1565 | 1566 | 3213 | 3214 |
| 372 | 1567 | 1568 | 3215 | 3216 |
| 373 | 1569 | 1570 | 3217 | 3218 |
| 374 | 1571 | 1572 | 3219 | 3220 |
| 375 | 1573 | 1574 | 3221 | 3222 |
| 376 | 1575 | 1576 | 3223 | 3224 |
| 377 | 1577 | 1578 | 3225 | 3226 |
| 378 | 1579 | 1580 | 3227 | 3228 |
| 379 | 1581 | 1582 | 3229 | 3230 |
| 380 | 1583 | 1584 | 3231 | 3232 |
| 381 | 1585 | 1586 | 3233 | 3234 |
| 382 | 1587 | 1588 | 3235 | 3236 |
| 383 | 1589 | 1590 | 3237 | 3238 |
| 384 | 1591 | 1592 | 3239 | 3240 |
| 385 | 1593 | 1594 | 3241 | 3242 |
| 386 | 1595 | 1596 | 3243 | 3244 |
| 387 | 1597 | 1598 | 3245 | 3246 |
| 388 | 1599 | 1600 | 3247 | 3248 |
| 389 | 1601 | 1602 | 3249 | 3250 |
| 390 | 1603 | 1604 | 3251 | 3252 |
| 391 | 1605 | 1606 | 3253 | 3254 |
| 392 | 1607 | 1608 | 3255 | 3256 |
| 393 | 1609 | 1610 | 3257 | 3258 |
| 394 | 1611 | 1612 | 3259 | 3260 |
| 395 | 1613 | 1614 | 3261 | 3262 |
| 396 | 1615 | 1616 | 3263 | 3264 |
| 397 | 1617 | 1618 | 3265 | 3266 |
| 398 | 1619 | 1620 | 3267 | 3268 |
| 399 | 1621 | 1622 | 3269 | 3270 |
| 400 | 1623 | 1624 | 3271 | 3272 |
| 401 | 1625 | 1626 | 3273 | 3274 |
| 402 | 1627 | 1628 | 3275 | 3276 |
| 403 | 1629 | 1630 | 3277 | 3278 |
| 404 | 1631 | 1632 | 3279 | 3280 |
| 405 | 1633 | 1634 | 3281 | 3282 |
| 406 | 1635 | 1636 | 3283 | 3284 |
| 407 | 1637 | 1638 | 3285 | 3286 |
| 408 | 1639 | 1640 | 3287 | 3288 |
| 409 | 1641 | 1642 | 3289 | 3290 |
| 410 | 1643 | 1644 | 3291 | 3292 |
| 411 | 1645 | 1646 | 3293 | 3294 |
| 412 | 1647 | 1648 | 3295 | 3296 |

TABLE 4
Overview of SEQ ID NO of the genes or genomic regions and of
corresponding amplificates amplified by use of the corresponding
Forward and Reverse Primer named by their SEQ ID NO.

| SEQ | Forward Primer | Reverse Primer | SEQ |
|---|---|---|---|
| ID NO: | SEQ ID | SEQ ID | ID NO: |
| Genomic | NO: | NO: | Genomic |
| 413 | 4121 | 4122 | 1 |
| 414 | 4123 | 4124 | 2 |
| 415 | 4125 | 4126 | 3 |
| 416 | 4127 | 4128 | 4 |
| 417 | 4129 | 4130 | 5 |
| 418 | 4131 | 4132 | 6 |
| 419 | 4133 | 4134 | 7 |
| 420 | 4135 | 4136 | 8 |
| 421 | 4137 | 4138 | 9 |
| 422 | 4139 | 4140 | 10 |
| 423 | 4141 | 4142 | 11 |
| 424 | 4143 | 4144 | 12 |
| 425 | 4145 | 4146 | 13 |
| 426 | 4147 | 4148 | 14 |
| 427 | 4149 | 4150 | 15 |
| 428 | 4151 | 4152 | 16 |
| 429 | 4153 | 4154 | 17 |
| 430 | 4155 | 4156 | 18 |
| 431 | 4157 | 4158 | 19 |
| 432 | 4159 | 4160 | 20 |
| 433 | 4161 | 4162 | 21 |
| 434 | 4163 | 4164 | 22 |
| 435 | 4165 | 4166 | 23 |
| 436 | 4167 | 4168 | 24 |
| 437 | 4169 | 4170 | 25 |
| 438 | 4171 | 4172 | 26 |
| 439 | 4173 | 4174 | 27 |
| 440 | 4175 | 4176 | 28 |
| 441 | 4177 | 4178 | 29 |
| 442 | 4179 | 4180 | 30 |
| 443 | 4181 | 4182 | 31 |
| 444 | 4183 | 4184 | 32 |
| 445 | 4185 | 4186 | 33 |
| 446 | 4187 | 4188 | 34 |
| 447 | 4189 | 4190 | 35 |
| 448 | 4191 | 4192 | 36 |
| 449 | 4193 | 4194 | 37 |
| 450 | 4195 | 4196 | 38 |
| 451 | 4197 | 4198 | 39 |
| 452 | 4199 | 4200 | 40 |
| 453 | 4201 | 4202 | 41 |
| 454 | 4203 | 4204 | 42 |
| 455 | 4205 | 4206 | 43 |
| 456 | 4207 | 4208 | 44 |
| 457 | 4209 | 4210 | 45 |
| 458 | 4211 | 4212 | 46 |
| 459 | 4213 | 4214 | 47 |
| 460 | 4215 | 4216 | 48 |
| 461 | 4217 | 4218 | 49 |
| 462 | 4219 | 4220 | 50 |
| 463 | 4221 | 4222 | 51 |
| 464 | 4223 | 4224 | 52 |
| 465 | 4225 | 4226 | 53 |
| 466 | 4227 | 4228 | 54 |
| 467 | 4229 | 4230 | 55 |
| 468 | 4231 | 4232 | 56 |
| 469 | 4233 | 4234 | 57 |
| 470 | 4235 | 4236 | 58 |
| 471 | 4237 | 4238 | 59 |
| 472 | 4239 | 4240 | 60 |
| 473 | 4241 | 4242 | 61 |
| 474 | 4243 | 4244 | 62 |
| 475 | 4245 | 4246 | 63 |
| 476 | 4247 | 4248 | 64 |
| 477 | 4249 | 4250 | 65 |
| 478 | 4251 | 4252 | 66 |
| 479 | 4253 | 4254 | 67 |
| 480 | 4255 | 4256 | 68 |
| 481 | 4257 | 4258 | 69 |
| 482 | 4259 | 4260 | 70 |
| 483 | 4261 | 4262 | 71 |
| 484 | 4263 | 4264 | 72 |
| 485 | 4265 | 4266 | 73 |
| 486 | 4267 | 4268 | 74 |
| 487 | 4269 | 4270 | 75 |
| 488 | 4271 | 4272 | 76 |
| 489 | 4273 | 4274 | 77 |
| 490 | 4275 | 4276 | 78 |
| 491 | 4277 | 4278 | 79 |
| 492 | 4279 | 4280 | 80 |
| 493 | 4281 | 4282 | 81 |
| 494 | 4283 | 4284 | 82 |
| 495 | 4285 | 4286 | 83 |
| 496 | 4287 | 4288 | 84 |
| 497 | 4289 | 4290 | 85 |
| 498 | 4291 | 4292 | 86 |
| 499 | 4293 | 4294 | 87 |
| 500 | 4295 | 4296 | 88 |
| 501 | 4297 | 4298 | 89 |
| 502 | 4299 | 4300 | 90 |
| 503 | 4301 | 4302 | 91 |
| 504 | 4303 | 4304 | 92 |
| 505 | 4305 | 4306 | 93 |
| 506 | 4307 | 4308 | 94 |
| 507 | 4309 | 4310 | 95 |
| 508 | 4311 | 4312 | 96 |
| 509 | 4313 | 4314 | 97 |
| 510 | 4315 | 4316 | 98 |
| 511 | 4317 | 4318 | 99 |
| 512 | 4319 | 4320 | 100 |
| 513 | 4321 | 4322 | 101 |
| 514 | 4323 | 4324 | 102 |
| 515 | 4325 | 4326 | 103 |
| 516 | 4327 | 4328 | 104 |
| 517 | 4329 | 4330 | 105 |
| 518 | 4331 | 4332 | 106 |
| 519 | 4333 | 4334 | 107 |
| 520 | 4335 | 4336 | 108 |
| 521 | 4337 | 4338 | 109 |
| 522 | 4339 | 4340 | 110 |
| 523 | 4341 | 4342 | 111 |
| 524 | 4343 | 4344 | 112 |
| 525 | 4345 | 4346 | 113 |
| 526 | 4347 | 4348 | 114 |
| 527 | 4349 | 4350 | 115 |
| 528 | 4351 | 4352 | 116 |
| 529 | 4353 | 4354 | 117 |
| 530 | 4355 | 4356 | 118 |
| 531 | 4357 | 4358 | 119 |
| 532 | 4359 | 4360 | 120 |
| 533 | 4361 | 4362 | 121 |
| 534 | 4363 | 4364 | 122 |
| 535 | 4365 | 4366 | 123 |
| 536 | 4367 | 4368 | 124 |
| 537 | 4369 | 4370 | 125 |
| 538 | 4371 | 4372 | 126 |
| 539 | 4373 | 4374 | 127 |
| 540 | 4375 | 4376 | 128 |
| 541 | 4377 | 4378 | 129 |
| 542 | 4379 | 4380 | 130 |
| 543 | 4381 | 4382 | 131 |
| 544 | 4383 | 4384 | 132 |
| 545 | 4385 | 4386 | 133 |
| 546 | 4387 | 4388 | 134 |
| 547 | 4389 | 4390 | 135 |
| 548 | 4391 | 4392 | 136 |
| 549 | 4393 | 4394 | 137 |
| 550 | 4395 | 4396 | 138 |
| 551 | 4397 | 4398 | 139 |
| 552 | 4399 | 4400 | 140 |
| 553 | 4401 | 4402 | 141 |
| 554 | 4403 | 4404 | 142 |
| 555 | 4405 | 4406 | 143 |
| 556 | 4407 | 4408 | 144 |
| 557 | 4409 | 4410 | 145 |
| 558 | 4411 | 4412 | 146 |
| 559 | 4413 | 4414 | 147 |
| 560 | 4415 | 4416 | 148 |
| 561 | 4417 | 4418 | 149 |
| 562 | 4419 | 4420 | 150 |
| 563 | 4421 | 4422 | 151 |
| 564 | 4423 | 4424 | 152 |
| 565 | 4425 | 4426 | 153 |
| 566 | 4427 | 4428 | 154 |
| 567 | 4429 | 4430 | 155 |
| 568 | 4431 | 4432 | 156 |
| 569 | 4433 | 4434 | 157 |
| 570 | 4435 | 4436 | 158 |
| 571 | 4437 | 4438 | 159 |
| 572 | 4439 | 4440 | 160 |
| 573 | 4441 | 4442 | 161 |
| 574 | 4443 | 4444 | 162 |
| 575 | 4445 | 4446 | 163 |
| 576 | 4447 | 4448 | 164 |
| 577 | 4449 | 4450 | 165 |
| 578 | 4451 | 4452 | 166 |
| 579 | 4453 | 4454 | 167 |
| 580 | 4455 | 4456 | 168 |
| 581 | 4457 | 4458 | 169 |
| 582 | 4459 | 4460 | 170 |
| 583 | 4461 | 4462 | 171 |
| 584 | 4463 | 4464 | 172 |
| 585 | 4465 | 4466 | 173 |
| 586 | 4467 | 4468 | 174 |
| 587 | 4469 | 4470 | 175 |
| 588 | 4471 | 4472 | 176 |
| 589 | 4473 | 4474 | 177 |
| 590 | 4475 | 4476 | 178 |
| 591 | 4477 | 4478 | 179 |
| 592 | 4479 | 4480 | 180 |
| 593 | 4481 | 4482 | 181 |
| 594 | 4483 | 4484 | 182 |
| 595 | 4485 | 4486 | 183 |
| 596 | 4487 | 4488 | 184 |
| 597 | 4489 | 4490 | 185 |
| 598 | 4491 | 4492 | 186 |
| 599 | 4493 | 4494 | 187 |
| 600 | 4495 | 4496 | 188 |
| 601 | 4497 | 4498 | 189 |
| 602 | 4499 | 4500 | 190 |
| 603 | 4501 | 4502 | 191 |
| 604 | 4503 | 4504 | 192 |
| 605 | 4505 | 4506 | 193 |
| 606 | 4507 | 4508 | 194 |
| 607 | 4509 | 4510 | 195 |
| 608 | 4511 | 4512 | 196 |
| 609 | 4513 | 4514 | 197 |
| 610 | 4515 | 4516 | 198 |
| 611 | 4517 | 4518 | 199 |
| 612 | 4519 | 4520 | 200 |
| 613 | 4521 | 4522 | 201 |
| 614 | 4523 | 4524 | 202 |
| 615 | 4525 | 4526 | 203 |
| 616 | 4527 | 4528 | 204 |
| 617 | 4529 | 4530 | 205 |
| 618 | 4531 | 4532 | 206 |
| 619 | 4533 | 4534 | 207 |
| 620 | 4535 | 4536 | 208 |
| 621 | 4537 | 4538 | 209 |
| 622 | 4539 | 4540 | 210 |
| 623 | 4541 | 4542 | 211 |
| 624 | 4543 | 4544 | 212 |
| 625 | 4545 | 4546 | 213 |
| 626 | 4547 | 4548 | 214 |
| 627 | 4549 | 4550 | 215 |
| 628 | 4551 | 4552 | 216 |
| 629 | 4553 | 4554 | 217 |
| 630 | 4555 | 4556 | 218 |
| 631 | 4557 | 4558 | 219 |
| 632 | 4559 | 4560 | 220 |
| 633 | 4561 | 4562 | 221 |
| 634 | 4563 | 4564 | 222 |
| 635 | 4565 | 4566 | 223 |
| 636 | 4567 | 4568 | 224 |
| 637 | 4569 | 4570 | 225 |
| 638 | 4571 | 4572 | 226 |
| 639 | 4573 | 4574 | 227 |
| 640 | 4575 | 4576 | 228 |
| 641 | 4577 | 4578 | 229 |
| 642 | 4579 | 4580 | 230 |
| 643 | 4581 | 4582 | 231 |
| 644 | 4583 | 4584 | 232 |
| 645 | 4585 | 4586 | 233 |
| 646 | 4587 | 4588 | 234 |
| 647 | 4589 | 4590 | 235 |
| 648 | 4591 | 4592 | 236 |
| 649 | 4593 | 4594 | 237 |
| 650 | 4595 | 4596 | 238 |
| 651 | 4597 | 4598 | 239 |
| 652 | 4599 | 4600 | 240 |
| 653 | 4601 | 4602 | 241 |
| 654 | 4603 | 4604 | 242 |
| 655 | 4605 | 4606 | 243 |
| 656 | 4607 | 4608 | 244 |
| 657 | 4609 | 4610 | 245 |
| 658 | 4611 | 4612 | 246 |
| 659 | 4613 | 4614 | 247 |
| 660 | 4615 | 4616 | 248 |
| 661 | 4617 | 4618 | 249 |
| 662 | 4619 | 4620 | 250 |
| 663 | 4621 | 4622 | 251 |
| 664 | 4623 | 4624 | 252 |
| 665 | 4625 | 4626 | 253 |
| 666 | 4627 | 4628 | 254 |
| 667 | 4629 | 4630 | 255 |
| 668 | 4631 | 4632 | 256 |
| 669 | 4633 | 4634 | 257 |
| 670 | 4635 | 4636 | 258 |
| 671 | 4637 | 4638 | 259 |
| 672 | 4639 | 4640 | 260 |
| 673 | 4641 | 4642 | 261 |
| 674 | 4643 | 4644 | 262 |
| 675 | 4645 | 4646 | 263 |
| 676 | 4647 | 4648 | 264 |
| 677 | 4649 | 4650 | 265 |
| 678 | 4651 | 4652 | 266 |
| 679 | 4653 | 4654 | 267 |
| 680 | 4655 | 4656 | 268 |
| 681 | 4657 | 4658 | 269 |
| 682 | 4659 | 4660 | 270 |
| 683 | 4661 | 4662 | 271 |
| 684 | 4663 | 4664 | 272 |
| 685 | 4665 | 4666 | 273 |
| 686 | 4667 | 4668 | 274 |
| 687 | 4669 | 4670 | 275 |
| 688 | 4671 | 4672 | 276 |
| 689 | 4673 | 4674 | 277 |
| 690 | 4675 | 4676 | 278 |
| 691 | 4677 | 4678 | 279 |
| 692 | 4679 | 4680 | 280 |
| 693 | 4681 | 4682 | 281 |
| 694 | 4683 | 4684 | 282 |
| 695 | 4685 | 4686 | 283 |
| 696 | 4687 | 4688 | 284 |
| 697 | 4689 | 4690 | 285 |
| 698 | 4691 | 4692 | 286 |
| 699 | 4693 | 4694 | 287 |
| 700 | 4695 | 4696 | 288 |
| 701 | 4697 | 4698 | 289 |
| 702 | 4699 | 4700 | 290 |
| 703 | 4701 | 4702 | 291 |
| 704 | 4703 | 4704 | 292 |
| 705 | 4705 | 4706 | 293 |
| 706 | 4707 | 4708 | 294 |
| 707 | 4709 | 4710 | 295 |
| 708 | 4711 | 4712 | 296 |
| 709 | 4713 | 4714 | 297 |
| 710 | 4715 | 4716 | 298 |
| 711 | 4717 | 4718 | 299 |
| 712 | 4719 | 4720 | 300 |
| 713 | 4721 | 4722 | 301 |
| 714 | 4723 | 4724 | 302 |
| 715 | 4725 | 4726 | 303 |
| 716 | 4727 | 4728 | 304 |
| 717 | 4729 | 4730 | 305 |
| 718 | 4731 | 4732 | 306 |
| 719 | 4733 | 4734 | 307 |
| 720 | 4735 | 4736 | 308 |
| 721 | 4737 | 4738 | 309 |
| 722 | 4739 | 4740 | 310 |
| 723 | 4741 | 4742 | 311 |
| 724 | 4743 | 4744 | 312 |
| 725 | 4745 | 4746 | 313 |
| 726 | 4747 | 4748 | 314 |
| 727 | 4749 | 4750 | 315 |
| 728 | 4751 | 4752 | 316 |
| 729 | 4753 | 4754 | 317 |
| 730 | 4755 | 4756 | 318 |
| 731 | 4757 | 4758 | 319 |
| 732 | 4759 | 4760 | 320 |
| 733 | 4761 | 4762 | 321 |
| 734 | 4763 | 4764 | 322 |
| 735 | 4765 | 4766 | 323 |
| 736 | 4767 | 4768 | 324 |
| 737 | 4769 | 4770 | 325 |
| 738 | 4771 | 4772 | 326 |
| 739 | 4773 | 4774 | 327 |
| 740 | 4775 | 4776 | 328 |
| 741 | 4777 | 4778 | 329 |
| 742 | 4779 | 4780 | 330 |
| 743 | 4781 | 4782 | 331 |
| 744 | 4783 | 4784 | 332 |
| 745 | 4785 | 4786 | 333 |
| 746 | 4787 | 4788 | 334 |
| 747 | 4789 | 4790 | 335 |
| 748 | 4791 | 4792 | 336 |
| 749 | 4793 | 4794 | 337 |
| 750 | 4795 | 4796 | 338 |
| 751 | 4797 | 4798 | 339 |
| 752 | 4799 | 4800 | 340 |
| 753 | 4801 | 4802 | 341 |
| 754 | 4803 | 4804 | 342 |
| 755 | 4805 | 4806 | 343 |
| 756 | 4807 | 4808 | 344 |
| 757 | 4809 | 4810 | 345 |
| 758 | 4811 | 4812 | 346 |
| 759 | 4813 | 4814 | 347 |
| 760 | 4815 | 4816 | 348 |
| 761 | 4817 | 4818 | 349 |
| 762 | 4819 | 4820 | 350 |
| 763 | 4821 | 4822 | 351 |
| 764 | 4823 | 4824 | 352 |
| 765 | 4825 | 4826 | 353 |
| 766 | 4827 | 4828 | 354 |
| 767 | 4829 | 4830 | 355 |
| 768 | 4831 | 4832 | 356 |
| 769 | 4833 | 4834 | 357 |
| 770 | 4835 | 4836 | 358 |
| 771 | 4837 | 4838 | 359 |
| 772 | 4839 | 4840 | 360 |
| 773 | 4841 | 4842 | 361 |
| 774 | 4843 | 4844 | 362 |
| 775 | 4845 | 4846 | 363 |
| 776 | 4847 | 4848 | 364 |
| 777 | 4849 | 4850 | 365 |
| 778 | 4851 | 4852 | 366 |
| 779 | 4853 | 4854 | 367 |
| 780 | 4855 | 4856 | 368 |
| 781 | 4857 | 4858 | 369 |
| 782 | 4859 | 4860 | 370 |
| 783 | 4861 | 4862 | 371 |
| 784 | 4863 | 4864 | 372 |
| 785 | 4865 | 4866 | 373 |
| 786 | 4867 | 4868 | 374 |
| 787 | 4869 | 4870 | 375 |
| 788 | 4871 | 4872 | 376 |
| 789 | 4873 | 4874 | 377 |
| 790 | 4875 | 4876 | 378 |
| 791 | 4877 | 4878 | 379 |
| 792 | 4879 | 4880 | 380 |
| 793 | 4881 | 4882 | 381 |
| 794 | 4883 | 4884 | 382 |
| 795 | 4885 | 4886 | 383 |
| 796 | 4887 | 4888 | 384 |
| 797 | 4889 | 4890 | 385 |
| 798 | 4891 | 4892 | 386 |
| 799 | 4893 | 4894 | 387 |
| 800 | 4895 | 4896 | 388 |
| 801 | 4897 | 4898 | 389 |
| 802 | 4899 | 4900 | 390 |
| 803 | 4901 | 4902 | 391 |
| 804 | 4903 | 4904 | 392 |
| 805 | 4905 | 4906 | 393 |
| 806 | 4907 | 4908 | 394 |
| 807 | 4909 | 4910 | 395 |
| 808 | 4911 | 4912 | 396 |
| 809 | 4913 | 4914 | 397 |
| 810 | 4915 | 4916 | 398 |
| 811 | 4917 | 4918 | 399 |
| 812 | 4919 | 4920 | 400 |
| 813 | 4921 | 4922 | 401 |
| 814 | 4923 | 4924 | 402 |
| 815 | 4925 | 4926 | 403 |
| 816 | 4927 | 4928 | 404 |
| 817 | 4929 | 4930 | 405 |
| 818 | 4931 | 4932 | 406 |
| 819 | 4933 | 4934 | 407 |
| 820 | 4935 | 4936 | 408 |
| 821 | 4937 | 4938 | 409 |
| 822 | 4939 | 4940 | 410 |
| 823 | 4941 | 4942 | 411 |
| 824 | 4943 | 4944 | 412 |

TABLE 5
Overview of genes or genomic regions and the corresponding SEQ ID NOs, HUGO IDs,
Aliases, Reference Sequence IDs, Ensemble Gene IDs and Entrez IDs.

| SEQ | | | | | | |
|---|---|---|---|---|---|---|
| ID | | | | | | |
| NO: | | | | | | |
| Ge- | | | | | | |
| nom- | | | | | Ensembl Gene | Entrez Gene |
| ic | Gene | HUGO ID | Aliases | RefSeq ID | ID | ID |
| 413 | FLOT1, flotillin 1, | FLOT1 | | NM_005803 | ENSG00000137312 | 10211 |
| | ENSG00000137312 | | | | | |
| 414 | C6orf25, chromosome | C6orf25 | G6b; | NM_025260 | ENSG00000096148 | 80739 |
| | 6 open reading frame | | NG31 | | | |
| | 25, | | | | | |
| | ENSG00000096148 | | | | | |
| 415 | VARS, valyl-tRNA | VARS | G7A; | NM_006295 | ENSG00000096171 | 7407 |
| | synthetase, | | VARS2 | | | |
| | ENSG00000096171 | | | | | |
| 416 | major | HLA- | DPB1; | NM_002121 | OTTHUMG00000031076 | 3115 |
| | histocompatibility | DPB1 | HLA- | | | |
| | complex, class II, DP | | DP1B; | | | |
| | beta 1, | | MHC | | | |
| | OTTHUMG00000031076, | | DPB1 | | | |
| | HLA-DPB1 | | | | | |
| 417 | HLA-DRB5, major | HLA- | | NG_002432 | OTTHUMG00000031027 | 3127 |
| | histocompatibility | DRB5 | | | | |
| | complex, class II, DR | | | | | |
| | beta 5, | | | | | |
| | OTTHUMG00000031027 | | | | | |
| 418 | COL11A2, collagen, | COL11A2 | HKE5; | NM_080679 | OTTHUMG00000031036 | 1302 |
| | type XI, alpha 2, | | PARP; | | | |
| | OTTHUMG00000031036 | | STL3; | | | |
| | | | DFNA13; | | | |
| | | | DFNB53 | | | |
| 419 | PRAME, Melanoma | PRAME | MAPE; | NG_000002 | ENSG00000185686 | 23532 |
| | antigen preferentially | | OIP4 | | | |
| | expressed in tumors | | | | | |
| | (Preferentially | | | | | |
| | expressed antigen of | | | | | |
| | melanoma) (OPA- | | | | | |
| | interacting protein 4) | | | | | |
| | (OIP4), ENSG00000185686 | | | | | |
| 420 | ZNRF3 protein | ZNRF3 | KIAA1133, | XM_290972, | ENSG00000183579 | 84133 |
| | (Fragment), | | BK747E2.3, | XP_290972 | | |
| | ENSG00000183579, | | FLJ22057, | | | |
| | ZNRF3 zinc and ring | | RNF203 | | | |
| | finger 3 (ZNRF3) | | | | | |
| 421 | AP000357.2 (Vega | AP000357.2 | Em: AP000357.C22.2 | No | OTTHUMG00000030571 | No Available |
| | gene ID), Pseudogene | (Vega | | Available | | |
| | | gene ID) | | | | |
| 422 | AP000357.3 (Vega | AP000357.3 | Em: AP000357.C22.3 | No | OTTHUMG00000030574 | No Available |
| | gene ID), Pseudogene | (Vega | | Available | | |
| | | gene ID) | | | | |
| 423 | solute carrier family 7 | SLC7A4 | CAT4; | NM_004173 | OTTHUMG00000030129 | 6545 |
| | (cationic amino acid | | CAT-4; | | | |
| | transporter, y+ | | HCAT3; | | | |
| | system), member 4, | | MGC129976; | | | |
| | OTTHUMG00000030129, | | MGC129977 | | | |
| | SLC7A4 ( | | | | | |
| 424 | Myosin-18B (Myosin | MYO18B | BK125H2.1 | NM_014550 | ENSG00000133454 | 84700 |
| | XVIIIb), | | | | | |
| | ENSG00000133454, | | | | | |
| | MYO18B | | | | | |
| 425 | Q6ICL0_HUMAN | Q6ICL0_HUMAN | Em: AC006547.7, | | ENSG00000184004 | 150197 |
| | (Predicted | (Predicted | FLJ32575 | | | |
| | UniProt/TrEMBL ID), | UniProt/TrEMBL | | | | |
| | hypothetical protein | ID) | | | | |
| | FLJ3257; | | | | | |
| | ENSG00000184004 | | | | | |
| 426 | FBLN1; fibulin 1; | FBLN1 | FBLN | NM_001996 | ENSG00000077942 | 2192 |
| | ENSG00000077942 | | | | | |
| 427 | CYP2D6; cytochrome | CYP2D6 | CPD6; | NG_003180 | ENSG00000100197 | 1565 |
| | P450, family 2, | | CYP2D; | | | |
| | subfamily D, | | CYP2D@; | | | |
| | polypeptide 6; | | CYP2DL1; | | | |
| | ENSG00000100197 | | 450C2D; | | | |
| | | | P450-DB1; | | | |
| | | | MGC120389; | | | |
| | | | MGC120390 | | | |
| 428 | AC008132.9 (Vega | AC008132.9 | AC008103.3; | No | OTTHUMG00000030688 | No Available |
| | gene ID); Pseudogene; | (Vega | Em: AC008132.C22.2 | Available | | |
| | OTTHUMG00000030688 | gene ID) | | | | |
| 429 | glycoprotein Ib | GP1BB | | NM_000407 | OTTHUMT00000075045 | 2812 |
| | (platelet), beta | | | | | |
| | polypeptide, | | | | | |
| | OTTHUMT00000075045, | | | | | |
| | GP1BB-001 | | | | | |
| 430 | no gene associated | | | | | |
| 431 | AC006548.8 (Vega | AC006548.8 | Em: AC006548.C22.8 | No | OTTHUMG00000030274 | No Available |
| | gene ID) | (Vega | | Available | | |
| | | gene ID) | | | | |
| 432 | OTTHUMG00000030650, | AC005399.2 | Em: AC005399.C22.2 | No | OTTHUMG00000030650 | No Available |
| | AC005399.2, | (Vega | | Available | | |
| | putativer processed | gene ID) | | | | |
| | transcribed | | | | | |
| 433 | topoisomerase (DNA) | TOP3B | | NM_003935 | OTTHUMG00000030764 | 8940 |
| | III beta, | | | | | |
| | OTTHUMG00000030764, | | | | | |
| | TOP3B ( | | | | | |
| 434 | no gene associated | | | | | |
| 435 | KB-1269D1.3 (Vega | KB- | Em: AP000344.C22.3 | No | OTTHUMG00000030694 | No Available |
| | gene ID); Pseudogene; | 1269D1.3 | | Available | | |
| | OTTHUMG00000030694 | (Vega gene | | | | |
| | | ID) | | | | |
| 436 | GPR24; G protein- | GPR24 | SLC1; | NM_005297 | ENSG00000128285 | 2847 |
| | coupled receptor 24; | | MCHR1; | | | |
| | ENSG00000128285 | | MGC32129 | | | |
| 437 | GAL3ST1; galactose- | GAL3ST1 | CST | NM_004861 | ENSG00000128242 | 9514 |
| | 3-O-sulfotransferase 1; | | | | | |
| | ENSG00000128242 | | | | | |
| 438 | Cat eye syndrome | CECR5 | | NM_017829 | ENSG00000069998 | 27440 |
| | critical region protein | | | | | |
| | 5 precursor, | | | | | |
| | ENSG00000069998, | | | | | |
| | CECR5 and (head to | | | | | |
| | head) | | | | | |
| | OTTHUMG00000030478, | | | | | |
| | AC006946.7 | | | | | |
| 439 | HORMAD2; HORMA | HORMAD2 | MGC26710 | NM_152510 | ENSG00000176635 | 150280 |
| | domain containing 2; | | | | | |
| | ENSG00000176635 | | | | | |
| 440 | OTTHUMG00000030922, | RP3- | Em: AC002378.C22.2 | No | OTTHUMG00000030922 | No Available |
| | RP3-438O4.2 | 438O4.2 | | Available | | |
| | | (Vega_gene | | | | |
| | | ID) | | | | |
| 441 | NP_997357.1 (RefSeq | NP_997357.1 | FLJ42953 | NM_207474 | ENSG00000169668 | 400892 |
| | peptide ID); | (RefSeq | | | | |
| | ENSG00000169668 | peptide ID) | | | | |
| 442 | OTTHUMG00000030574, | AP000357.3 | Em: AP000357.C22.3 | | OTTHUMG00000030574 | |
| | AP000357.3, | | | | | |
| | novel pseudogene | | | | | |
| 443 | LA16c-4G1.2 (Vega | LA16c- | Em: AP000522.C22.2 | No | OTTHUMG00000030832 | No Available |
| | gene ID); Pseudogene; | 4G1.2 | | Available | | |
| | OTTHUMG00000030832 | (Vega gene | | | | |
| | | ID) | | | | |
| 444 | KB-226F1.11 (Vega | KB- | Em: | No | OTTHUMG00000030123 | No Available |
| | gene ID), embryonic | 226F1.11 | AP000351.C22.11 | Available | | |
| | marker, | (Vega gene | | | | |
| | OTTHUMG00000030123 | ID) | | | | |
| 445 | OTTHUMG00000030780, | CTA- | bK373H7.C22.4 | No | OTTHUMG00000030780 | No Available |
| | CTA-373H7.4, | 373H7.4 | | Available | | |
| | novel pseudogene | (Vega gene | | | | |
| | | ID) | | | | |
| 446 | RP1-47A17.8 (Vega | RP1- | dJ47A17.C22.8 | No | OTTHUMG00000030878 | No Available |
| | gene ID); | 47A17.8 | | Available | | |
| | OTTHUMG00000030878 | (Vega gene | | | | |
| | | ID); | | | | |
| 447 | RP4-539M6.7 (Vega | RP4- | Em: AC004832.C22.7 | No | OTTHUMG00000030918 | No Available |
| | gene ID); Pseudogene; | 539M6.7 | | Available | | |
| | OTTHUMG00000030918 | (Vega gene | | | | |
| | | ID) | | | | |
| 448 | CSDC2; cold shock | CSDC2 | PIPPIN; | NM_014460 | ENSG00000172346 | 27254 |
| | domain containing C2, | | dJ347H13.2 | | | |
| | RNA binding; | | | | | |
| | ENSG00000172346 | | | | | |
| 449 | Gamma-parvin, | PARVG | | NM_022141 | ENSG00000138964 | 64098 |
| | ENSG00000138964, | | | | | |
| | PARVG | | | | | |
| 450 | OTTHUMG00000030167, | CTA- | bK243E7.C22.3 | No | OTTHUMG00000030167 | No Available |
| | CTA-243E7.3 | 243E7.3 | | Available | | |
| | | (Vega gene | | | | |
| | | ID) | | | | |
| 451 | Oncostatin M | OSM | MGC20461 | NM_020530 | ENSG00000099985 | 5008 |
| | precursor (OSM), | | | | | |
| | ENSG00000099985, | | | | | |
| | OSM | | | | | |
| 452 | Oncostatin M | OSM | MGC20461 | NM_020530 | ENSG00000099985 | 5008 |
| | precursor (OSM), | | | | | |
| | ENSG00000099985, | | | | | |
| | OSM | | | | | |
| 453 | Myosin-18B (Myosin | MYO18B | BK125H2.1 | NM_014550 | ENSG00000133454 | 84700 |
| | XVIIIb), | | | | | |
| | ENSG00000133454, | | | | | |
| | MYO18B | | | | | |
| 454 | Q6ICL0_HUMAN | Q6ICL0_HUMAN | Em: AC006547.7, | | ENSG00000184004 | 150197 |
| | (Predicted | (Predicted | FLJ32575 | | | |
| | UniProt/TrEMBL ID), | UniProt/TrEMBL | | | | |
| | hypothetical protein | ID) | | | | |
| | FLJ3257; | | | | | |
| | ENSG00000184004 | | | | | |
| 455 | OTTHUMG00000030140, | CTA- | bA262A13.C22.5 | No | OTTHUMG00000030140 | No Available |
| | CTA-299D3.6 | 299D3.6 | | Available | | |
| | | (Vega gene | | | | |
| | | ID) | | | | |
| 456 | GALR3; galanin | GALR3 | | NM_003614 | ENSG00000128310 | 8484 |
| | receptor 3; | | | | | |
| | ENSG00000128310 | | | | | |
| 457 | GALR3; galanin | GALR3 | | NM_003614 | ENSG00000128310 | 8484 |
| | receptor 3; | | | | | |
| | ENSG00000128310 | | | | | |
| 458 | IL2RB; interleukin 2 | IL2RB | P70-75 | NM_000878 | ENSG00000100385 | 3560 |
| | receptor, beta; | | | | | |
| | ENSG00000100385 | | | | | |
| 459 | CTA-343C1.3 (Vega | CTA- | bK343C1.C22.3 | No | OTTHUMG00000030151 | No Available |
| | gene ID); Putative | 343C1.3 | | Available | | |
| | Processed transcript; | (Vega gene | | | | |
| | OTTHUMG00000030151 | ID) | | | | |
| 460 | CTA-941F9.6 | CTA- | | No | OTTHUMG00000030231 | No Available |
| | (Vega_gene ID) | 941F9.6 | | Available | | |
| | | (Vega_gene | | | | |
| | | ID) | | | | |
| 461 | CTA-941F9.6 | CTA- | | No | OTTHUMG00000030231 | No Available |
| | (Vega_gene ID) | 941F9.6 | | Available | | |
| | | (Vega_gene | | | | |
| | | ID) | | | | |
| 462 | LL22NC03-121E8.1 | LL22NC03- | cN121E8.C22.1 | No | OTTHUMG00000030676 | No Available |
| | (Vega gene ID); Novel | 121E8.1 | | Available | | |
| | Protein coding; | (Vega gene | | | | |
| | OTTHUMG00000030676 | ID) | | | | |
| 463 | Cytohesin-4, | PSCD4 | CYT4 | NM_013385 | ENSG00000100055 | 27128 |
| | ENSG00000100055, | | | | | |
| | PSCD4 | | | | | |
| 464 | RP4-754E20_A.4 | RP4- | dJ754E20A.C22.4 | No | OTTHUMG00000030716 | No Available |
| | (Vega gene ID); | 754E20_A.4 | | Available | | |
| | Putative Processed | (Vega | | | | |
| | transcript; | gene ID) | | | | |
| | OTTHUMG00000030716 | | | | | |
| 465 | PIB5PA; | PIB5PA | PIPP; | NM_001002837 | ENSG00000185133 | 27124 |
| | phosphatidylinositol | | INPP5; | | | |
| | (4,5) bisphosphate 5- | | MGC129984 | | | |
| | phosphatase, A; | | | | | |
| | ENSG00000185133; | | | | | |
| | embryonic marker | | | | | |
| 466 | no gene associated | | | | | |
| 467 | PLA2G3; | PLA2G3 | GIII- | NM_015715 | ENSG00000100078 | 50487 |
| | ENSG00000100078; | | SPLA2 | | | |
| | phospholipase A2, | | | | | |
| | group III | | | | | |
| 468 | PLA2G3; | PLA2G3 | GIII- | NM_015715 | ENSG00000100078 | 50487 |
| | ENSG00000100078; | | SPLA2 | | | |
| | phospholipase A2, | | | | | |
| | group III | | | | | |
| 469 | DGCR2; DiGeorge | DGCR2 | IDD; | NM_005137 | ENSG00000070413 | 9993 |
| | syndrome critical | | LAN; | | | |
| | region gene 2; | | DGS-C; | | | |
| | ENSG00000070413 | | SEZ-12; | | | |
| | | | KIAA0163; | | | |
| | | | DKFZp686I1730 | | | |
| 470 | TCN2; transcobalamin | TCN2 | TC2; | NM_000355 | ENSG00000185339 | 6948 |
| | II; macrocytic anemia; | | D22S676; | | | |
| | ENSG00000185339 | | D22S750 | | | |
| 471 | IGLL1; | IGLL1 | IGO; 14.1; | NM_020070 | ENSG00000128322 | 3543 |
| | immunoglobulin | | IGL1; | | | |
| | lambda-like | | IGL5; | | | |
| | polypeptide 1; | | IGLL; | | | |
| | ENSG00000128322 | | IGVPB; | | | |
| | | | CD179b; | | | |
| | | | VPREB2; | | | |
| | | | IGLJ14.1 | | | |
| 472 | RP1-29C18.7 (Vega | RP1- | dJ29C18.C22.7 | No | OTTHUMG00000030424 | No Available |
| | gene ID); Novel | 29C18.7 | | Available | | |
| | Processed transcript; | (Vega gene | | | | |
| | OTTHUMG00000030424 | ID) | | | | |
| 473 | IGLC1; | IGLC1 | IGLC; | NG_000002 | ENSG00000100208 | 3537 |
| | immunoglobulin | | MGC40381; | | | |
| | lambda constant 1 | | MGC40425; | | | |
| | (Mcg marker); | | MGC88359; | | | |
| | ENSG00000100208 | | MGC88777; | | | |
| | | | MGC88779; | | | |
| | | | MGC104999; | | | |
| | | | DKFZp667J0810; | | | |
| | | | Constant | | | |
| | | | region of | | | |
| | | | lambda | | | |
| | | | light | | | |
| | | | chains; | | | |
| | | | immunoglobulin | | | |
| | | | lambda | | | |
| | | | constant | | | |
| | | | region 1 | | | |
| | | | (Mcg | | | |
| | | | marker) | | | |
| 474 | APOBEC3B; | APOBEC3B | ARP4; | NM_004900 | ENSG00000179750 | 9582 |
| | apolipoprotein B | | ARCD3; | | | |
| | mRNA editing | | PHRBNL; | | | |
| | enzyme, catalytic | | APOBEC1L; | | | |
| | polypeptide-like 3B; | | FLJ21201; | | | |
| | ENSG00000179750 | | DJ742C19.2 | | | |
| 475 | CRYBB1; crystallin, | CRYBB1 | | NM_001887 | ENSG00000100122 | 1414 |
| | beta B1; | | | | | |
| | ENSG00000100122 | | | | | |
| 476 | CRYBA4; crystallin, | CRYBA4 | | NM_001886 | ENSG00000196431 | 1413 |
| | beta A4; | | | | | |
| | ENSG00000196431 | | | | | |
| 477 | sushi domain | SUSD2 | BK65A6.2, | NM_019601 | ENSG00000099994 | 56241 |
| | containing 2, | | FLJ22778 | | | |
| | ENSG00000099994, | | | | | |
| | SUSD2 | | | | | |
| 478 | sushi domain | SUSD2 | BK65A6.2, | NM_019601 | ENSG00000099994 | 56241 |
| | containing 2, | | FLJ22778 | | | |
| | ENSG00000099994, | | | | | |
| | SUSD2 | | | | | |
| 479 | OTTHUMG00000030870, | CTA- | bK503F6.C22.1 | No | OTTHUMG00000030870 | No Available |
| | Putative Processed | 503F6.1 | | Available | | |
| | transcript, CTA- | (Vega gene | | | | |
| | 503F6.1 | ID) | | | | |
| 480 | embryonic marker, | KB- | Em: AP000577.C22.3 | No | OTTHUMG00000030800 | No Available |
| | OTTHUMG00000030800, | 1323B2.3 | | Available | | |
| | KB-1323B2.3 | (Vega gene | | | | |
| | | ID) | | | | |
| 481 | no gene associated | | | | | |
| 482 | IGLV1-44; | IGLV1-44 | V1-16; | NG_000002 | ENSG00000186751 | 28823 |
| | immunoglobulin | | IGLV144 | | | |
| | lambda variable 1-44; | | | | | |
| | ENSG00000186751 | | | | | |
| 483 | IGLV1-44; | IGLV1-44 | V1-16; | NG_000002 | ENSG00000186751 | 28823 |
| | immunoglobulin | | IGLV144 | | | |
| | lambda variable 1-44; | | | | | |
| | ENSG00000186751 | | | | | |
| 484 | OTTHUMG00000030922, | RP3- | Em: AC002378.C22.2 | No | OTTHUMG00000030922 | No Available |
| | RP3-438O4.2 | 438O4.2 | | Available | | |
| | | (Vega_gene | | | | |
| | | ID) | | | | |
| 485 | OTTHUMG00000030922, | RP3- | Em: AC002378.C22.2 | No | OTTHUMG00000030922 | No Available |
| | RP3-438O4.2 | 438O4.2 | | Available | | |
| | | (Vega_gene | | | | |
| | | ID) | | | | |
| 486 | APOL4; | APOL4 | APOLIV; | NM_030643 | ENSG00000100336 | 80832 |
| | apolipoprotein L, 4; | | APOL-IV | | | |
| | ENSG00000100336 | | | | | |
| 487 | OTTHUMG00000030852, | RP4- | DJ756G23.1, | XM_377720 | OTTHUMG00000030852 | 150356 |
| | RP4- | 756G23.1 | LOC150356 | XP_377720 | | |
| | 756G23.1, novel | (Vega gene | | | | |
| | processed transcript | ID) | | | | |
| 488 | ENSG00000100399, | Q96E60_HUMAN | RP4- | XM_377720 | ENSG00000100399 | 150356 |
| | Q96E60_HUMAN | (Predicted | 756G23.1 | XP_377720 | | |
| | | UniProt/TrEMBL | hypothetical | | | |
| | | ID) | protein | | | |
| | | | BC012882, | | | |
| | | | LOC150356 | | | |
| 489 | Neutrophil cytosol | NCF4 | p40phox | NM_000631 | ENSG00000100365 | 4689 |
| | factor 4 (NCF-4) | | | | | |
| | (Neutrophil NADPH | | | | | |
| | oxidase factor 4) (p40- | | | | | |
| | phox) (p40phox)., | | | | | |
| | ENSG00000100365, | | | | | |
| | NCF4 | | | | | |
| 490 | Neutrophil cytosol | NCF4 | p40phox | NM_000631 | ENSG00000100365 | 4689 |
| | factor 4 (NCF-4) | | | | | |
| | (Neutrophil NADPH | | | | | |
| | oxidase factor 4) (p40- | | | | | |
| | phox) (p40phox)., | | | | | |
| | ENSG00000100365, | | | | | |
| | NCF4 | | | | | |
| 491 | Somatostatin receptor | SSTR3 | | NM_001051 | ENSG00000183473 | 6753 |
| | type 3 (SS3R) (SSR- | | | | | |
| | 28), D | | | | | |
| | ENSG00000183473, | | | | | |
| | SSTR3 | | | | | |
| 492 | Somatostatin receptor | SSTR3 | | NM_001051 | ENSG00000183473 | 6753 |
| | type 3 (SS3R) (SSR- | | | | | |
| | 28), D | | | | | |
| | ENSG00000183473, | | | | | |
| | SSTR3 | | | | | |
| 493 | Bcl-2 interacting killer | BIK | NBK, | NM_001197 | ENSG00000100290 | 638 |
| | (Apoptosis inducer | | BBC1 | | | |
| | NBK) (BP4) (BIP1)., | | | | | |
| | ENSG00000100290, | | | | | |
| | BIK | | | | | |
| 494 | GAS2-like protein 1 | GAS2L1 | GAR22 | NM_006478 | ENSG00000185340 | 10634 |
| | (Growth arrest-specific | | | | | |
| | 2-like 1) (GAS2- | | | | | |
| | related protein on | | | | | |
| | chromosome 22) | | | | | |
| | (GAR22 protein), | | | | | |
| | ENSG00000185340, | | | | | |
| | GAS2L1 | | | | | |
| 495 | RP3-355C18.2 (Vega | RP3- | dJ355C18.C22.2 | No | OTTHUMG00000030072 | No Available |
| | gene ID) | 355C18.2 | | Available | | |
| | | (Vega gene | | | | |
| | | ID) | | | | |
| 496 | SOX10; SRY (sex | SOX10 | DOM; | NM_006941 | ENSG00000100146 | 6663 |
| | determining region Y)- | | WS4; | | | |
| | box 10; | | MGC15649 | | | |
| | ENSG00000100146 | | | | | |
| 497 | Gamma-parvin | PARVG | | NM_022141 | ENSG00000138964 | 64098 |
| | ENSG00000138964 | | | | | |
| 498 | Caspase recruitment | CARD10 | CARMA3, | NM_014550 | ENSG00000100065 | 29775 |
| | domain protein 10 | | BIMP1 | | | |
| | (CARD-containing | | | | | |
| | MAGUK protein 3) | | | | | |
| | (Carma | | | | | |
| | 3). ENSG00000100065, | | | | | |
| | CARD10 | | | | | |
| 499 | ENSG00000100101, | NP_077289.1 | MGC3731; | NM_024313 | ENSG00000100101 | 79159 |
| | NP_077289.1 | | dJ37E16.7 | | | |
| 500 | HTF9C; HpaII tiny | HTF9C_HUMAN | HTF9C; | NM_022727 | ENSG00000099899 | 27037 |
| | fragments locus 9C; | (UniProt/Swiss- | MGC102728 | | | |
| | ENSG00000099899 | Prot | | | | |
| | | ID) | | | | |
| 501 | Oncostatin M | OSM | MGC20461 | NM_020531 | ENSG00000099985 | 5008 |
| | precursor (OSM), | | | | | |
| | ENSG00000099985, | | | | | |
| | OSM | | | | | |
| 502 | CTA-407F11.4 (Vega | CTA- | bK407F11.C22.4 | No | OTTHUMG00000030804 | No Available |
| | gene ID); Novel | 407F11.4 | | Available | | |
| | Processed transcript; | (Vega gene | | | | |
| | OTTHUMG00000030804 | ID) | | | | |
| 503 | Q6ICL0_HUMAN | Q6ICL0_HUMAN | Em: AC006547.7, | | ENSG00000184004 | 150197 |
| | (Predicted | (Predicted | FLJ32575 | | | |
| | UniProt/TrEMBL ID), | UniProt/TrEMBL | | | | |
| | hypothetical protein | ID) | | | | |
| | FLJ3257; | | | | | |
| | ENSG00000184004 | | | | | |
| 504 | CTA-989H11.2 (Vega | CTA- | bK989H11.C22.2 | No | OTTHUMG00000030141 | No Available |
| | gene ID); Putative | 989H11.2 | | Available | | |
| | Processed transcript; | (Vega gene | | | | |
| | OTTHUMG00000030141 | ID) | | | | |
| 505 | transmembrane | TMPRSS6 | | NM_153609 | ENSG00000187045 | 164656 |
| | protease, serine 6 | | | | | |
| 506 | HMG2L1; high- | HMG2L1 | HMGBCG; | NM_001003681 | ENSG00000100281 | 10042 |
| | mobility group protein | | THC211630 | | | |
| | 2-like 1; | | | | | |
| | ENSG00000100281 | | | | | |
| 507 | NP_001017964.1 | NP_001017964.1 | LOC150223; | NM_001017964 | ENSG00000161179 | 150223 |
| | (RefSeq peptide ID); | (RefSeq | MGC133160 | | | |
| | hypothetical protein | peptide ID) | | | | |
| | LOC150223; | | | | | |
| | ENSG00000161179 | | | | | |
| 508 | Platelet-derived | PDGFB | SIS; SSV; | NM_002608 | ENSG00000100311 | 5155 |
| | growth factor B chain | | PDGF2; c- | | | |
| | precursor (PDGF B- | | sis | | | |
| | chain, | | | | | |
| | ENSG00000100311, | | | | | |
| | PDGFB | | | | | |
| 509 | OTTHUMG00000030815, | CTA- | Em: U62317.C22.15 | No | OTTHUMG00000030815 | No Available |
| | CTA-384D8.15 | 384D8.15 | | Available | | |
| | | (Vega gene | | | | |
| | | ID) | | | | |
| 510 | MGAT3; mannosyl | MGAT3 | GNT3; | NM_002409 | ENSG00000128268 | 4248 |
| | (beta-1,4-)- | | GNT-III | | | |
| | glycoprotein beta-1,4- | | | | | |
| | N- | | | | | |
| | acetylglucosaminyltransferase; | | | | | |
| | ENSG00000128268 | | | | | |
| 511 | Ceramide kinase (EC | CERK | LK4; | NM_022766 | ENSG00000100422 | 64781 |
| | 2.7.1.138) | | hCERK; | | | |
| | (Acylsphingosine | | FLJ21430; | | | |
| | kinase) (hCERK) | | FLJ23239; | | | |
| | (Lipid kinase 4) | | KIAA1646; | | | |
| | (LK4), | | MGC131878; | | | |
| | ENSG00000100422, | | dA59H18.2; | | | |
| | CERK | | dA59H18.3; | | | |
| | | | DKFZp434E0211 | | | |
| 512 | Reticulon 4 receptor | RTN4R | NGR; | NM_023004 | ENSG00000040608 | 65078 |
| | precursor (Nogo | | NOGOR | | | |
| | receptor) (NgR) | | | | | |
| | (Nogo-66 receptor), | | | | | |
| | ENSG00000040608, | | | | | |
| | RTN4R | | | | | |
| 513 | UNC84B; unc-84 | UNC84B | SUN2; | NM_015374 | ENSG00000100242 | 25777 |
| | homolog B (C. Elegans); | | KIAA0668 | | | |
| | ENSG00000100242 | | | | | |
| 514 | RABL4; RAB, | RABL4 | RAYL | NM_006860 | ENSG00000100360 | 11020 |
| | member of RAS | | | | | |
| | oncogene family-like | | | | | |
| | 4; ENSG00000100360 | | | | | |
| 515 | Cadherin EGF LAG | CELSR1 | ME2, | NM_014246 | ENSG00000075275 | 9620 |
| | seven-pass G-type | | HFMI2, | | | |
| | receptor 1 precursor | | FMI2, | | | |
| | (Flamingo homolog 2) | | CDHF9 | | | |
| | (hFmi2), | | | | | |
| | ENSG00000075275, | | | | | |
| | CELSR1 | | | | | |
| 516 | OTTHUMG00000030326, | LL22NC03- | cN5H6.C22.1 | No | OTTHUMG00000030326 | No Available |
| | LL22NC03- | 5H6.1 | | Available | | |
| | 5H6.1 | (Vega gene | | | | |
| | | ID) | | | | |
| 517 | OTTHUMG00000030656, | RP3- | Em: AC005005.C22.6 | No | OTTHUMG00000030656 | No Available |
| | RP3-515N1.6 | 515N1.6 | | Available | | |
| | | (Vega gene | | | | |
| | | ID) | | | | |
| 518 | SMTN; smoothelin; | SMTN | | NM_006932 | ENSG00000183963 | 6525 |
| | ENSG00000183963 | | | | | |
| 519 | ZNRF3 protein | ZNRF3 | KIAA1133, | XM_290972, | ENSG00000183579 | 84133 |
| | (Fragment), | | BK747E2.3, | XP_290972 | | |
| | ENSG00000183579, | | FLJ22057, | | | |
| | ZNRF3 zinc and ring | | RNF203 | | | |
| | finger 3 (ZNRF3) | | | | | |
| 520 | OTTHUMG00000030700, | GRAP2 | Grf40, | | OTTHUMG00000030700 | 9402 |
| | GRB2-related | | GrbX, | | | |
| | adaptor protein 2, | | GRBLG, | | | |
| | GRAP2 | | GADS, | | | |
| | | | Mona, | | | |
| | | | P38; | | | |
| | | | GRID; | | | |
| | | | GRPL; | | | |
| | | | GRB2L; | | | |
| | | | GRAP-2 | | | |
| 521 | CAP-binding protein | NP_073622.2 | FLJ23588; | NM_022785 | ENSG00000186976 | 64800 |
| | complex interacting | (RefSeq | DJBP; | | | |
| | protein 1 isoform a | peptide ID) | HSCBCIP1; | | | |
| | Source: | | KIAA1672; | | | |
| | RefSeq_peptide | | dJ185D5.1 | | | |
| | NP_073622 | | | | | |
| 522 | SAM50_HUMAN | SAMM50 | OMP85; | NM_015380 | ENSG00000100347 | 25813 |
| | (UniProt/Swiss-Prot | | SAM50; | | | |
| | ID), | | TOB55; | | | |
| | ENSG00000100347, | | TRG-3; | | | |
| | SAM50-like protein | | CGI-51; | | | |
| | CGI-51; sorting and | | YNL026W | | | |
| | assembly machinery | | | | | |
| | component 50 | | | | | |
| | homolog (S. Cerevisiae) | | | | | |
| 523 | SULT4A1; | SULT4A1 | NST; | NM_014351 | ENSG00000130540 | 25830 |
| | sulfotransferase family | | BRSTL1; | | | |
| | 4A, member 1; | | SULTX3; | | | |
| | ENSG00000130540 | | BR-STL-1; | | | |
| | | | MGC40032; | | | |
| | | | DJ388M5.3; | | | |
| | | | hBR- | | | |
| | | | STL-1 | | | |
| 524 | TIMP3; TIMP | TIMP3 | SFD; | NM_000362 | ENSG00000100234 | 7078 |
| | metallopeptidase | | K222; | | | |
| | inhibitor 3 (Sorsby | | K222TA2; | | | |
| | fundus dystrophy, | | HSMRK222 | | | |
| | pseudoinflammatory); | | | | | |
| | ENSG00000100234 | | | | | |
| 525 | T-box transcription | TBX1 | DGS; | NM_005992 | ENSG00000184058 | 6899 |
| | factor TBX1 (T-box | | TGA; | | | |
| | protein 1) (Testis- | | CAFS; | | | |
| | specific T-box | | CTHM; | | | |
| | protein), | | DGCR; | | | |
| | ENSG00000184058, | | DORV; | | | |
| | TBX1, TBX1 is | | VCFS; | | | |
| | involved in heart | | TBX1C | | | |
| | development-Great | | | | | |
| 526 | ENSG00000186732, | MPPED1 | 239AB; | NM_001585 | ENSG00000186732 | 758 |
| | metallophosphoesterase | | FAM1A; | | | |
| | domain containing 1 | | C22orf1; | | | |
| | NM_001585.2 | | MGC88045 | | | |
| 527 | ENSG00000188511, | NP_942148.1 | LOC348645 | NM_198851 | ENSG00000188511 | 348645 |
| | NP_942148.1 novel | (RefSeq | | | | |
| | Gene hypothetical | peptide ID) | | | | |
| | protein LOC348645 | | | | | |
| 528 | Cdc42 effector protein | CDC42EP1 | MSE55, | NM_007061 | ENSG00000128283 | 11135 |
| | 1, | | CEP1, | | | |
| | ENSG00000128283, | | Borg5, | | | |
| | CDC42EP1 | | MGC15316 | | | |
| 529 | RPL3; ribosomal | RPL3 | TARBP-B; | NM_000967 | ENSG00000100316 | 6122 |
| | protein L3; | | MGC104284 | | | |
| | ENSG00000100316 | | | | | |
| 530 | APOL2; | APOL2 | APOL-II | NM_030882 | ENSG00000128335 | 23780 |
| | apolipoprotein L, 2; | | | | | |
| | ENSG00000128335 | | | | | |
| 531 | RAC2; ras-related C3 | RAC2 | Gx; EN-7; | NM_002872 | ENSG00000128340 | 5880 |
| | botulinum toxin | | HSPC022 | | | |
| | substrate 2 (rho | | | | | |
| | family, small GTP | | | | | |
| | binding protein Rac2); | | | | | |
| | ENSG00000128340 | | | | | |
| 532 | OTTHUMP00000028917, | Q96E60_HUMAN | RP4- | XM_377720 | ENSG00000100399 | 150356 |
| | ENSG00000100399, | (Predicted | 756G23.1 | XP_377720 | | |
| | Q96E60_HUMAN | UniProt/TrEMBL | hypothetical | | | |
| | | ID) | protein | | | |
| | | | BC012882, | | | |
| | | | LOC150356 | | | |
| 533 | Neutrophil cytosol | NCF4 | p40phox | NM_000631 | ENSG00000100365 | 4689 |
| | factor 4 (NCF-4) | | | | | |
| | (Neutrophil NADPH | | | | | |
| | oxidase factor 4) (p40- | | | | | |
| | phox) (p40phox)., | | | | | |
| | ENSG00000100365, | | | | | |
| | NCF4 | | | | | |
| 534 | XP_371837.1 (RefSeq | XP_371837.1 | | No | ENSG00000168768 | No Available |
| | peptide predicted ID); | (RefSeq | | Available | | |
| | PREDICTED: similar | peptide | | | | |
| | to oxidoreductase | predicted | | | | |
| | UCPA Source: | ID) | | | | |
| | RefSeq_peptide_predicted | | | | | |
| | XP_371837; | | | | | |
| | ENSG00000168768 | | | | | |
| 535 | triggering receptor | TREML2 | FLJ13693, | NM_024807 | ENSG00000112195 | 79865 |
| | expressed on myeloid | | TLT2, | | | |
| | cells-like 2, | | dJ238O23.1 | | | |
| | ENSG00000112195, | | | | | |
| | TREML2 | | | | | |
| 536 | TREML1; triggering | TREML1 | TLT1; | NM_178174 | ENSG00000161911 | 340205 |
| | receptor expressed on | | TLT-1; | | | |
| | myeloid cells-like 1; | | PRO3438; | | | |
| | ENSG00000161911 | | GLTL1825; | | | |
| | | | MGC119173; | | | |
| | | | dJ238O23.3 | | | |
| 537 | ENSG00000178199, | ZC3H12D | FLJ46041; | XM_291154 | ENSG00000178199 | 340152 |
| | Q6ZRW2_HUMAN; | | C6orf95; | XP_291154 | | |
| | zinc finger CCCH- | | dJ281H8.1 | | | |
| | type containing 12D | | | | | |
| 538 | AIM1; absent in | AIM1 | ST4 | NM_001624 | ENSG00000112297 | 202 |
| | melanoma1; | | | | | |
| | ENSG00000112297 | | | | | |
| 539 | NKG2D ligand 4 | RAET1E | LETAL, | NM_139165 | ENSG00000164520 | 135250 |
| | precursor (NKG2D | | bA350J20.7, | | | |
| | ligand 4) (NKG2DL4) | | ULBP4; | | | |
| | (N2DL-4) (Retinoic | | MGC125308; | | | |
| | acid early transcript | | MGC125309; | | | |
| | 1E) (Lymphocyte | | bA350J20.7 | | | |
| | effector toxicity | | | | | |
| | activation ligand) | | | | | |
| | (RAE-1-like transcript | | | | | |
| | 4) (RL-4), | | | | | |
| | ENSG00000164520, | | | | | |
| | RAET1E | | | | | |
| 540 | Disheveled associated | DAAM2 | KIAA0381; | NM_015345 | ENSG00000146122 | 23500 |
| | activator of | | MGC90515; | | | |
| | morphogenesis 2, | | dJ90A20A.1; | | | |
| | ENSG00000146122, | | RP1- | | | |
| | DAAM2 | | 278E11.1 | | | |
| 541 | RP11-535K1.1 (Vega | RP11- | | No | OTTHUMG00000014660 | No Available |
| | gene ID); Putative | 535K1.1 | | Available | | |
| | Processed transcript; | (Vega gene | | | | |
| | OTTHUMG00000014660 | ID) | | | | |
| 542 | OTTHUMG00000015679; | RP3- | dJ509I19.3 | No | OTTHUMG00000015679 | No Available |
| | Novel Protein | 509I19.3 | | Available | | |
| | coding; RP3-509I19.3 | (Vega gene | | | | |
| | | ID) | | | | |
| 543 | RP11-503C24.1 (Vega | RP11- | bA503C24.1 | No | OTTHUMG00000016040 | No Available |
| | gene ID); Putative | 503C24.1 | | Available | | |
| | Processed transcript; | (Vega gene | | | | |
| | OTTHUMG00000016040 | ID) | | | | |
| 544 | GABRR2; gamma- | GABRR2 | | NM_002043 | ENSG00000111886 | 2570 |
| | aminobutyric acid | | | | | |
| | (GABA) receptor, rho | | | | | |
| | 2; ENSG00000111886 | | | | | |
| 545 | ANKRD6; ankyrin | ANKRD6 | | NM_014942 | ENSG00000135299 | 22881 |
| | repeat domain 6; | | | | | |
| | ENSG00000135299 | | | | | |
| 546 | TXLNB; taxilin beta; | TXLNB | MDP77; | NM_153235 | ENSG00000164440 | 167838 |
| | ENSG00000164440 | | LST001; | | | |
| | | | C6orf198; | | | |
| | | | dJ522B19.2; | | | |
| | | | DKFZp451A175 | | | |
| 547 | TXLNB; taxilin beta; | TXLNB | MDP77; | NM_153235 | ENSG00000164440 | 167838 |
| | ENSG00000164440 | | LST001; | | | |
| | | | C6orf198; | | | |
| | | | dJ522B19.2; | | | |
| | | | DKFZp451A175 | | | |
| 548 | RP5-899B16.2 (Vega | RP5- | dJ899B16.2 | No | OTTHUMG00000015698 | No Available |
| | gene ID); Putative | 899B16.2 | | Available | | |
| | Processed transcript; | (Vega gene | | | | |
| | OTTHUMG00000015698 | ID) | | | | |
| 549 | Probable G-protein | GPR116 | KPG_001; | NM_015234 | ENSG00000069122 | 221395 |
| | coupled receptor 116 | | KIAA0758; | | | |
| | precursor, | | DKFZp564O1923 | | | |
| | ENSG00000069122, | | | | | |
| | GPR116 | | | | | |
| 550 | RP11-146I2.1 (Vega | RP11- | dJ190J20.1 | No | OTTHUMG00000014290 | No Available |
| | gene ID); Novel | 146I2.1 | | Available | | |
| | Processed transcript; | (Vega gene | | | | |
| | OTTHUMG00000014290 | ID) | | | | |
| 551 | GPR115; G protein- | GPR115 | PGR18; | NM_153838 | ENSG00000153294 | 221393 |
| | coupled receptor 115; | | FLJ38076 | | | |
| | ENSG00000153294 | | | | | |
| 552 | GPR126; G protein- | GPR126 | DREG; | NM_001032394 | ENSG00000112414 | 57211 |
| | coupled receptor 126; | | VIGR; | | | |
| | ENSG00000112414 | | PS1TP2 | | | |
| | embryonic marker | | | | | |
| 553 | RP1-60O19.1 (Vega | RP1- | dJ60O19.1 | No | OTTHUMG00000015305 | No Available |
| | gene ID); Known | 60O19.1 | | Available | | |
| | Processed transcript; | (Vega gene | | | | |
| | OTTHUMG00000015305 | ID) | | | | |
| 554 | OTTHUMG00000015313, | SCML4 | RP1- | NM_198081 | OTTHUMG00000015313 | 256380 |
| | RP1-47M23.1 | | 47M23.1 | | | |
| | SCML4 sex comb on | | (Vega_gene | | | |
| | midleg-like 4 | | ID) | | | |
| | (Drosophila) [Homo | | | | | |
| | sapiens] | | | | | |
| 555 | OTTHUMG00006004170, | CRISP2 | TPX1; | NM_003296 | OTTHUMG00000014822 | 7180 |
| | TPX1testis | | TSP1; | | | |
| | specific protein 1 | | GAPDL5; | | | |
| | (probe H4-1 p3-1) | | CRISP-2; | | | |
| | | | MGC111136 | | | |
| 556 | OTTHUMG00000014829, | RP11- | bA397G17.1 | No | OTTHUMG00000014829 | No Available |
| | RP11-397017.1, novel | 397G17.1 | | Available | | |
| | processed transcript. | (Vega gene | | | | |
| | | ID) | | | | |
| 557 | OTTHUMG00000015337RP11- | RP11- | LOC389422 | XM_374179 | OTTHUMG00000015337 | 389422 |
| | 487F23.3 | 487F23.3 | | XP_374179 | | |
| | hypothetical | (Vega gene | | | | |
| | LOC389422 | ID) | | | | |
| 558 | Nesprin-1 (Nuclear | SYNE1 | SYNE-1B, | NM_015293 | ENSG00000131018 | 23345 |
| | envelope spectrin | | KIAA0796, | | | |
| | repeat protein 1) | | 8B, | | | |
| | (Synaptic nuclear | | nesprin-1, | | | |
| | envelope protein 1) | | enaptin, | | | |
| | (Syne-1) (Myocyte | | MYNE1, | | | |
| | nuclear envelope | | CPG2 | | | |
| | protein 1) (Myne-1) | | | | | |
| | (Enaptin), | | | | | |
| | ENSG00000131018, | | | | | |
| | SYNE1 | | | | | |
| 559 | Nesprin-1 (Nuclear | SYNE1 | SYNE-1B, | NM_015293 | ENSG00000131018 | 23345 |
| | envelope spectrin | | KIAA0796, | | | |
| | repeat protein 1) | | 8B, | | | |
| | (Synaptic nuclear | | nesprin-1, | | | |
| | envelope protein 1) | | enaptin, | | | |
| | (Syne-1) (Myocyte | | MYNE1, | | | |
| | nuclear envelope | | CPG2 | | | |
| | protein 1) (Myne-1) | | | | | |
| | (Enaptin), | | | | | |
| | ENSG00000131018, | | | | | |
| | SYNE1 | | | | | |
| 560 | RP11-398K22.4 (Vega | RP11- | Em: AC019205.4 | No | OTTHUMG0000001504 | No Available |
| | gene ID); Putative | 398K22.4 | | Available | | |
| | Processed transcript; | (Vega gene | | | | |
| | OTTHUMG00000015024 | ID) | | | | |
| 561 | MyoD family inhibitor | MDFI | I-MF | NM_005586 | ENSG00000112559 | 4188 |
| | (Myogenic repressor I- | | | | | |
| | mf), | | | | | |
| | ENSG00000112559, | | | | | |
| | MDFI | | | | | |
| 562 | OTTHUMG00000014691, | RP11- | bA533O20.2 | No | OTTHUMG00000014691 | No Available |
| | putative | 533O20.2 | | Available | | |
| | processed transcript, | (Vega gene | | | | |
| | RP11-533O20.2 | ID) | | | | |
| 563 | RP3-398D13.4 (Vega | RP3- | dJ398D13.4 | No | OTTHUMG00000014188 | No Available |
| | gene ID); | 398D13.4 | | Available | | |
| | OTTHUMG00000014188 | (Vega gene | | | | |
| | | ID); | | | | |
| 564 | RP3-429O6.1 (Vega | RP3- | dJ429O6.1 | No | OTTHUMG00000014195 | No Available |
| | gene ID); Putative | 429O6.1 | | Available | | |
| | Processed transcript; | (Vega gene | | | | |
| | OTTHUMG00000014195 | ID) | | | | |
| 565 | MOG; myelin | MOG | MGC26137 | NM_001008228 | ENSG00000137345 | 4340 |
| | oligodendrocyte | | | | | |
| | glycoprotein; | | | | | |
| | ENSG00000137345 | | | | | |
| 566 | RP3-495K2.2 (Vega | RP3- | dJ495K2.2 | No | OTTHUMG00000016052 | No Available |
| | gene ID); Putative | 495K2.2 | | Available | | |
| | Processed transcript; | (Vega gene | | | | |
| | OTTHUMG00000016052 | ID) | | | | |
| 567 | RP11-417E7.1 (Vega | RP11- | bA417E7.1 | No | OTTHUMG00000016054 | No Available |
| | gene ID); Putative | 417E7.1 | | Available | | |
| | Processed transcript; | (Vega gene | | | | |
| | OTTHUMG00000016054 | ID) | | | | |
| 568 | tyrosine-protein | PTK7 | CCK4 | NM_002821 | ENSG00000112655 | 5754 |
| | kinase-like 7 precursor | | | | | |
| | (Colon carcinoma | | | | | |
| | kinase 4) (CCK-4)., | | | | | |
| | ENSG00000112655, | | | | | |
| | PTK7 | | | | | |
| 569 | RP11-174C7.4 (Vega | RP11- | bA174C7.4 | No | OTTHUMG00000015553 | No Available |
| | gene ID) | 174C7.4 | | Available | | |
| | | (Vega gene | | | | |
| | | ID) | | | | |
| 570 | cytidine | CMAH | CSAH; | NR_002174 | OTTHUMG00000016099 | 8418 |
| | monophosphate-N- | | CMP- | | | |
| | acetylneuraminic acid | | NeuAc | | | |
| | hydroxylase (CMP-N- | | hydroxylase; | | | |
| | acetylneuraminate | | CMP- | | | |
| | monooxygenase); | | Neu5Ac | | | |
| | CMAH | | hydroxylase; | | | |
| | | | CMP- | | | |
| | | | sialic acid | | | |
| | | | hydroxylase; | | | |
| | | | CMP-N- | | | |
| | | | acetylneuraminic | | | |
| | | | acid | | | |
| | | | hydroxylase; | | | |
| | | | cytidine | | | |
| | | | monophos | | | |
| | | | pho-N- | | | |
| | | | acetylneuraminic | | | |
| | | | acid | | | |
| | | | hydroxylase | | | |
| 571 | KHD1; polycystic | PKHD1 | FCYT; | NM_138694 | ENSG00000170927 | 5314 |
| | kidney and hepatic | | ARPKD; | | | |
| | disease 1 (autosomal | | TIGM1 | | | |
| | recessive); | | | | | |
| | ENSG00000170927 | | | | | |
| 572 | RP3-471C18.2 (Vega | RP3- | dJ471C18.2 | No | OTTHUMG00000014332 | No Available |
| | gene ID); Novel | 471C18.2 | | Available | | |
| | Processed transcript; | (Vega gene | | | | |
| | OTTHUMG00000014332 | ID) | | | | |
| 573 | RP11-204E9.1 (Vega | RP11- | bA204E9.1 | No | OTTHUMG00000014342 | No Available |
| | gene ID); Putative | 204E9.1 | | Available | | |
| | Processed transcript; | (Vega gene | | | | |
| | OTTHUMG00000014342 | ID) | | | | |
| 574 | glutathione peroxidase | GPX5 | | NM_001509 | OTTHUMG00000016307 | 2880 |
| | 5, | | | | | |
| | OTTHUMG00000016307, | | | | | |
| | GPX5 | | | | | |
| 575 | RP11-411K7.1 (Vega | RP11- | bA411K7.1 | No | OTTHUMG00000014887 | No Available |
| | gene ID); Putative | 411K7.1 | | Available | | |
| | Processed transcript; | (Vega gene | | | | |
| | OTTHUMG00000014887 | ID) | | | | |
| 576 | skin marker, | GRIK2 | RP3- | NM_021956 | ENSG00000164418 | 2898 |
| | Glutamate receptor, | | 438O4.2 | | | |
| | ionotropic kainate 2 | | (Vega gene | | | |
| | precursor (Glutamate | | ID) | | | |
| | receptor 6) (GluR-6) | | | | | |
| | (GluR6) (Excitatory | | | | | |
| | amino acid receptor 4) | | | | | |
| | (EAA4) | | | | | |
| 577 | C6orf142; | C6orf142 | MGC18257 | NM_138569 | ENSG00000146147 | 90523 |
| | chromosome 6 open | | | | | |
| | reading frame 142; | | | | | |
| | ENSG00000146147 | | | | | |
| 578 | HDGFL1; hepatoma | HDGFL1 | PWWP1; | NM_138574 | ENSG00000112273 | 154150 |
| | derived growth factor- | | dJ309H15.1 | | | |
| | like 1; | | | | | |
| | ENSG00000112273 | | | | | |
| 579 | forkhead box C1, | FOXC1 | FKHL7, | NM_001453 | OTTHUMG00000016182 | 2296 |
| | OTTHUMG00000016182, | | IRID1, | | | |
| | FOXC1 | | FREAC3, | | | |
| | | | ARA, | | | |
| | | | IGDA, | | | |
| | | | IHG1 | | | |
| 580 | C6orf188; | C6orf188 | MGC45451; | NM_153711 | ENSG00000178033 | 254228 |
| | chromosome 6 open | | dJ493F7.3 | | | |
| | reading frame 188; | | | | | |
| | ENSG00000178033 | | | | | |
| 581 | ME1; malic enzyme 1, | ME1 | MES; | NM_002395 | ENSG00000065833 | 4199 |
| | NADP(+)-dependent, | | HUMNDME | | | |
| | cytosolic; | | | | | |
| | ENSG00000065833 | | | | | |
| 582 | SLC22A1; solute | SLC22A1 | OCT1; | NM_003057 | ENSG00000175003 | 6580 |
| | carrier family 22 | | | | | |
| | (organic cation | | | | | |
| | transporter), member 1 | | | | | |
| 583 | RP11-235G24.1 (Vega | RP11- | bA235G24.1 | No | OTTHUMG00000015959 | No Available |
| | gene ID) | 235G24.1 | | Available | | |
| | | (Vega gene | | | | |
| | | ID) | | | | |
| 584 | T-box 18; TBX18 | TBX18 | | XM_496819 | ENSG00000112837 | 9096 |
| | | | | XP_496819 | | |
| 585 | CTA-31J9.2, putative | CTA- | bK31J9.2 | No | OTTHUMG00000015619 | No Available |
| | processed transcript, | 31J9.2 | | Available | | |
| | OTTHUMG00000015619 | (Vega gene | | | | |
| | | ID) | | | | |
| 586 | RP1-32B1.4 (Vega | RP1- | dJ32B1.4 | No | OTTHUMG00000015628 | No Available |
| | gene ID); Putative | 32B1.4 | | Available | | |
| | Processed transcript | (Vega gene | | | | |
| | OTTHUMG00000015628 | ID) | | | | |
| 587 | OTTHUMG00000014223, | RP11- | bA203H2.2 | No | OTTHUMG00000014223 | No Available |
| | RP11-203H2.2, | 203H2.2 | | Available | | |
| | novel processed | (Vega gene | | | | |
| | treanscript | ID) | | | | |
| 588 | OTTHUMG00000014737, | C6orf154 | MGC131686; | NM_001012974 | OTTHUMG00000014737 | 221424 |
| | C6orf154 and | | dJ337H4.2 | | | |
| | Name: chromosome 6 | | | | | |
| | open reading frame | | | | | |
| | 154; RP3-337H4.2 | | | | | |
| 589 | transcription factor | TFAP2A | AP-2 | NM_001032280 | OTTHUMG00000014235 | 7020 |
| | AP-2 alpha, | | | | | |
| | OTTHUMG00000014235, | | | | | |
| | TFAP2A | | | | | |
| 590 | IL20RA; interleukin | IL20RA | IL-20R1; | NM_014432 | ENSG00000016402 | 53832 |
| | 20 receptor, alpha; | | ZCYTOR7 | | | |
| | ENSG00000016402 | | | | | |
| 591 | KAAG1; kidney | KAAG1 | RU2; | NM_181337 | ENSG00000146049 | 353219 |
| | associated antigen 1; | | RU2AS; | | | |
| | ENSG00000146049 | | MGC78738 | | | |
| 592 | TGM3; | TGM3 | TGE; | NM_003245 | ENSG00000125780 | 7053 |
| | transglutaminase 3 (E | | MGC126249; | | | |
| | polypeptide, protein- | | MGC126250 | | | |
| | glutamine-gamma- | | | | | |
| | glutamyltransferase); | | | | | |
| | ENSG00000125780 | | | | | |
| 593 | RASSF2; Ras | RASSF2 | KIAA0168; | NM_014737 | ENSG00000101265 | 9770 |
| | association | | DKFZp781O1747 | | | |
| | (RalGDS/AF-6) | | | | | |
| | domain family 2; | | | | | |
| | ENSG00000101265 | | | | | |
| 594 | no gene associated | | | | | |
| 595 | no gene associated | | | | | |
| 596 | no gene associated | | | | | |
| 597 | no gene associated | | | | | |
| 598 | no gene associated | | | | | |
| 599 | no gene associated | | | | | |
| 600 | no gene associated | | | | | |
| 601 | no gene associated | | | | | |
| 602 | no gene associated | | | | | |
| 603 | no gene associated | | | | | |
| 604 | no gene associated | | | | | |
| 605 | RP4-697P8.2 (Vega | RP4- | dJ697P8.2 | No | OTTHUMG00000031879 | No Available |
| | gene ID); Putative | 697P8.2 | | Available | | |
| | Processed transcript; | (Vega gene | | | | |
| | OTTHUMG00000031879 | ID) | | | | |
| 606 | no gene associated | | | | | |
| 607 | OTTHUMG00000031883, | RP4- | DJ734C18.1 | No | OTTHUMG00000031883 | No Available |
| | RP4-734C18.1, | 734C18.1 | | Available | | |
| | putative processed | (Vega gene | | | | |
| | transcript | ID) | | | | |
| 608 | no gene associated | | | | | |
| 609 | no gene associated | | | | | |
| 610 | no gene associated | | | | | |
| 611 | no gene associated | | | | | |
| 612 | no gene associated | | | | | |
| 613 | Ras and Rab interactor | RIN2 | RASSF4 | NM_018993 | OTTHUMG00000031996 | 54453 |
| | 2, | | | | | |
| | OTTHUMG00000031996, | | | | | |
| | RIN2 | | | | | |
| 614 | no gene associated | | | | | |
| 615 | no gene associated | | | | | |
| 616 | no gene associated | | | | | |
| 617 | no gene associated | | | | | |
| 618 | no gene associated | | | | | |
| 619 | no gene associated | | | | | |
| 620 | no gene associated | | | | | |
| 621 | no gene associated | | | | | |
| 622 | no gene associated | | | | | |
| 623 | no gene associated | | | | | |
| 624 | C20orf112; | C20orf112 | dJ1184F4.2; | NM_080616 | OTTHUMG00000032219 | 140688 |
| | chromosome 20 open | | DKFZP566G1424 | | | |
| | reading frame 112; | | | | | |
| | OTTHUMG00000032219 | | | | | |
| 625 | FER1L4; fer-1-like 4 | FER1L4 | FLJ13459; | NR_001442 | OTTHUMG00000032354 | 80307 |
| | (C. Elegans); | | FLJ22613; | | | |
| | OTTHUMG00000032354 | | C20orf124; | | | |
| | | | dJ309K20.1; | | | |
| | | | bA563A22B.1; | | | |
| | | | fer-1 | | | |
| | | | (C. elegans)- | | | |
| | | | like 4 | | | |
| 626 | no gene associated | | | | | |
| 627 | no gene associated | | | | | |
| 628 | Protein C20orf102 | | | | | |
| | precursor, | | | | | |
| | ENSG00000132821, | | | | | |
| | CT102_HUMAN | | | | | |
| 629 | no gene associated | | | | | |
| 630 | no gene associated | | | | | |
| 631 | no gene associated | | | | | |
| 632 | no gene associated | | | | | |
| 633 | no gene associated - | | | | | |
| | Nearest transcript | | | | | |
| | CDH22 (~18 kb | | | | | |
| | upstream) | | | | | |
| 634 | no gene associated | | | | | |
| 635 | no gene associated | | | | | |
| 636 | no gene associated | | | | | |
| 637 | no gene associated | | | | | |
| 638 | no gene associated | | | | | |
| 639 | no gene associated | | | | | |
| 640 | no gene associated | | | | | |
| 641 | ZHX3; zinc fingers | ZHX3 | TIX1; | NM_015035 | OTTHUMG00000032481 | 23051 |
| | and homeoboxes 3; | | KIAA0395 | | | |
| | OTTHUMG00000032481 | | | | | |
| 642 | no gene associated | | | | | |
| 643 | CHD6; chromodomain | CHD6 | CHD5; | NM_032221 | ENSG00000124177 | 84181 |
| | helicase DNA binding | | RIGB; | | | |
| | protein 6; | | KIAA1335 | | | |
| | ENSG00000124177 | | | | | |
| 644 | no gene associated | | | | | |
| 645 | PTPRG; protein | PTPRG | PTPG; | NM_002841 | ENSG00000144724 | 5793 |
| | tyrosine phosphatase, | | HPTPG; | | | |
| | receptor type, G; | | RPTPG; | | | |
| | ENSG00000144724 | | R-PTP- | | | |
| | Gene is located on | | GAMMA | | | |
| | Chr. 3 | | | | | |
| 646 | no gene associated | | | | | |
| 647 | no gene associated | | | | | |
| 648 | no gene associated | | | | | |
| 649 | PTPNS1; protein | PTPNS1 | BIT; MFR; | NM_080792 | ENSG00000198053 | 140885 |
| | tyrosine phosphatase, | | P84; SIRP; | | | |
| | non-receptor type | | MYD-1; | | | |
| | substrate 1; | | SHPS1; | | | |
| | ENSG00000198053 | | SHPS-1; | | | |
| | | | SIRPalpha; | | | |
| | | | SIRPalpha | | | |
| | | | 2; SIRP- | | | |
| | | | ALPHA-1 | | | |
| 650 | Q7Z5T1_HUMAN | Q7Z5T1_HUMAN | KIAA1442; | XM_044921 | ENSG00000088881 | 57593 |
| | (Predicted | (Predicted | EBF4; | XP_044921 | | |
| | UniProt/TrEMBL ID); | UniProt/TrEMBL | O/E-4; | | | |
| | KIAA1442 protein; | ID) | RP5- | | | |
| | ENSG00000088881 | | 860F19.3 | | | |
| 651 | NP_689717.2 (RefSeq | NP_689717.2 | | No | ENSG00000171984 | No Available |
| | peptide ID); | (RefSeq | | Available | | |
| | ENSG00000171984 | peptide ID) | | | | |
| 652 | ENSG00000149346, | C20orf94 | NP_001009608.1, | NM_001009608 | ENSG00000149346 | 128710 |
| | NP_001009608.1, | | bA204H22.1; | | | |
| | hypothetical protein | | bA254M13.1; | | | |
| | LOC128710, | | dJ1099D15.3 | | | |
| | chromosome 20 open | | | | | |
| | reading frame 94 | | | | | |
| 653 | C20orf82; | C20orf82 | bA149I18.1; | XM_097736 | ENSG00000101230 | 140862 |
| | chromosome 20 open | | dJ1077I2.1 | XP_097736 | | |
| | reading frame 82; | | | | | |
| | ENSG00000101230 | | | | | |
| 654 | C20orf23; | C20orf23 | SNX23; | NM_024704 | ENSG00000089177 | 55614 |
| | chromosome 20 open | | KISC20ORF | | | |
| | reading frame 23; | | | | | |
| | ENSG00000089177; | | | | | |
| | embryonic marker | | | | | |
| 655 | PCSK2; proprotein | PCSK2 | PC2; | NM_002594 | ENSG00000125851 | 5126 |
| | convertase | | NEC2; | | | |
| | subtilisin/kexin type 2; | | SPC2 | | | |
| | ENSG00000125851 | | | | | |
| 656 | PCSK2; proprotein | PCSK2 | PC2; | NM_002594 | ENSG00000125851 | 5126 |
| | convertase | | NEC2; | | | |
| | subtilisin/kexin type 2; | | SPC2 | | | |
| | ENSG00000125851 | | | | | |
| 657 | solute carrier family | SLC24A3 | NCKX3 | NM_020689 | OTTHUMG00000031993 | 57419 |
| | 24 | | | | | |
| | (sodiumVpotassiumVcalcium | | | | | |
| | exchanger), | | | | | |
| | member 3, | | | | | |
| | OTTHUMG00000031993, | | | | | |
| | SLC24A3 ( | | | | | |
| 658 | solute carrier family | SLC24A3 | NCKX3 | NM_020689 | OTTHUMG00000031993 | 57419 |
| | 24 | | | | | |
| | (sodiumVpotassiumVcalcium | | | | | |
| | exchanger), | | | | | |
| | member 3, | | | | | |
| | OTTHUMG00000031993, | | | | | |
| | SLC24A3 ( | | | | | |
| 659 | ENSG00000089101, | C20orf26 | dJ1178H5.4; | NM_015585 | ENSG00000089101 | 26074 |
| | CT026_HUMAN | | DKFZP434K156 | | | |
| 660 | ENSG00000089101, | C20orf26 | dJ1178H5.4; | NM_015585 | ENSG00000089101 | 26074 |
| | CT026_HUMAN | | DKFZP434K156 | | | |
| 661 | C20orf74 protein, | Q9ULE8_HUMAN | FLJ12819; | XM_046600 | ENSG00000188559 | 57186 |
| | ENSG00000188559, | (Predicted | KIAA1272; | XP_046600 | | |
| | Q9ULE8_HUMAN | UniProt/TrEMBL | bA287B20.1; | | | |
| | | ID) | dJ1049G11.4; | | | |
| | | | RP11- | | | |
| | | | 470C13.2 | | | |
| 662 | C20orf74 protein, | Q9ULE8_HUMAN | FLJ12819; | XM_046600 | ENSG00000188559 | 57186 |
| | ENSG00000188559, | (Predicted | KIAA1272; | XP_046600 | | |
| | Q9ULE8_HUMAN | UniProt/TrEMBL | bA287B20.1; | | | |
| | | ID) | dJ1049G11.4; | | | |
| | | | RP11- | | | |
| | | | 470C13.2 | | | |
| 663 | C20orf74 protein, | Q9ULE8_HUMAN | FLJ12819; | XM_046600 | ENSG00000188559 | 57186 |
| | ENSG00000188559, | (Predicted | KIAA1272; | XP_046600 | | |
| | Q9ULE8_HUMAN | UniProt/TrEMBL | bA287B20.1; | | | |
| | | ID) | dJ1049G11.4; | | | |
| | | | RP11- | | | |
| | | | 470C13.2 | | | |
| 664 | PLAGL2; | PLAGL2 | | NM_002657 | ENSG00000126003 | 5326 |
| | pleiomorphic adenoma | | | | | |
| | gene-like 2; | | | | | |
| | ENSG00000126003 | | | | | |
| 665 | GGTL3; gamma- | GGTL3 | GGTL5; | NM_052830 | ENSG00000131067 | 2686 |
| | glutamyltransferase- | | D20S101; | | | |
| | like 3; | | dJ18C9.2 | | | |
| | ENSG00000131067 | | | | | |
| 666 | MYH7B; myosin, | MYH7B | MYH14; | NM_020884 | ENSG00000078814 | 57644 |
| | heavy polypeptide 7B, | | MGC96928; | | | |
| | cardiac muscle, beta; | | MGC96940 | | | |
| | ENSG00000078814 | | | | | |
| 667 | TRPC4AP; transient | TRPC4AP | TRUSS; | NM_015638 | ENSG00000100991 | 26133 |
| | receptor potential | | TRRP4AP; | | | |
| | cation channel, | | C20orf188 | | | |
| | subfamily C, member | | | | | |
| | 4 associated protein; | | | | | |
| | ENSG00000100991 | | | | | |
| 668 | EPB41L1; erythrocyte | EPB41L1 | 4.1N; | NM_012156 | ENSG00000088367 | 2036 |
| | membrane protein | | KIAA0338; | | | |
| | band 4.1-like 1; | | MGC11072 | | | |
| | ENSG00000088367 | | | | | |
| 669 | C20orf117; | C20orf117 | FLJ44670; | NM_080627 | OTTHUMG00000032395 | 140710 |
| | chromosome 20 open | | KIAA0889; | | | |
| | reading frame 117; | | dJ132F21.1 | | | |
| | OTTHUMG00000032395 | | | | | |
| 670 | PTPRT; protein | PTPRT | RPTPrho; | NM_007050 | ENSG00000196090 | 11122 |
| | tyrosine phosphatase, | | KIAA0283 | | | |
| | receptor type, T; | | | | | |
| | ENSG00000196090 | | | | | |
| 671 | PTPRT; protein | PTPRT | RPTPrho; | NM_007050 | ENSG00000196090 | 11122 |
| | tyrosine phosphatase, | | KIAA0283 | | | |
| | receptor type, T; | | | | | |
| | ENSG00000196090 | | | | | |
| 672 | PTPRT; protein | PTPRT | RPTPrho; | NM_007050 | ENSG00000196090 | 11122 |
| | tyrosine phosphatase, | | KIAA0283 | | | |
| | receptor type, T; | | | | | |
| | ENSG00000196090 | | | | | |
| 673 | PTPRT; protein | PTPRT | RPTPrho; | NM_007050 | ENSG00000196090 | 11122 |
| | tyrosine phosphatase, | | KIAA0283 | | | |
| | receptor type, T; | | | | | |
| | ENSG00000196090 | | | | | |
| 674 | PTPRT; protein | PTPRT | RPTPrho; | NM_007050 | ENSG00000196090 | 11122 |
| | tyrosine phosphatase, | | KIAA0283 | | | |
| | receptor type, T; | | | | | |
| | ENSG00000196090 | | | | | |
| 675 | SDC4; syndecan 4 | SDC4 | SYND4; | NM_002999 | ENSG00000124145 | 6385 |
| | (amphiglycan, | | MGC22217 | | | |
| | ryudocan); | | | | | |
| | ENSG00000124145 | | | | | |
| 676 | SDC4; syndecan 4 | SDC4 | SYND4; | NM_002999 | ENSG00000124145 | 6385 |
| | (amphiglycan, | | MGC22217 | | | |
| | ryudocan); | | | | | |
| | ENSG00000124145 | | | | | |
| 677 | cadherin-like 22, | CDH22 | C20orf25; | NM_021248 | OTTHUMG00000033073 | 64405 |
| | OTTHUMG00000033073, | | dJ998H6.1; | | | |
| | CDH22 | | MGC39564 | | | |
| 678 | EYA2; eyes absent | EYA2 | EAB1; | NM_005244 | ENSG00000064655 | 2139 |
| | homolog 2 | | MGC10614 | | | |
| | (Drosophila); | | | | | |
| | ENSG00000064655 | | | | | |
| 679 | SULF2; sulfatase 2; | SULF2 | HSULF-2; | NM_018837 | ENSG00000196562 | 55959 |
| | ENSG00000196562 | | KIAA1247; | | | |
| | | | MGC126411; | | | |
| | | | DKFZp313E091; | | | |
| | | | RP5- | | | |
| | | | 1049G16.1 | | | |
| 680 | KCNB1; potassium | KCNB1 | DRK1; | NM_004975 | ENSG00000158445 | 3745 |
| | voltage-gated channel, | | KV2.1; h- | | | |
| | Shab-related | | DRK1 | | | |
| | subfamily, member 1; | | | | | |
| | ENSG00000158445 | | | | | |
| 681 | Breast carcinoma | BCAS4 | FLJ20495, | NM_001010974 | ENSG00000124243 | 55653 |
| | amplified sequence 4, | | BHLHB4 | | | |
| | ENSG00000124243, | | | | | |
| | BCAS4 | | | | | |
| 682 | nuclear factor of | NFATC2 | NF-ATP, | | OTTHUMG00000032747 | 4773 |
| | activated T-cells, | | NFATp | | | |
| | cytoplasmic, | | | | | |
| | calcineurin-dependent | | | | | |
| | 2, | | | | | |
| | OTTHUMG00000032747, | | | | | |
| | NFATC2 | | | | | |
| 683 | Nuclear factor of | NFATC2 | NF-ATP, | NM_012340 | ENSG00000101096 | 4773 |
| | activated T-cells, | | NFATp | | | |
| | cytoplasmic 2 (T cell | | | | | |
| | transcription factor | | | | | |
| | NFAT1) (NFAT pre- | | | | | |
| | existing subunit) (NF- | | | | | |
| | ATp), | | | | | |
| | ENSG00000101096, | | | | | |
| | NFATC2 | | | | | |
| 684 | Bone morphogenetic | BMP7 | OP-1 | NM_001719 | ENSG00000101144 | 655 |
| | protein 7 precursor | | | | | |
| | (BMP-7) (Osteogenic | | | | | |
| | protein 1) (OP-1) | | | | | |
| | (Eptotermin alfa), | | | | | |
| | ENSG00000101144, | | | | | |
| | BMP7 | | | | | |
| 685 | transmembrane, | TMEPAI | STAG1; | NM_020182 | OTTHUMG00000032831 | 56937 |
| | prostate androgen | | PMEPA1 | | | |
| | induced RNA, | | | | | |
| | OTTHUMG00000032831, | | | | | |
| | TMEPAI | | | | | |
| 686 | ENSG00000176659, | NP_775915.1 | | No | ENSG00000176659 | No Available |
| | NP_775915.1 | (RefSeq | | Available | | |
| | | peptide ID) | | | | |
| 687 | CDH4; cadherin 4, | CDH4 | CAD4; | NM_001794 | ENSG00000179242 | 1002 |
| | type 1, R-cadherin | | RCAD; | | | |
| | (retinal); | | FLJ22202; | | | |
| | ENSG00000179242 | | FLJ40547; | | | |
| | | | MGC126700 | | | |
| 688 | NP_001002034.1 | NP_001002034.1 | | No | ENSG00000177096 | No Available |
| | (RefSeq peptide ID); | (RefSeq | | Available | | |
| | ENSG00000177096 | peptide ID) | | | | |
| 689 | NP_612444.1 (RefSeq | NP_612444.1 | | No | ENSG00000133477 | No Available |
| | peptide ID); | (RefSeq | | Available | | |
| | ENSG00000133477 | peptide ID) | | | | |
| 690 | no gene associated | | | | | |
| 691 | OTTHUMG00000030780, | CTA- | bK373H7.C22.4 | No | OTTHUMG00000030780 | No Available |
| | CTA-373H7.4, novel | 373H7.4 | | Available | | |
| | pseudogene | (Vega gene | | | | |
| | | ID) | | | | |
| 692 | no gene associated | | | | | |
| 693 | Cat eye syndrome | CECR1 | IDGFL | NM_017424 | ENSG00000093072 | 51816 |
| | critical region protein | | | | | |
| | 1 precursor, | | | | | |
| | ENSG00000093072, | | | | | |
| | CECR1 | | | | | |
| 694 | IGLC1; | IGLC1 | IGLC; | NG_000002 | ENSG00000100208 | 3537 |
| | immunoglobulin | | MGC40381; | | | |
| | lambda constant 1 | | MGC40425; | | | |
| | (Mcg marker); | | MGC88359; | | | |
| | ENSG00000100208 | | MGC88777; | | | |
| | | | MGC88779; | | | |
| | | | MGC104999; | | | |
| | | | DKFZp667J0810; | | | |
| | | | Constant | | | |
| | | | region of | | | |
| | | | lambda | | | |
| | | | light | | | |
| | | | chains; | | | |
| | | | immunoglobulin | | | |
| | | | lambda | | | |
| | | | constant | | | |
| | | | region 1 | | | |
| | | | (Mcg | | | |
| | | | marker) | | | |
| 695 | OTTHUMG00000030521, | AC000095.4 | Em: AC000095.C22.4 | No | OTTHUMG00000030521 | No Available |
| | AC000095.4 | (Vega | | Available | | |
| | putative processed | gene ID) | | | | |
| | transcript; | | | | | |
| 696 | Uroplakin-3A | UPK3A | UPK3; | NM_006953 | ENSG00000100373 | 7380 |
| | precursor (Uroplakin | | UPIII | | | |
| | III) (UPIII)., | | | | | |
| | ENSG00000100373, | | | | | |
| | UPK3A | | | | | |
| 697 | Spl site_no gene | | | | | |
| | associated | | | | | |
| 698 | USP18; ubiquitin | USP18 | ISG43; | NM_017414 | OTTHUMG00000030949 | 11274 |
| | specific peptidase 18; | | UBP43 | | | |
| | OTTHUMG00000030949 | | | | | |
| 699 | BCR; breakpoint | BCR | ALL; | NM_004327 | ENSG00000186716 | 613 |
| | cluster region; | | CML; | | | |
| | ENSG00000186716 | | PHL; | | | |
| | | | BCR1; | | | |
| | | | D22S11; | | | |
| | | | D22S662 | | | |
| 700 | TBC1D10A; TBC1 | TBC1D10A | EPI64; | NM_031937 | ENSG00000099992 | 83874 |
| | domain family, | | TBC1D10; | | | |
| | member 10A; | | dJ130H16.1; | | | |
| | ENSG00000099992 | | AC004997.C22.2 | | | |
| 701 | signal peptide-CUB | SCUBE1 | | NM_173050 | ENSG00000159307 | 80274 |
| | domian-EGF-related 1, | | | | | |
| | ENSG00000159307, | | | | | |
| | SCUBE1 | | | | | |
| 702 | MAPK8IP2; mitogen- | MAPK8IP2 | IB2; JIP2; | NM_012324 | ENSG00000008735 | 23542 |
| | activated protein | | PRKM8IPL | | | |
| | kinase 8 interacting | | | | | |
| | protein 2; | | | | | |
| | ENSG00000008735 | | | | | |
| 703 | ENSG00000192797, | No | | NM_000407 | ENSG00000192797 | No Available |
| | miRNA | Available | | | | |
| 704 | RPL3; ribosomal | RPL3 | TARBP-B; | NM_000967 | ENSG00000100316 | 6122 |
| | protein L3; | | MGC104284 | | | |
| | ENSG00000100316 | | | | | |
| 705 | RPL3; ribosomal | RPL3 | TARBP-B; | NM_000967 | ENSG00000100316 | 6122 |
| | protein L3; | | MGC104284 | | | |
| | ENSG00000100316 | | | | | |
| 706 | RP4-695O20_B.9 | RP4- | dJ695O20B.C22.9 | No | OTTHUMG00000030111 | No Available |
| | (Vega gene ID); | 695O20_B.9 | | Available | | |
| | Putative Processed | (Vega | | | | |
| | transcript; | gene ID) | | | | |
| | OTTHUMG00000030111 | | | | | |
| 707 | NOVEL transcript?? | | | | | |
| | No associated gene | | | | | |
| 708 | MN1; meningioma | MN1 | MGCR; | NM_002430 | ENSG00000169184 | 4330 |
| | (disrupted in balanced | | MGCR1; | | | |
| | translocation) 1; | | MGCR1- | | | |
| | ENSG00000169184 | | PEN; | | | |
| | | | dJ353E16.2 | | | |
| 709 | no gene associated | | | | | |
| 710 | RTDR1; rhabdoid | RTDR1 | MGC16968 | NM_014433 | ENSG00000100218 | 27156 |
| | tumor deletion region | | | | | |
| | gene 1; | | | | | |
| | ENSG00000100218 | | | | | |
| 711 | RPL3; ribosomal | RPL3 | TARBP-B; | NM_000967 | ENSG00000100316 | 6122 |
| | protein L3; | | MGC104284 | | | |
| | ENSG00000100316 | | | | | |
| 712 | embryonic marker, | GRAP2 | Grf40, | | OTTHUMG00000030700 | 9402 |
| | GRB2-related adaptor | | GrbX, | | | |
| | protein 2, | | GRBLG, | | | |
| | OTTHUMG00000030700, | | GADS, | | | |
| | GRAP2 | | Mona, | | | |
| | | | P38; | | | |
| | | | GRID; | | | |
| | | | GRPL; | | | |
| | | | GRB2L; | | | |
| | | | GRAP-2 | | | |
| 713 | Serine/threonine- | STK19 | G11; RP1; | NM_032454 | ENSG00000166301 | 8859 |
| | protein kinase 19 (EC | | D6S60; | | | |
| | 2.7.1.37) (RP1 protein) | | D6S60E; | | | |
| | (G11 protein). | | HLA-RP1; | | | |
| | | | MGC117388 | | | |
| 714 | Transcription factor 19 | TCF19_HUMAN | SC1 | Q9Y242 | ENSG00000137310 | |
| | (Transcription factor | | | | | |
| | SC1). | | | | | |
| 715 | Pannexin-2 | PANX2 | hPANX2; | NM_052839 | ENSG00000073150 | 56666 |
| | | | MGC119432 | | | |
| 716 | | CTA- | bK243E7.C22.3 | | OTTHUMG00000030167 | |
| | | 243E7.3 | | | | |
| 717 | signal peptide-CUB | SCUBE1 | | NM_173050 | ENSG00000159307 | 80274 |
| | domian-EGF-related 1 | | | | | |
| 718 | Reticulon 4 receptor | RTN4R | NGR; | NM_023004 | ENSG00000040608 | 65078 |
| | precursor (Nogo | | NOGOR | | | |
| | receptor) (NgR) | | | | | |
| | (Nogo-66 receptor) | | | | | |
| 719 | Arylsulfatase A | ARSA | MLD | NM_000487 | ENSG00000100299 | 410 |
| | precursor (EC 3.1.6.8) | | | | | |
| | (ASA) (Cerebroside- | | | | | |
| | sulfatase) [Contains: | | | | | |
| | Arylsulfatase A | | | | | |
| | component B; | | | | | |
| | Arylsulfatase A | | | | | |
| | component C] | | | | | |
| 720 | glycoprotein Ib | GP1BB | CD42c | NM_000407 | OTTHUMG00000030191 | 2812 |
| | (platelet), beta | | | | | |
| | polypeptide | | | | | |
| 721 | | | | | | |
| 722 | | No gene | | | | |
| | | associated | | | | |
| 723 | Mitochondrial | SLC25A18 | GC2 | NM_031481 | ENSG00000182902 | 83733 |
| | glutamate carrier 2 | | | | | |
| | (Glutamate/H(+) | | | | | |
| | symporter 2) (Solute | | | | | |
| | carrier family 25 | | | | | |
| | member 18, | | | | | |
| | ENSG00000182902, | | | | | |
| | SLC25A18 | | | | | |
| 724 | Thioredoxin reductase | TXNRD2 | TR; TR3; | NM_006440.2 | ENSG00000184470 | 10587 |
| | 2, mitochondrial | | SELZ; | | | |
| | precursor (EC 1.8.1.9) | | TRXR2; | | | |
| | (TR3) (TR-beta) | | TR-BETA | | | |
| | (Selenoprotein Z) | | | | | |
| | (SelZ) | | | | | |
| 725 | Somatostatin receptor | SSTR3 | | NM_001051 | ENSG00000183473 | 6753 |
| | type 3 (SS3R) (SSR- | | | | | |
| | 28) | | | | | |
| 726 | | RP11- | bA191L9.C22.1 | | OTTHUMG00000030964 | |
| | | 191L9.1 | | | | |
| 727 | No description- | AP000357.3 | Em: AP000357.C22.3 | | OTTHUMG00000030574 | |
| | pseudogene | | | | | |
| 728 | Cat eye syndrome | CECR1 | IDGFL | NM_017424.2 | ENST00000262607 | 51816 |
| | critical region protein | | | | | |
| | 1 precursor | | | | | |
| 729 | | No gene | | | | |
| | | associated | | | | |
| 730 | Membrane protein | MLC1 | VL; LVM; | NM_015166 | ENSG00000100427 | 23209 |
| | MLC1 | | MLC; | | | |
| | | | KIAA0027 | | | |
| 731 | BAI1-associated | BAIAP2L2 | FLJ22582 | NM_025045.3 | ENSG00000128298 | 80115 |
| | protein 2-like 2 | | | | | |
| 732 | No description | NP_056185.1 | | | ENSG00000100249 | |
| 733 | No description | RP4- | dJ695O20B.C22.9 | | OTTHUMG00000030111 | |
| | | 695O20_B.9 | | | | |
| 734 | OTTHUMG00000030167, | CTA- | bK243E7.C22.3 | No | OTTHUMG00000030167 | No Available |
| | CTA-243E7.3 | 243E7.3 | | Available | | |
| | | (Vega gene | | | | |
| | | ID) | | | | |
| 735 | novel transcript | XXbac- | Em: AC006547.C22.7 | | OTTHUMG00000030620 | |
| | | B444P24.7 | | | | |
| 736 | | LL22NC03- | | | OTTHUMG00000030676 | |
| | | 121E8.1- | | | | |
| | | 001 | | | | |
| 737 | No description | Q6ZN90_HUMAN | | | ENSG00000197549 | |
| 738 | NFAT activation | NFAM1 | CNAIP; | NM_145912 | ENSG00000167087 | 150372 |
| | molecule 1 precursor | | FLJ40652 | | | |
| | (Calcineurin/NFAT- | | | | | |
| | activating ITAM- | | | | | |
| | containing protein) | | | | | |
| | (NFAT activating | | | | | |
| | protein with ITAM | | | | | |
| | motif 1). | | | | | |
| 739 | immunoglobulin | IGLC2 | IGLC; | | OTTHUMG00000030352 | 3538 |
| | lambda constant 2 | | MGC20392; | | | |
| | | | MGC45681; | | | |
| | | | Ig light- | | | |
| | | | chain, | | | |
| | | | partial Ke- | | | |
| | | | Oz- | | | |
| | | | polypeptide, | | | |
| | | | C-term; | | | |
| | | | immunoglobulin | | | |
| | | | lambda | | | |
| | | | constant | | | |
| | | | region 2 | | | |
| | | | (Kern-Oz- | | | |
| | | | marker) | | | |
| 740 | immunoglobulin | IGLC2 | IGLC; | | OTTHUMG00000030352 | 3538 |
| | lambda constant 2 | | MGC20392; | | | |
| | | | MGC45681; | | | |
| | | | Ig light- | | | |
| | | | chain, | | | |
| | | | partial Ke- | | | |
| | | | Oz- | | | |
| | | | polypeptide, | | | |
| | | | C-term; | | | |
| | | | immunoglobulin | | | |
| | | | lambda | | | |
| | | | constant | | | |
| | | | region 2 | | | |
| | | | (Kern-Oz- | | | |
| | | | marker) | | | |
| 741 | OTTHUMG00000030870, | CTA- | bK503F6.C22.1 | No | OTTHUMG00000030870 | No Available |
| | CTA-503F6.1 | 503F6.1 | | Available | | |
| | | (Vega_gene | | | | |
| | | ID) | | | | |
| 742 | Lactosylceramide 4- | A4GALT | P1; PK; | NM_017436 | ENSG00000128274 | 53947 |
| | alpha- | | A14GALT; | | | |
| | galactosyltransferase | | A4GALT1 | | | |
| | (EC 2.4.1.228) | | | | | |
| 743 | | RP11- | | | OTTHUMG00000030966 | |
| | | 191L9.3 | | | | |
| 744 | Cold shock domain | CSDC2_HUMAN | PIPPIN | Q9Y534 | ENSG00000172346 | |
| | protein C2 (RNA- | | | | | |
| | binding protein | | | | | |
| | PIPPin) | | | | | |
| 745 | | GAS2L1 | GAR22; | NM_152236.1 | ENSG00000185340 | 10634 |
| | | | MGC17243 | | | |
| 746 | BAI1-associated | BAIAP2L2 | FLJ22582 | NM_025045.3 | ENSG00000128298 | 80115 |
| | protein 2-like 2 | | | | | |
| 747 | | NP_997360.1 | | | ENSG00000197182 | |
| 748 | OTTHUMG00000030991, | LL22NC03- | dJ671O14.C22.6; | No | OTTHUMG00000030991 | No Available |
| | LL22NC03- | 75B3.6 | KIAA1644 | Available | | |
| | 75B3.6 | (Vega gene | | | | |
| | | ID) | | | | |
| 749 | Reticulon 4 receptor | RTN4R | NGR; | NM_023004 | ENSG00000040608 | 65078 |
| | precursor (Nogo | | NOGOR | | | |
| | receptor) (NgR) | | | | | |
| | (Nogo-66 receptor) | | | | | |
| 750 | Smoothelin | SMTN | | NM_134269 | ENSG00000183963 | 6525 |
| 751 | solute carrier family | SLC35E4 | | NM_001001479.1 | ENSG00000100036 | 339665 |
| | 35, member E4 | | | | | |
| 752 | protein C22orf13 | CV013_HUMAN | | Q96NT3 | ENSG00000138867 | |
| | (Protein LLN4) | | | | | |
| 753 | | No gene | | | | |
| | | associated | | | | |
| 754 | Histone | HIST1H3A | H3/A; | NM_003532.2 | ENSG00000196966 | 8350 |
| | | | H3FA | | | |
| 755 | Gamma-aminobutyric- | GABRR1 ( | | NM_002042 | ENSG00000146276 | 2569 |
| | acid receptor rho-1 | | | | | |
| | subunit precursor | | | | | |
| | (GABA(A) receptor). | | | | | |
| 756 | OTTHUMG00000015693, | RP11- | bA12A2.3 | No | OTTHUMG00000015693 | No Available |
| | RP11-12A2.3 | 12A2.3 | | Available | | |
| | | (Vega_gene | | | | |
| | | ID) | | | | |
| 757 | | RP5- | dJ899B16.1 | | OTTHUMG00000015697 | |
| | | 899B16.1 ( | | | | |
| 758 | No description | RP11- | bA146I2.2 | | OTTHUMG00000014289 | |
| | | 146I2.2 | | | | |
| 759 | | NP_060483.2 | | | ENSG00000178289 | |
| 760 | Forkhead box protein | FOXO3A | AF6q21; | NM_001455 | ENSG00000118689 | 2309 |
| | O3A, | | FKHRL1; | | | |
| | ENSG00000118689, | | FKHRL1P2; | | | |
| | FOXO3A | | MGC12739; | | | |
| | | | MGC31925; | | | |
| | | | DKFZp781A0677 | | | |
| 761 | nuclear receptor | NCOA7 | ESNA1; | XM_059748 | ENSG00000111912 | 135112 |
| | coactivator 7 | | ERAP140; | | | |
| | | | MGC88425; | | | |
| | | | Nbla00052; | | | |
| | | | Nbla10993; | | | |
| | | | dJ187J11.3 | | | |
| 762 | | RP11- | bA554D15.1 | | OTTHUMG00000015043 | |
| | | 554D15.1 | | | | |
| 763 | chromosome 6 open | C6orf190 | C6orf207; | XM_069189 | OTTHUMG00000015534 | 387357 |
| | reading frame 190 | | FLJ40584; | | | |
| | | | bA325O24.3; | | | |
| | | | bA325O24.4 | | | |
| 764 | phosphatase and actin | PHACTR2 | C6orf56; | NM_014721 | OTTHUMG00000015732 | 9749 |
| | regulator 2 | | KIAA0680; | | | |
| | | | DKFZp686F18175 | | | |
| 765 | High mobility group | HMGA1 | HMG-R; | NM_002131 | ENSG00000137309 | 3159 |
| | protein HMG-I/HMG- | | HMGIY; | | | |
| | Y (HMG-I(Y)) (High | | MGC4242; | | | |
| | mobility group AT- | | MGC4854; | | | |
| | hook 1) (High mobility | | MGC12816 | | | |
| | group protein A1), | | | | | |
| | ENSG00000137309, | | | | | |
| | HMGA1 | | | | | |
| 766 | Pantetheinase | VNN1 | Tiff66; | NM_004666 | ENSG00000112299 | 8876 |
| | precursor (EC 3.5.1.—), | | MGC116930; | | | |
| | ENSG00000112299, | | MGC116931; | | | |
| | VNN1 | | MGC116932; | | | |
| | | | MGC116933 | | | |
| 767 | histone H2A | HIST1H2AA | H2AFR; | NM_170745 | ENSG00000164508 | 221613 |
| | | | bA317E16.2 | | | |
| 768 | transcription factor | TFAP2A | AP-2; | NM_003220 | OTTHUMG00000014235 | 7020 |
| | AP-2 alpha (activating | | AP2TF; | | | |
| | enhancer binding | | TFAP2; | | | |
| | protein 2 alpha) | | AP-2alpha | | | |
| 769 | N-acetyllactosaminide | GCNT2 | II, | NM_001491 | ENSG00000111846 | 2651 |
| | beta-1,6-N- | | GCNT5; | | | |
| | acetylglucosaminyl- | | II; IGNT; | | | |
| | tansferase (EC | | ULG3; | | | |
| | 2.4.1.150), | | AIGnT; | | | |
| | ENSG00000111846, | | BIGnT; | | | |
| | GCNT2 | | CIGnT; | | | |
| | | | GCNT5; | | | |
| | | | NAGCT1; | | | |
| | | | bA421M1.1; | | | |
| | | | bA360O19.2 | | | |
| 770 | | No gene | | | | |
| | | associated | | | | |
| 771 | | No gene | | | | |
| | | associated | | | | |
| 772 | | No gene | | | | |
| | | associated | | | | |
| 773 | | No gene | | | | |
| | | associated | | | | |
| 774 | | No gene | | | | |
| | | associated | | | | |
| 775 | | No gene | | | | |
| | | associated | | | | |
| 776 | | No gene | | | | |
| | | associated | | | | |
| 777 | | No gene | | | | |
| | | associated | | | | |
| 778 | | No gene | | | | |
| | | associated | | | | |
| 779 | | No gene | | | | |
| | | associated | | | | |
| 780 | No description | RP11- | bA318C17.1 | | OTTHUMG00000031920 | |
| | | 318C17.1 | | | | |
| 781 | | No gene | | | | |
| | | associated | | | | |
| 782 | | No gene | | | | |
| | | associated | | | | |
| 783 | | No gene | | | | |
| | | associated | | | | |
| 784 | | No gene | | | | |
| | | associated | | | | |
| 785 | | No gene | | | | |
| | | associated | | | | |
| 786 | | No gene | | | | |
| | | associated | | | | |
| 787 | novel transcript | RP11- | | | OTTHUMG00000032045 | |
| | | 216C10.1 | | | | |
| 788 | | No gene | | | | |
| | | associated | | | | |
| 789 | | No gene | | | | |
| | | associated | | | | |
| 790 | | No gene | | | | |
| | | associated | | | | |
| 791 | | RP11- | bA410N8.3 | | OTTHUMG00000032221 | |
| | | 410N8.3 | | | | |
| 792 | | TIMP3 ( | SFD; | NM_000362 | ENSG00000100234 | 7078 |
| | | | K222; | | | |
| | | | K222TA2; | | | |
| | | | HSMRK222 | | | |
| 793 | | No gene | | | | |
| | | associated | | | | |
| 794 | | No gene | | | | |
| | | associated | | | | |
| 795 | | No gene | | | | |
| | | associated | | | | |
| 796 | | No gene | | | | |
| 797 | no gene associated | No gene | | | | |
| | | associated | | | | |
| 798 | | No gene | | | | |
| | | associated | | | | |
| 799 | no gene | No gene | | | | |
| | | associated | | | | |
| 800 | | No gene | | | | |
| | | associated | | | | |
| 801 | | No gene | | | | |
| | | associated | | | | |
| 802 | | No gene | | | | |
| | | associated | | | | |
| 803 | | No gene | | | | |
| | | associated | | | | |
| 804 | sorting nexin 5 | SNX5 | FLJ10931 | NM_014426 | OTTHUMG00000031953 | 27131 |
| 805 | Probable D-tyrosyl- | HARS2 | DUEB; | NM_080820 | ENSG00000125821 | 92675 |
| | tRNA(Tyr) deacylase | | C20orf88; | | | |
| | (EC 3.1.—.—) | | MGC41905; | | | |
| | | | MGC119131; | | | |
| | | | bA379J5.3; | | | |
| | | | bA555E18.1 | | | |
| 806 | solute carrier family | SLC24A3 | NCKX3 | NM_020689 | OTTHUMG00000031993 | 57419 |
| | 24 | | | | | |
| | (sodiumVpotassiumVcalcium | | | | | |
| | exchanger), | | | | | |
| | member 3, | | | | | |
| | OTTHUMG00000031993, | | | | | |
| | SLC24A3 | | | | | |
| 807 | | CT026_HUMAN | C20orf26, | NM_015585.2 | ENSG00000089101 | 26074 |
| | | | dJ1178H5.4; | | | |
| | | | DKFZP434K156 | | | |
| 808 | RNA-binding protein | RALY | P542; | NM_007367 | ENSG00000125970 | 22913 |
| | Raly (hnRNP | | MGC117312 | | | |
| | associated with lethal | | | | | |
| | yellow homolog), D | | | | | |
| | ENSG00000125970, | | | | | |
| | RALY | | | | | |
| 809 | Protein phosphatase 1 | PPP1R16B | TIMAP; | NM_015568 | ENSG00000101445 | 26051 |
| | regulatory inhibitor | | ANKRD4; | | | |
| | subunit 16B (TGF- | | KIAA0823 | | | |
| | beta-inhibited | | | | | |
| | membrane-associated | | | | | |
| | protein) (hTIMAP) | | | | | |
| | (CAAX box protein | | | | | |
| | TIMAP) (Ankyrin | | | | | |
| | repeat domain protein | | | | | |
| | 4) | | | | | |
| 810 | protein tyrosine | PTPRT | RPTPrho; | NM_007050 | OTTHUMG00000033040 | 11122 |
| | phosphatase, receptor | | KIAA0283 | | | |
| | type, T | | | | | |
| 811 | protein tyrosine | PTPRT | RPTPrho; | NM_007050 | OTTHUMG00000033040 | 11122 |
| | phosphatase, receptor | | KIAA0283 | | | |
| | type, T | | | | | |
| 812 | protein tyrosine | PTPRT | RPTPrho; | NM_007050 | OTTHUMG00000033040 | 11122 |
| | phosphatase, receptor | | KIAA0283 | | | |
| | type, T | | | | | |
| 813 | Receptor-type | PTPRT | RPTPrho; | NM_007050 | ENSG00000196090 | 11122 |
| | tyrosine-protein | | KIAA0283 | | | |
| | phosphatase T | | | | | |
| | precursor (EC | | | | | |
| | 3.1.3.48) (R-PTP-T) | | | | | |
| | (RPTP-rho) | | | | | |
| 814 | cadherin-like 22 | CDH22 | C20orf25; | NM_021248 | OTTHUMG00000033073 | 64405 |
| | | | MGC39564; | | | |
| | | | dJ998H6.1 | | | |
| 815 | potassium voltage- | KCNB1 | DRK1; | NM_004975 | OTTHUMG00000033051 | 3745 |
| | gated channel, Shab- | | KV2.1; h- | | | |
| | related subfamily, | | DRK1 | | | |
| | member 1 | | | | | |
| 816 | potassium voltage- | KCNB1 | DRK1; | NM_004975 | OTTHUMG00000033051 | 3745 |
| | gated channel, Shab- | | KV2.1; h- | | | |
| | related subfamily, | | DRK1 | | | |
| | member 1 | | | | | |
| 817 | Zinc finger protein | SNAI1 | SNA; | NM_005985 | ENSG00000124216 | 6615 |
| | SNAI1 (Snail protein | | SNAH; | | | |
| | homolog) (Sna | | SLUGH2; | | | |
| | protein) | | dJ710H13.1 | | | |
| 818 | Cadherin-4 precursor | CDH4 | CAD4; | NM_001794 | ENSG00000179242 | 1002 |
| | (Retinal-cadherin) (R- | | RCAD; | | | |
| | cadherin) (R-CAD) | | FLJ22202; | | | |
| | | | FLJ40547; | | | |
| | | | MGC126700 | | | |
| 819 | cadherin 4, type 1, R- | CDH4 | CAD4; | NM_001794 | OTTHUMG00000032890 | 1002 |
| | cadherin (retinal) | | RCAD; | | | |
| | | | FLJ22202; | | | |
| | | | FLJ40547; | | | |
| | | | MGC126700 | | | |
| 820 | Cadherin-4 precursor | CDH4 | CAD4; | NM_001794 | ENSG00000179242 | 1002 |
| | (Retinal-cadherin) (R- | | RCAD; | | | |
| | cadherin) (R-CAD) | | FLJ22202; | | | |
| | | | FLJ40547; | | | |
| | | | MGC126700 | | | |
| 821 | Metalloproteinase | | | | | |
| | inhibitor 3 precursor | | | | | |
| | (TIMP-3) (Tissue | | | | | |
| | inhibitor of | | | | | |
| | metalloproteinases-3) | | | | | |
| | (MIG-5 protein). | | | | | |
| 822 | Tubulin alpha-8 chain | TUBA8 | TUBAL2 | NM_018943 | ENSG00000070490 | 51807 |
| | (Alpha-tubulin 8) | | | | | |
| 823 | | No gene | | | | |
| | | associated | | | | |
| 824 | | No gene | | | | |
| | | associated | | | | |

TABLE 6
Overview of the genomic regions and ranges of methylation within which the actual value of
methylation of said genomic regions lies specific of the said cells, tissues and/or organs.
The actual value of methylation is shown in FIGS. 1.1-1.403.

| SEQ | | | | | | |
|---|---|---|---|---|---|---|
| ID | CD4 | CD8 | | Embryonic | | |
| NO: | T- | T- | Embryonic | Skeletal | | Heart |
| Genomic | lymphocyte | lymphocyte | Liver | Muscle | Fibroblast | Muscle |
| 413 | 75-100% | 75-100% | 75-100% | 75-100% | 75-100% | 75-100% |
| 414 | 75-100% | 75-100% | 75-100% | 75-100% | 75-100% | 75-100% |
| 415 | 75-100% | 75-100% | 75-100% | 75-100% | 75-100% | 75-100% |
| 416 | 75-100% | 75-100% | 0-25% | 0-25% | 0-25% | 0-25% |
| 417 | 0-25% | 0-25% | 75-100% | 75-100% | 75-100% | 75-100% |
| 418 | 75-100% | 75-100% | 75-100% | 75-100% | 75-100% | 75-100% |
| 419 | 75-100% | 75-100% | 75-100% | 75-100% | 75-100% | 75-100% |
| 420 | 75-100% | 75-100% | 75-100% | 0-25% | 75-100% | 75-100% |
| 421 | 75-100% | 75-100% | 75-100% | 75-100% | 75-100% | 75-100% |
| 422 | 25-75% | 25-75% | 25-75% | 25-75% | 0-25% | 25-75% |
| 423 | 0-25% | 0-25% | 0-25% | 0-25% | 0-25% | 0-25% |
| 424 | 75-100% | 75-100% | 75-100% | 25-75% | 75-100% | 25-75% |
| 425 | 75-100% | 75-100% | 25-75% | 25-75% | 25-75% | 25-75% |
| 426 | 25-75% | 25-75% | 0-25% | 0-25% | 0-25% | 0-25% |
| 427 | 75-100% | 75-100% | 75-100% | 75-100% | 75-100% | 75-100% |
| 428 | 75-100% | 75-100% | 75-100% | 75-100% | 75-100% | 75-100% |
| 429 | 0-25% | 0-25% | 0-25% | 75-100% | 75-100% | 25-75% |
| 430 | 75-100% | 75-100% | 75-100% | 75-100% | 75-100% | 25-75% |
| 431 | 75-100% | 75-100% | 75-100% | 75-100% | 75-100% | 75-100% |
| 432 | 75-100% | 75-100% | 75-100% | 75-100% | 75-100% | 75-100% |
| 433 | 75-100% | 75-100% | 75-100% | 75-100% | 75-100% | 75-100% |
| 434 | 75-100% | 75-100% | 75-100% | 75-100% | 75-100% | 75-100% |
| 435 | 75-100% | 75-100% | 75-100% | 75-100% | 75-100% | 75-100% |
| 436 | 75-100% | 75-100% | 75-100% | 75-100% | 75-100% | 75-100% |
| 437 | 75-100% | 75-100% | 75-100% | 75-100% | 75-100% | 75-100% |
| 438 | 75-100% | 75-100% | 25-75% | 25-75% | 25-75% | 25-75% |
| 439 | 25-75% | 25-75% | 25-75% | 25-75% | 25-75% | 25-75% |
| 440 | 75-100% | 75-100% | 75-100% | 75-100% | 0-25% | 75-100% |
| 441 | 75-100% | 75-100% | 75-100% | 25-75% | 75-100% | 75-100% |
| 442 | 75-100% | 75-100% | 25-75% | 25-75% | 25-75% | 25-75% |
| 443 | 75-100% | 75-100% | 75-100% | 75-100% | 75-100% | 75-100% |
| 444 | 75-100% | 75-100% | 75-100% | 25-75% | 75-100% | 75-100% |
| 445 | 75-100% | 75-100% | 0-25% | 0-25% | 0-25% | 0-25% |
| 446 | 75-100% | 75-100% | 75-100% | 75-100% | 0-25% | 75-100% |
| 447 | 75-100% | 75-100% | 75-100% | 75-100% | 75-100% | 75-100% |
| 448 | 25-75% | 25-75% | 25-75% | 25-75% | 25-75% | 25-75% |
| 449 | 0-25% | 0-25% | 75-100% | 75-100% | 75-100% | 75-100% |
| 450 | 25-75% | 25-75% | 25-75% | 25-75% | 75-100% | 75-100% |
| 451 | 0-25% | 0-25% | 75-100% | 75-100% | 75-100% | 75-100% |
| 452 | 0-25% | 0-25% | 75-100% | 75-100% | 75-100% | 75-100% |
| 453 | 75-100% | 75-100% | 75-100% | 75-100% | 75-100% | 75-100% |
| 454 | 75-100% | 75-100% | 25-75% | 25-75% | 25-75% | 25-75% |
| 455 | 75-100% | 75-100% | 75-100% | 75-100% | 75-100% | 75-100% |
| 456 | 75-100% | 75-100% | 75-100% | 75-100% | 75-100% | 75-100% |
| 457 | 75-100% | 75-100% | 75-100% | 25-75% | 75-100% | 75-100% |
| 458 | 0-25% | 0-25% | 75-100% | 75-100% | 75-100% | 75-100% |
| 459 | 75-100% | 75-100% | 0-25% | 75-100% | 75-100% | 75-100% |
| 460 | 75-100% | 75-100% | 75-100% | 75-100% | 75-100% | 75-100% |
| 461 | 75-100% | 75-100% | 75-100% | 75-100% | 75-100% | 75-100% |
| 462 | 75-100% | 75-100% | 75-100% | 75-100% | 25-75% | 75-100% |
| 463 | 0-25% | 0-25% | 25-75% | 25-75% | 25-75% | 25-75% |
| 464 | 75-100% | 75-100% | 75-100% | 75-100% | 75-100% | 75-100% |
| 465 | 75-100% | 75-100% | 75-100% | 0-25% | 0-25% | 0-25% |
| 466 | 75-100% | 75-100% | 75-100% | 75-100% | 75-100% | 75-100% |
| 467 | 75-100% | 75-100% | 25-75% | 25-75% | 25-75% | 25-75% |
| 468 | 75-100% | 75-100% | 25-75% | 25-75% | 0-25% | 25-75% |
| 469 | 75-100% | 75-100% | 75-100% | 75-100% | 75-100% | 75-100% |
| 470 | 0-25% | 0-25% | 0-25% | 0-25% | 0-25% | 0-25% |
| 471 | 75-100% | 75-100% | 75-100% | 75-100% | 25-75% | 25-75% |
| 472 | 75-100% | 75-100% | 75-100% | 75-100% | 75-100% | 75-100% |
| 473 | 75-100% | 75-100% | 75-100% | 75-100% | 25-75% | 75-100% |
| 474 | 0-25% | 0-25% | 75-100% | 75-100% | 75-100% | 75-100% |
| 475 | 75-100% | 75-100% | 25-75% | 75-100% | 75-100% | 75-100% |
| 476 | 75-100% | 75-100% | 25-75% | 25-75% | 75-100% | 75-100% |
| 477 | 75-100% | 75-100% | 25-75% | 0-25% | 0-25% | 25-75% |
| 478 | 75-100% | 75-100% | 25-75% | 25-75% | 25-75% | 25-75% |
| 479 | 75-100% | 75-100% | 25-75% | 0-25% | 0-25% | 25-75% |
| 480 | 25-75% | 25-75% | 25-75% | 75-100% | 75-100% | 75-100% |
| 481 | 75-100% | 75-100% | 25-75% | 25-75% | 25-75% | 25-75% |
| 482 | 75-100% | 75-100% | 25-75% | 25-75% | 25-75% | 25-75% |
| 483 | 75-100% | 75-100% | 25-75% | 25-75% | 25-75% | 25-75% |
| 484 | 75-100% | 75-100% | 25-75% | 0-25% | 0-25% | 25-75% |
| 485 | 75-100% | 75-100% | 75-100% | 0-25% | 0-25% | 0-25% |
| 486 | 0-25% | 0-25% | 0-25% | 0-25% | 0-25% | 0-25% |
| 487 | 75-100% | 75-100% | 75-100% | 25-75% | 25-75% | 75-100% |
| 488 | 75-100% | 75-100% | 75-100% | 25-75% | 75-100% | 75-100% |
| 489 | 0-25% | 0-25% | 25-75% | 25-75% | 25-75% | 25-75% |
| 490 | 0-25% | 0-25% | 75-100% | 75-100% | 75-100% | 75-100% |
| 491 | 75-100% | 75-100% | 0-25% | 0-25% | 0-25% | 0-25% |
| 492 | 75-100% | 75-100% | 0-25% | 0-25% | 0-25% | 0-25% |
| 493 | 0-25% | 0-25% | 25-75% | 25-75% | 75-100% | 75-100% |
| 494 | 75-100% | 75-100% | 75-100% | 75-100% | 75-100% | 75-100% |
| 495 | 75-100% | 75-100% | 75-100% | 75-100% | 75-100% | 75-100% |
| 496 | 75-100% | 75-100% | 25-75% | 25-75% | 25-75% | 25-75% |
| 497 | 0-25% | 0-25% | 75-100% | 75-100% | 75-100% | 75-100% |
| 498 | 75-100% | 75-100% | 75-100% | 75-100% | 75-100% | 75-100% |
| 499 | 75-100% | 75-100% | 75-100% | 75-100% | 75-100% | 75-100% |
| 500 | 75-100% | 75-100% | 75-100% | 75-100% | 75-100% | 75-100% |
| 501 | 25-75% | 25-75% | 25-75% | 25-75% | 25-75% | 25-75% |
| 502 | 25-75% | 25-75% | 25-75% | 25-75% | 25-75% | 25-75% |
| 503 | 75-100% | 75-100% | 75-100% | 75-100% | 75-100% | 75-100% |
| 504 | 75-100% | 75-100% | 75-100% | 75-100% | 0-25% | 75-100% |
| 505 | 0-25% | 0-25% | 75-100% | 0-25% | 0-25% | 0-25% |
| 506 | 75-100% | 75-100% | 75-100% | 75-100% | 75-100% | 75-100% |
| 507 | 75-100% | 75-100% | 75-100% | 75-100% | 75-100% | 75-100% |
| 508 | 0-25% | 0-25% | 0-25% | 0-25% | 0-25% | 0-25% |
| 509 | 75-100% | 75-100% | 25-75% | 75-100% | 75-100% | 75-100% |
| 510 | 75-100% | 75-100% | 75-100% | 75-100% | 75-100% | 75-100% |
| 511 | 25-75% | 75-100% | 75-100% | 75-100% | 75-100% | 25-75% |
| 512 | 75-100% | 75-100% | 75-100% | 75-100% | 75-100% | 75-100% |
| 513 | 25-75% | 25-75% | 75-100% | 75-100% | 75-100% | 75-100% |
| 514 | 75-100% | 75-100% | 75-100% | 75-100% | 75-100% | 75-100% |
| 515 | 0-25% | 0-25% | 75-100% | 75-100% | 75-100% | 75-100% |
| 516 | 75-100% | 75-100% | 75-100% | 75-100% | 75-100% | 75-100% |
| 517 | 75-100% | 75-100% | 75-100% | 75-100% | 75-100% | 75-100% |
| 518 | 75-100% | 75-100% | 25-75% | 25-75% | 25-75% | 25-75% |
| 519 | 0-25% | 0-25% | 25-75% | 25-75% | 25-75% | 25-75% |
| 520 | 75-100% | 75-100% | 75-100% | 75-100% | 75-100% | 75-100% |
| 521 | 75-100% | 75-100% | 75-100% | 75-100% | 75-100% | 75-100% |
| 522 | 0-25% | 0-25% | 75-100% | 75-100% | 75-100% | 75-100% |
| 523 | 75-100% | 75-100% | 75-100% | 75-100% | 75-100% | 75-100% |
| 524 | 75-100% | 75-100% | 75-100% | 75-100% | 0-25% | 75-100% |
| 525 | 0-25% | 0-25% | ND | 0-25% | 75-100% | 0-25% |
| 526 | 75-100% | 75-100% | 75-100% | 75-100% | 75-100% | 75-100% |
| 527 | 75-100% | 75-100% | 0-25% | 0-25% | 0-25% | 0-25% |
| 528 | 0-25% | 0-25% | 75-100% | 75-100% | 75-100% | 75-100% |
| 529 | 75-100% | 75-100% | 75-100% | 75-100% | 75-100% | 75-100% |
| 530 | 75-100% | 75-100% | 75-100% | 75-100% | 75-100% | 75-100% |
| 531 | 0-25% | 0-25% | 25-75% | 25-75% | 25-75% | 25-75% |
| 532 | 75-100% | 75-100% | 75-100% | 75-100% | 75-100% | 75-100% |
| 533 | 75-100% | 75-100% | 75-100% | 75-100% | 75-100% | 75-100% |
| 534 | 75-100% | 75-100% | 75-100% | 75-100% | 25-75% | 75-100% |
| 535 | 0-25% | 0-25% | 75-100% | 75-100% | 75-100% | 75-100% |
| 536 | 75-100% | 75-100% | 75-100% | 75-100% | 75-100% | 75-100% |
| 537 | 25-75% | 25-75% | 0-25% | 0-25% | 0-25% | 25-75% |
| 538 | 0-25% | 0-25% | 0-25% | 0-25% | 0-25% | 0-25% |
| 539 | 75-100% | 75-100% | 75-100% | 75-100% | 75-100% | 75-100% |
| 540 | 75-100% | 75-100% | 75-100% | 75-100% | 75-100% | 75-100% |
| 541 | 25-75% | 25-75% | 25-75% | 25-75% | 25-75% | 25-75% |
| 542 | 75-100% | 75-100% | 25-75% | 25-75% | 25-75% | 25-75% |
| 543 | 75-100% | 75-100% | 75-100% | 75-100% | 75-100% | 75-100% |
| 544 | 75-100% | 75-100% | 75-100% | 75-100% | 75-100% | 75-100% |
| 545 | 0-25% | 0-25% | 0-25% | 0-25% | 0-25% | 0-25% |
| 546 | 0-25% | 0-25% | 0-25% | 0-25% | 0-25% | 0-25% |
| 547 | 75-100% | 75-100% | 75-100% | 75-100% | 75-100% | 75-100% |
| 548 | 75-100% | 75-100% | 75-100% | 75-100% | 75-100% | 75-100% |
| 549 | 75-100% | 75-100% | 75-100% | 75-100% | 75-100% | 75-100% |
| 550 | 75-100% | 75-100% | 75-100% | 75-100% | 75-100% | 75-100% |
| 551 | 75-100% | 75-100% | 75-100% | 75-100% | 75-100% | 75-100% |
| 552 | 75-100% | 75-100% | 25-75% | 75-100% | 75-100% | 75-100% |
| 553 | 75-100% | 75-100% | 75-100% | 75-100% | 75-100% | 75-100% |
| 554 | 0-25% | 0-25% | 75-100% | 75-100% | 75-100% | 75-100% |
| 555 | 75-100% | 75-100% | 0-25% | 0-25% | 0-25% | 0-25% |
| 556 | 75-100% | 75-100% | 75-100% | 75-100% | 75-100% | 75-100% |
| 557 | 75-100% | 75-100% | 25-75% | 25-75% | 25-75% | 25-75% |
| 558 | 75-100% | 75-100% | 0-25% | 0-25% | 0-25% | 0-25% |
| 559 | 75-100% | 75-100% | 75-100% | 75-100% | 75-100% | 75-100% |
| 560 | 75-100% | 75-100% | 75-100% | 75-100% | 75-100% | 75-100% |
| 561 | 75-100% | 75-100% | 75-100% | 75-100% | 75-100% | 25-75% |
| 562 | 0-25% | 0-25% | 75-100% | 75-100% | 75-100% | 75-100% |
| 563 | 75-100% | 75-100% | 75-100% | 75-100% | 25-75% | 75-100% |
| 564 | 25-75% | 25-75% | 25-75% | 25-75% | 75-100% | 25-75% |
| 565 | 75-100% | 75-100% | 75-100% | 75-100% | 75-100% | 75-100% |
| 566 | 75-100% | 75-100% | ND | 25-75% | 0-25% | 25-75% |
| 567 | 75-100% | 75-100% | 75-100% | 75-100% | 25-75% | 75-100% |
| 568 | 0-25% | 0-25% | 0-25% | 0-25% | 0-25% | 0-25% |
| 569 | 75-100% | 75-100% | 75-100% | 75-100% | 0-25% | 25-75% |
| 570 | 75-100% | 75-100% | 75-100% | 75-100% | 75-100% | 75-100% |
| 571 | 75-100% | 75-100% | 25-75% | 25-75% | 25-75% | 25-75% |
| 572 | 25-75% | 25-75% | 25-75% | 25-75% | 75-100% | 25-75% |
| 573 | 75-100% | 75-100% | 75-100% | 75-100% | 75-100% | 75-100% |
| 574 | 0-25% | 0-25% | 75-100% | 75-100% | 75-100% | 75-100% |
| 575 | 75-100% | 75-100% | 75-100% | 75-100% | 75-100% | 75-100% |
| 576 | 0-25% | 0-25% | 0-25% | 0-25% | 75-100% | 0-25% |
| 577 | 75-100% | 75-100% | ND | 75-100% | 75-100% | 75-100% |
| 578 | 75-100% | 75-100% | 75-100% | 75-100% | 75-100% | 75-100% |
| 579 | 0-25% | 0-25% | 0-25% | 0-25% | 0-25% | 25-75% |
| 580 | 75-100% | 75-100% | 75-100% | 75-100% | 0-25% | 75-100% |
| 581 | 75-100% | 75-100% | 75-100% | 75-100% | 75-100% | 75-100% |
| 582 | 75-100% | 75-100% | 75-100% | 75-100% | 75-100% | 75-100% |
| 583 | 75-100% | 75-100% | 75-100% | 75-100% | 75-100% | 75-100% |
| 584 | 0-25% | 0-25% | 0-25% | 0-25% | 75-100% | 0-25% |
| 585 | 75-100% | 75-100% | 75-100% | 75-100% | 75-100% | 75-100% |
| 586 | 75-100% | 75-100% | 75-100% | 75-100% | 0-25% | 75-100% |
| 587 | 75-100% | 75-100% | 75-100% | 75-100% | 75-100% | 75-100% |
| 588 | 75-100% | 75-100% | 25-75% | 0-25% | 0-25% | 25-75% |
| 589 | 0-25% | 0-25% | 0-25% | 0-25% | 0-25% | 0-25% |
| 590 | 25-75% | 25-75% | 0-25% | 0-25% | 0-25% | 25-75% |
| 591 | 0-25% | 0-25% | 0-25% | 0-25% | 0-25% | 0-25% |
| 592 | 75-100% | 75-100% | 75-100% | 75-100% | 75-100% | 75-100% |
| 593 | 75-100% | 75-100% | 25-75% | 0-25% | 0-25% | 25-75% |
| 594 | 75-100% | 75-100% | 75-100% | 75-100% | 0-25% | 75-100% |
| 595 | 75-100% | 75-100% | 75-100% | 75-100% | 75-100% | 25-75% |
| 596 | 75-100% | 75-100% | 75-100% | 25-75% | 0-25% | 75-100% |
| 597 | 75-100% | 75-100% | 0-25% | 0-25% | 0-25% | 0-25% |
| 598 | 0-25% | 0-25% | 75-100% | 75-100% | 75-100% | 75-100% |
| 599 | 75-100% | 75-100% | 75-100% | 75-100% | 25-75% | 75-100% |
| 600 | 75-100% | 75-100% | 75-100% | 75-100% | 75-100% | 75-100% |
| 601 | 75-100% | 75-100% | 75-100% | 75-100% | 25-75% | 75-100% |
| 602 | 75-100% | 75-100% | 75-100% | 75-100% | 75-100% | 75-100% |
| 603 | 25-75% | 75-100% | 75-100% | 75-100% | 75-100% | 75-100% |
| 604 | 75-100% | 75-100% | 75-100% | 75-100% | 75-100% | 75-100% |
| 605 | 75-100% | 75-100% | 75-100% | 75-100% | 75-100% | 75-100% |
| 606 | 75-100% | 75-100% | 75-100% | 75-100% | 75-100% | 75-100% |
| 607 | 0-25% | 0-25% | 75-100% | 75-100% | 75-100% | 75-100% |
| 608 | 75-100% | 75-100% | 75-100% | 75-100% | 75-100% | 75-100% |
| 609 | 75-100% | ND | ND | ND | 0-25% | 75-100% |
| 610 | 75-100% | 75-100% | 75-100% | 75-100% | 0-25% | 75-100% |
| 611 | 75-100% | 75-100% | 75-100% | 75-100% | 0-25% | 75-100% |
| 612 | 75-100% | 75-100% | 75-100% | 25-75% | 75-100% | 75-100% |
| 613 | 0-25% | 0-25% | 0-25% | 0-25% | 0-25% | 0-25% |
| 614 | 25-75% | 25-75% | 25-75% | 25-75% | 25-75% | 25-75% |
| 615 | 75-100% | 75-100% | 75-100% | 75-100% | 75-100% | 25-75% |
| 616 | 25-75% | 25-75% | 25-75% | 25-75% | 25-75% | 25-75% |
| 617 | 75-100% | 75-100% | 75-100% | 75-100% | 0-25% | 75-100% |
| 618 | 75-100% | 75-100% | 75-100% | 75-100% | 75-100% | 75-100% |
| 619 | 0-25% | 0-25% | 0-25% | 0-25% | 0-25% | 75-100% |
| 620 | 75-100% | 75-100% | 75-100% | 75-100% | 75-100% | 75-100% |
| 621 | 75-100% | 75-100% | 75-100% | 25-75% | 75-100% | 75-100% |
| 622 | 75-100% | 75-100% | 75-100% | 25-75% | 25-75% | 25-75% |
| 623 | 0-25% | 0-25% | 0-25% | 0-25% | 0-25% | 0-25% |
| 624 | 75-100% | 75-100% | 75-100% | 25-75% | 75-100% | 75-100% |
| 625 | 75-100% | 75-100% | 75-100% | 75-100% | 75-100% | 75-100% |
| 626 | 75-100% | 75-100% | 25-75% | 25-75% | 0-25% | 75-100% |
| 627 | 75-100% | 75-100% | 75-100% | 75-100% | 75-100% | 75-100% |
| 628 | 75-100% | 75-100% | 75-100% | 75-100% | 75-100% | 75-100% |
| 629 | 25-75% | 25-75% | 25-75% | 25-75% | 25-75% | 25-75% |
| 630 | 75-100% | 75-100% | 75-100% | 75-100% | 25-75% | 75-100% |
| 631 | 75-100% | 75-100% | 75-100% | 75-100% | 0-25% | 75-100% |
| 632 | 75-100% | 75-100% | 25-75% | 25-75% | 25-75% | 25-75% |
| 633 | 0-25% | 0-25% | 0-25% | 0-25% | 0-25% | 0-25% |
| 634 | 75-100% | 25-75% | 25-75% | 25-75% | 25-75% | 25-75% |
| 635 | 75-100% | 75-100% | 75-100% | 75-100% | 75-100% | 75-100% |
| 636 | 75-100% | 75-100% | 75-100% | 75-100% | 25-75% | 75-100% |
| 637 | 25-75% | 0-25% | 0-25% | 0-25% | 0-25% | 0-25% |
| 638 | 75-100% | 75-100% | 75-100% | 75-100% | 25-75% | 75-100% |
| 639 | 25-75% | 25-75% | 75%-100% | 75-100% | 0-25% | 75-100% |
| 640 | 75-100% | 75-100% | 75-100% | 75-100% | 25-75% | 75-100% |
| 641 | 75-100% | 75-100% | 75-100% | 75-100% | 0-25% | 75-100% |
| 642 | 75-100% | 75-100% | 75-100% | 75-100% | 0-25% | 75-100% |
| 643 | 75-100% | 75-100% | 75-100% | 75-100% | 0-25% | 75-100% |
| 644 | 75-100% | 75-100% | 75-100% | 75-100% | 75-100% | 75-100% |
| 645 | 75-100% | 75-100% | 75-100% | 75-100% | 0-25% | 75-100% |
| 646 | 75-100% | 75-100% | 75-100% | 75-100% | 25-75% | 75-100% |
| 647 | 75-100% | 75-100% | 75-100% | 25-75% | 0-25% | 75-100% |
| 648 | 25-75% | 25-75% | 75-100% | 75-100% | 0-25% | 75-100% |
| 649 | 75-100% | 75-100% | 75-100% | 75-100% | 75-100% | 75-100% |
| 650 | 75-100% | 75-100% | 75-100% | 25-75% | 25-75% | 25-75% |
| 651 | 75-100% | 75-100% | 25-75% | 25-75% | 25-75% | 25-75% |
| 652 | 25-75% | 75-100% | 75-100% | 75-100% | 75-100% | 75-100% |
| 653 | 75-100% | 75-100% | 75-100% | 75-100% | 0-25% | 75-100% |
| 654 | 75-100% | 75-100% | 75-100% | 25-75% | 75-100% | 75-100% |
| 655 | 75-100% | 75-100% | 75-100% | 75-100% | 0-25% | 75-100% |
| 656 | 75-100% | 75-100% | 75-100% | 75-100% | 75-100% | 75-100% |
| 657 | 75-100% | 75-100% | 75-100% | 75-100% | 75-100% | 75-100% |
| 658 | 75-100% | 75-100% | 75-100% | 25-75% | 75-100% | 75-100% |
| 659 | 75-100% | 75-100% | 25-75% | 25-75% | 25-75% | 25-75% |
| 660 | 75-100% | 75-100% | 75-100% | 75-100% | 25-75% | 75-100% |
| 661 | 75-100% | 75-100% | 75-100% | 75-100% | 75-100% | 75-100% |
| 662 | 75-100% | 75-100% | 75-100% | 75-100% | 75-100% | 75-100% |
| 663 | 75-100% | 75-100% | 75-100% | 75-100% | 75-100% | 75-100% |
| 664 | 75-100% | 75-100% | 75-100% | 75-100% | 75-100% | 75-100% |
| 665 | 75-100% | 75-100% | 75-100% | ND | 25-75% | 25-75% |
| 666 | 75-100% | 75-100% | 75-100% | 75-100% | 75-100% | 75-100% |
| 667 | 75-100% | 75-100% | 75-100% | 75-100% | 75-100% | 75-100% |
| 668 | 75-100% | 75-100% | 75-100% | 75-100% | 75-100% | 75-100% |
| 669 | 75-100% | 75-100% | 25-75% | 25-75% | 0-25% | 0-25% |
| 670 | 75-100% | 75-100% | 75-100% | 75-100% | 75-100% | 75-100% |
| 671 | 75-100% | 75-100% | 75-100% | 75-100% | 75-100% | 75-100% |
| 672 | 75-100% | 75-100% | 75-100% | 75-100% | 75-100% | 75-100% |
| 673 | 75-100% | 75-100% | 25-75% | 25-75% | 25-75% | 25-75% |
| 674 | 75-100% | 75-100% | 75-100% | 75-100% | 75-100% | 75-100% |
| 675 | 75-100% | 75-100% | 25-75% | 25-75% | 25-75% | 25-75% |
| 676 | 75-100% | 75-100% | 0-25% | 0-25% | 0-25% | 0-25% |
| 677 | 0-25% | 0-25% | 0-25% | 0-25% | 0-25% | 0-25% |
| 678 | 75-100% | 75-100% | 75-100% | 25-75% | 75-100% | 75-100% |
| 679 | 0-25% | 0-25% | 0-25% | 75-100% | 75-100% | 75-100% |
| 680 | 25-75% | 25-75% | 25-75% | 25-75% | 25-75% | 25-75% |
| 681 | 0-25% | 0-25% | 0-25% | 0-25% | 0-25% | 0-25% |
| 682 | 75-100% | 75-100% | 0-25% | 0-25% | 0-25% | 25-75% |
| 683 | 0-25% | 0-25% | 75-100% | 75-100% | 75-100% | 75-100% |
| 684 | 0-25% | 0-25% | 0-25% | 0-25% | 0-25% | 0-25% |
| 685 | 75-100% | 75-100% | 25-75% | 25-75% | 25-75% | 25-75% |
| 686 | 75-100% | 75-100% | 75-100% | 75-100% | 75-100% | 75-100% |
| 687 | 25-75% | 25-75% | 25-75% | 25-75% | 25-75% | 25-75% |
| 688 | 25-75% | 25-75% | 25-75% | 25-75% | 0-25% | 25-75% |
| 689 | 75-100% | 75-100% | 75-100% | 75-100% | 75-100% | 75-100% |
| 690 | 75-100% | 75-100% | 75-100% | 25-75% | 0-25% | 75-100% |
| 691 | 75-100% | 75-100% | 0-25% | 0-25% | 0-25% | 0-25% |
| 692 | 75-100% | 75-100% | 75-100% | 75-100% | 75-100% | 75-100% |
| 693 | 75-100% | 75-100% | 75-100% | 75-100% | 75-100% | 75-100% |
| 694 | 75-100% | 75-100% | 75-100% | 75-100% | 75-100% | 75-100% |
| 695 | 0-25% | 0-25% | 25-75% | 75-100% | 75-100% | 75-100% |
| 696 | 25-75% | 25-75% | 25-75% | 25-75% | 25-75% | 0-25% |
| 697 | 0-25% | 0-25% | 75-100% | 75-100% | 75-100% | 75-100% |
| 698 | 75-100% | 75-100% | 75-100% | 75-100% | 75-100% | 25-75% |
| 699 | 75-100% | 75-100% | ND | ND | 25-75% | 75-100% |
| 700 | 0-25% | 0-25% | 0-25% | 0-25% | 0-25% | 75-100% |
| 701 | 0-25% | 0-25% | 75-100% | 75-100% | 75-100% | 75-100% |
| 702 | 75-100% | 75-100% | 75-100% | 75-100% | 75-100% | 75-100% |
| 703 | 25-75% | 25-75% | 75-100% | 75-100% | 75-100% | 75-100% |
| 704 | 75-100% | 75-100% | 25-75% | 25-75% | 25-75% | 25-75% |
| 705 | 75-100% | 75-100% | 75-100% | 75-100% | 75-100% | 75-100% |
| 706 | 25-75% | 75-100% | 25-75% | 25-75% | 25-75% | 25-75% |
| 707 | 75-100% | 75-100% | 75-100% | 75-100% | 75-100% | 75-100% |
| 708 | 75-100% | 75-100% | 75-100% | 75-100% | 0-25% | 75-100% |
| 709 | 75-100% | 75-100% | 75-100% | 75-100% | 0-25% | 75-100% |
| 710 | 0-25% | 0-25% | 25-75% | 25-75% | 75-100% | 75-100% |
| 711 | 75-100% | 75-100% | 75-100% | 75-100% | 75-100% | 75-100% |
| 712 | 75-100% | 25-75% | 25-75% | 75-100% | 75-100% | 75-100% |
| SEQ | | | | | | |
| ID | | | | | | |
| NO: | | | | | Skeletal | |
| Genomic | Keratinocyte | Liver | Melanocyte | Placenta | Muscle | Sperm |
| 413 | 75-100% | 75-100% | 75-100% | 75-100% | 75-100% | 0-25% |
| 414 | 75-100% | 75-100% | 75-100% | 75-100% | 75-100% | 0-25% |
| 415 | 75-100% | 25-75% | 75-100% | 75-100% | 75-100% | 75-100% |
| 416 | 0-25% | 0-25% | 0-25% | 0-25% | 0-25% | 0-25% |
| 417 | 75-100% | 75-100% | 75-100% | 75-100% | 75-100% | 75-100% |
| 418 | 75-100% | 75-100% | 0-25% | 75-100% | 75-100% | 75-100% |
| 419 | 75-100% | 75-100% | 75-100% | 0-25% | 75-100% | 0-25% |
| 420 | 75-100% | 75-100% | 75-100% | 75-100% | 0-25% | 75-100% |
| 421 | 75-100% | 75-100% | 75-100% | 75-100% | 75-100% | 0-25% |
| 422 | 75-100% | 25-75% | 75-100% | 25-75% | 25-75% | 0-25% |
| 423 | 0-25% | 0-25% | 75-100% | 0-25% | 0-25% | 75-100% |
| 424 | 75-100% | 75-100% | 75-100% | 25-75% | 25-75% | 75-100% |
| 425 | 25-75% | 75-100% | 75-100% | 25-75% | 25-75% | 75-100% |
| 426 | 0-25% | 0-25% | 0-25% | 0-25% | 0-25% | 0-25% |
| 427 | 75-100% | 25-75% | 75-100% | 75-100% | 75-100% | 0-25% |
| 428 | 75-100% | 75-100% | 75-100% | 75-100% | 75-100% | 0-25% |
| 429 | 25-75% | 0-25% | 0-25% | 75-100% | 75-100% | 0-25% |
| 430 | 75-100% | 75-100% | 75-100% | 75-100% | 75-100% | 75-100% |
| 431 | 75-100% | 75-100% | 75-100% | 75-100% | 75-100% | 0-25% |
| 432 | 75-100% | 75-100% | 75-100% | 75-100% | 25-75% | 75-100% |
| 433 | 25-75% | 75-100% | 75-100% | 75-100% | 75-100% | 75-100% |
| 434 | 75-100% | 25-75% | 75-100% | 75-100% | 75-100% | 0-25% |
| 435 | 25-75% | 75-100% | 75-100% | 75-100% | 75-100% | 0-25% |
| 436 | 75-100% | 75-100% | 75-100% | 25-75% | 75-100% | 75-100% |
| 437 | 75-100% | 75-100% | 75-100% | 75-100% | 75-100% | 0-25% |
| 438 | 25-75% | 25-75% | 25-75% | 25-75% | 25-75% | 0-25% |
| 439 | 75-100% | 25-75% | 25-75% | 25-75% | 25-75% | 25-75% |
| 440 | 75-100% | 75-100% | 75-100% | 75-100% | 25-75% | 75-100% |
| 441 | 75-100% | 75-100% | ND | 75-100% | 25-75% | 75-100% |
| 442 | 25-75% | 25-75% | 25-75% | 25-75% | 25-75% | 75-100% |
| 443 | 75-100% | 75-100% | 0-25% | 75-100% | 75-100% | 75-100% |
| 444 | 75-100% | 75-100% | 75-100% | 75-100% | 75-100% | 75-100% |
| 445 | 0-25% | 0-25% | 0-25% | 0-25% | 0-25% | 0-25% |
| 446 | 75-100% | 75-100% | 75-100% | 75-100% | 75-100% | 75-100% |
| 447 | 0-25% | 75-100% | 75-100% | 75-100% | 75-100% | 75-100% |
| 448 | 25-75% | 75-100% | 25-75% | 25-75% | 25-75% | 75-100% |
| 449 | 75-100% | 75-100% | 75-100% | 75-100% | 75-100% | 75-100% |
| 450 | 0-25% | 25-75% | 75-100% | 25-75% | 25-75% | ND |
| 451 | 75-100% | 75-100% | 75-100% | 75-100% | 75-100% | 75-100% |
| 452 | 75-100% | 75-100% | 75-100% | 75-100% | 75-100% | 75-100% |
| 453 | 75-100% | 75-100% | 75-100% | 75-100% | 0-25% | 0-25% |
| 454 | 0-25% | 75-100% | 75-100% | 75-100% | 25-75% | 75-100% |
| 455 | 75-100% | 75-100% | 0-25% | 75-100% | 75-100% | 75-100% |
| 456 | 75-100% | 25-75% | 75-100% | 75-100% | 75-100% | 75-100% |
| 457 | 75-100% | 25-75% | 75-100% | 75-100% | 75-100% | 75-100% |
| 458 | 75-100% | 75-100% | 75-100% | 75-100% | 75-100% | 75-100% |
| 459 | 75-100% | 75-100% | 75-100% | 75-100% | 75-100% | 75-100% |
| 460 | 0-25% | 75-100% | 75-100% | 75-100% | 75-100% | 75-100% |
| 461 | 0-25% | 75-100% | 75-100% | 75-100% | 75-100% | 75-100% |
| 462 | 0-25% | 75-100% | 75-100% | 75-100% | 25-75% | 75-100% |
| 463 | 0-25% | 25-75% | 25-75% | 25-75% | 25-75% | 75-100% |
| 464 | 75-100% | 75-100% | 75-100% | 75-100% | 75-100% | 0-25% |
| 465 | 0-25% | 0-25% | 0-25% | 0-25% | 0-25% | 75-100% |
| 466 | 75-100% | 75-100% | 75-100% | 75-100% | 25-75% | 75-100% |
| 467 | 25-75% | 25-75% | 25-75% | 25-75% | 25-75% | 75-100% |
| 468 | 0-25% | 25-75% | 25-75% | 25-75% | 25-75% | 75-100% |
| 469 | 75-100% | 75-100% | 75-100% | 75-100% | 25-75% | 75-100% |
| 470 | 0-25% | 0-25% | 0-25% | 0-25% | 0-25% | 75-100% |
| 471 | 75-100% | 75-100% | 25-75% | 75-100% | 75-100% | 75-100% |
| 472 | 75-100% | 75-100% | 75-100% | 75-100% | 25-75% | 75-100% |
| 473 | 75-100% | 75-100% | 75-100% | 75-100% | 75-100% | 75-100% |
| 474 | 75-100% | 75-100% | 75-100% | 75-100% | 75-100% | 75-100% |
| 475 | 75-100% | 75-100% | 75-100% | 75-100% | 75-100% | 75-100% |
| 476 | 75-100% | 75-100% | 75-100% | 75-100% | 75-100% | 75-100% |
| 477 | 0-25% | 25-75% | 0-25% | 25-75% | 25-75% | 75-100% |
| 478 | 25-75% | 25-75% | 0-25% | 25-75% | 25-75% | 75-100% |
| 479 | 0-25% | 25-75% | 0-25% | 0-25% | 75-100% | 75-100% |
| 480 | 75-100% | 75-100% | 75-100% | 75-100% | 75-100% | 75-100% |
| 481 | 25-75% | 25-75% | 25-75% | 25-75% | 25-75% | 75-100% |
| 482 | 25-75% | 25-75% | 25-75% | 25-75% | 25-75% | 75-100% |
| 483 | 25-75% | 25-75% | 25-75% | 25-75% | 25-75% | 75-100% |
| 484 | 0-25% | 25-75% | 0-25% | 0-25% | 0-25% | 75-100% |
| 485 | 0-25% | 0-25% | 0-25% | 0-25% | 0-25% | 75-100% |
| 486 | 0-25% | 0-25% | 0-25% | 0-25% | 0-25% | 75-100% |
| 487 | 75-100% | 75-100% | 0-25% | 25-75% | 75-100% | 75-100% |
| 488 | 75-100% | 75-100% | 0-25% | 25-75% | 25-75% | 75-100% |
| 489 | 25-75% | 25-75% | 25-75% | 25-75% | 25-75% | 75-100% |
| 490 | 75-100% | 75-100% | 75-100% | 75-100% | 75-100% | 75-100% |
| 491 | 0-25% | 0-25% | 0-25% | 0-25% | 0-25% | 75-100% |
| 492 | 0-25% | 0-25% | 0-25% | 0-25% | 0-25% | 75-100% |
| 493 | 75-100% | 75-100% | 75-100% | 75-100% | 25-75% | 75-100% |
| 494 | 0-25% | 75-100% | 75-100% | 75-100% | 75-100% | 0-25% |
| 495 | 0-25% | 75-100% | 75-100% | 75-100% | 75-100% | 75-100% |
| 496 | 25-75% | 25-75% | 0-25% | 25-75% | 25-75% | 0-25% |
| 497 | 75-100% | 75-100% | 75-100% | 75-100% | 75-100% | 75-100% |
| 498 | 75-100% | 75-100% | 75-100% | 75-100% | 0-25% | 75-100% |
| 499 | 0-25% | 75-100% | 75-100% | 75-100% | 75-100% | 75-100% |
| 500 | 75-100% | 75-100% | 75-100% | 75-100% | 25-75% | 75-100% |
| 501 | 75-100% | 25-75% | 25-75% | 25-75% | 25-75% | 0-25% |
| 502 | 25-75% | 25-75% | 25-75% | 25-75% | 75-100% | 0-25% |
| 503 | 75-100% | 25-75% | 75-100% | 75-100% | 75-100% | 75-100% |
| 504 | 75-100% | 75-100% | 75-100% | 75-100% | 75-100% | 75-100% |
| 505 | 0-25% | 75-100% | 0-25% | 0-25% | 0-25% | ND |
| 506 | 0-25% | 75-100% | 75-100% | 75-100% | 75-100% | 75-100% |
| 507 | 75-100% | 75-100% | 75-100% | 75-100% | 75-100% | 0-25% |
| 508 | 0-25% | 75-100% | 0-25% | 0-25% | 0-25% | ND |
| 509 | 75-100% | 75-100% | 75-100% | 75-100% | 75-100% | 0-25% |
| 510 | 75-100% | 75-100% | 75-100% | 75-100% | 75-100% | 0-25% |
| 511 | 75-100% | 75-100% | 75-100% | 75-100% | 75-100% | 75-100% |
| 512 | 0-25% | 75-100% | 75-100% | 25-75% | 25-75% | 75-100% |
| 513 | 75-100% | 75-100% | 75-100% | 75-100% | 75-100% | 75-100% |
| 514 | 75-100% | 75-100% | 75-100% | 75-100% | 25-75% | 75-100% |
| 515 | 75-100% | 75-100% | 75-100% | 75-100% | 75-100% | 75-100% |
| 516 | 0-25% | 75-100% | 75-100% | 75-100% | 75-100% | 75-100% |
| 517 | 75-100% | 75-100% | 75-100% | 75-100% | 25-75% | 75-100% |
| 518 | 25-75% | 25-75% | 25-75% | 25-75% | 25-75% | 25-75% |
| 519 | 25-75% | 0-25% | 25-75% | 25-75% | 75-100% | 0-25% |
| 520 | 0-25% | 75-100% | 75-100% | 75-100% | 75-100% | 75-100% |
| 521 | 0-25% | 75-100% | 75-100% | 75-100% | 75-100% | 0-25% |
| 522 | 75-100% | 75-100% | 75-100% | 75-100% | 75-100% | 0-25% |
| 523 | 75-100% | 75-100% | 25-75% | 75-100% | 75-100% | 75-100% |
| 524 | 75-100% | 75-100% | 75-100% | 75-100% | 25-75% | 75-100% |
| 525 | 0-25% | 0-25% | 75-100% | 75-100% | 75-100% | 75-100% |
| 526 | 0-25% | 75-100% | 75-100% | 75-100% | 75-100% | 75-100% |
| 527 | 0-25% | 0-25% | 0-25% | 0-25% | 0-25% | 75-100% |
| 528 | 75-100% | 75-100% | 75-100% | 75-100% | 75-100% | 75-100% |
| 529 | 75-100% | 25-75% | 75-100% | 75-100% | 75-100% | 75-100% |
| 530 | 75-100% | 75-100% | 75-100% | 75-100% | 25-75% | 75-100% |
| 531 | 25-75% | 25-75% | 25-75% | 25-75% | 25-75% | 75-100% |
| 532 | 0-25% | 75-100% | 75-100% | 75-100% | 75-100% | 0-25% |
| 533 | 0-25% | 75-100% | 75-100% | 75-100% | 75-100% | 75-100% |
| 534 | 75-100% | 75-100% | 75-100% | 75-100% | 75-100% | 75-100% |
| 535 | 75-100% | 75-100% | ND | 75-100% | 75-100% | 75-100% |
| 536 | 0-25% | 75-100% | 75-100% | 75-100% | 75-100% | 75-100% |
| 537 | 0-25% | 75-100% | 0-25% | 0-25% | 0-25% | 75-100% |
| 538 | 0-25% | 0-25% | 0-25% | 25-75% | 0-25% | 0-25% |
| 539 | 0-25% | 75-100% | 75-100% | 75-100% | 75-100% | 75-100% |
| 540 | 75-100% | 0-25% | 75-100% | 75-100% | 75-100% | 75-100% |
| 541 | 0-25% | 25-75% | 25-75% | 25-75% | 25-75% | 0-25% |
| 542 | 0-25% | 25-75% | 25-75% | 25-75% | 25-75% | 0-25% |
| 543 | 75-100% | 75-100% | 75-100% | 75-100% | 75-100% | 0-25% |
| 544 | 75-100% | 75-100% | 75-100% | 75-100% | 25-75% | 75-100% |
| 545 | 0-25% | 0-25% | 25-75% | ND | 0-25% | 10-25% |
| 546 | 0-25% | 75-100% | 25-75% | 0-25% | 0-25% | 75-100% |
| 547 | 75-100% | 75-100% | 75-100% | 75-100% | 25-75% | 75-100% |
| 548 | 75-100% | 25-75% | 75-100% | 75-100% | 75-100% | 75-100% |
| 549 | 25-75% | 75-100% | 75-100% | 75-100% | 75-100% | 75-100% |
| 550 | 0-25% | 75-100% | 75-100% | 75-100% | 75-100% | 75-100% |
| 551 | 0-25% | 75-100% | 75-100% | 75-100% | 75-100% | 75-100% |
| 552 | 75-100% | 75-100% | 75-100% | 75-100% | 75-100% | 75-100% |
| 553 | 75-100% | 25-75% | 75-100% | 75-100% | 75-100% | |
| 554 | 75-100% | 25-75% | 75-100% | 75-100% | 75-100% | 75-100% |
| 555 | 0-25% | 0-25% | 0-25% | 0-25% | 0-25% | 0-25% |
| 556 | 0-25% | 25-75% | 75-100% | 75-100% | 75-100% | 75-100% |
| 557 | 25-75% | 25-75% | 25-75% | 25-75% | 25-75% | 75-100% |
| 558 | 0-25% | 0-25% | 0-25% | 0-25% | 0-25% | 75-100% |
| 559 | 0-25% | 75-100% | 75-100% | 75-100% | 75-100% | 75-100% |
| 560 | 75-100% | 75-100% | 75-100% | 75-100% | 75-100% | 0-25% |
| 561 | 0-25% | 25-75% | 25-75% | 25-75% | 25-75% | 75-100% |
| 562 | 75-100% | 75-100% | 75-100% | 75-100% | 75-100% | 75-100% |
| 563 | 75-100% | 75-100% | 75-100% | 75-100% | 75-100% | 75-100% |
| 564 | 0-25% | 75-100% | 75-100% | 75-100% | 25-75% | 75-100% |
| 565 | 0-25% | 75-100% | 75-100% | 75-100% | 75-100% | 0-25% |
| 566 | 0-25% | 25-75% | 25-75% | 25-75% | 25-75% | ND |
| 567 | 75-100% | 75-100% | 75-100% | 75-100% | 75-100% | 75-100% |
| 568 | 0-25% | 25-75% | 0-25% | 0-25% | 0-25% | 0-25% |
| 569 | 75-100% | 75-100% | 75-100% | 75-100% | 25-75% | 75-100% |
| 570 | 0-25% | 75-100% | 75-100% | 75-100% | 75-100% | 0-25% |
| 571 | 0-25% | 25-75% | 25-75% | 25-75% | 25-75% | 75-100% |
| 572 | 75-100% | 25-75% | 75-100% | 25-75% | 25-75% | 75-100% |
| 573 | 75-100% | 75-100% | 75-100% | 75-100% | 25-75% | 0-25% |
| 574 | 75-100% | 75-100% | 75-100% | 75-100% | 75-100% | 75-100% |
| 575 | 0-25% | 75-100% | 75-100% | 75-100% | 75-100% | 75-100% |
| 576 | 75-100% | 0-25% | 75-100% | 0-25% | 0-25% | 0-25% |
| 577 | 75-100% | 75-100% | 75-100% | 75-100% | 25-75% | 75-100% |
| 578 | 75-100% | 75-100% | 75-100% | 75-100% | 75-100% | 0-25% |
| 579 | 0-25% | 0-25% | 0-25% | 0-25% | 0-25% | 0-25% |
| 580 | 75-100% | 75-100% | 75-100% | 75-100% | 25-75% | 0-25% |
| 581 | 75-100% | 75-100% | 75-100% | 75-100% | 75-100% | 0-25% |
| 582 | 75-100% | 25-75% | 75-100% | 75-100% | 75-100% | 75-100% |
| 583 | 75-100% | 25-75% | 75-100% | 75-100% | 75-100% | 75-100% |
| 584 | 0-25% | 0-25% | 0-25% | 0-25% | 25-75% | 75-100% |
| 585 | 75-100% | 75-100% | 75-100% | 75-100% | 25-75% | 75-100% |
| 586 | 75-100% | 75-100% | 75-100% | 75-100% | 75-100% | 75-100% |
| 587 | 0-25% | 75-100% | 75-100% | 75-100% | 75-100% | 75-100% |
| 588 | 0-25% | 25-75% | 0-25% | 0-25% | 0-25% | 0-25% |
| 589 | 75-100% | 0-25% | 0-25% | 0-25% | 0-25% | 0-25% |
| 590 | 0-25% | 75-100% | 75-100% | 0-25% | 0-25% | 0-25% |
| 591 | 0-25% | 75-100% | 0-25% | 0-25% | 0-25% | 0-25% |
| 592 | 0-25% | 75-100% | 75-100% | 75-100% | 25-75% | 75-100% |
| 593 | 25-75% | 25-75% | 25-75% | 0-25% | 0-25% | 0-25% |
| 594 | 75-100% | 75-100% | 75-100% | 75-100% | 25-75% | 75-100% |
| 595 | 75-100% | 75-100% | 75-100% | 75-100% | 75-100% | 75-100% |
| 596 | 75-100% | 75-100% | 0-25% | 25-75% | 75-100% | 75-100% |
| 597 | 0-25% | 0-25% | 0-25% | 0-25% | 0-25% | 75-100% |
| 598 | 75-100% | 75-100% | 75-100% | 75-100% | 75-100% | 75-100% |
| 599 | 75-100% | 25-75% | 75-100% | 75-100% | 25-75% | 75-100% |
| 600 | 0-25% | 75-100% | 75-100% | 75-100% | 25-75% | 75-100% |
| 601 | 75-100% | 75-100% | 75-100% | 75-100% | 75-100% | 75-100% |
| 602 | 0-25% | 75-100% | 75-100% | 75-100% | 75-100% | 75-100% |
| 603 | 0-25% | 75-100% | 75-100% | 75-100% | 75-100% | 75-100% |
| 604 | 25-75% | 75-100% | 75-100% | 75-100% | 75-100% | 75-100% |
| 605 | 25-75% | 75-100% | 75-100% | 75-100% | 75-100% | 75-100% |
| 606 | 75-100% | 25-75% | 75-100% | 75-100% | 75-100% | 75-100% |
| 607 | 75-100% | 75-100% | 75-100% | 75-100% | 75-100% | 75-100% |
| 608 | 0-25% | 75-100% | 75-100% | 75-100% | 75-100% | 75-100% |
| 609 | 75-100% | 75-100% | 0-25% | 0-25% | 75-100% | 75-100% |
| 610 | 75-100% | 75-100% | 75-100% | 75-100% | 75-100% | 75-100% |
| 611 | 75-100% | 75-100% | 75-100% | 75-100% | 75-100% | 75-100% |
| 612 | 75-100% | 75-100% | 75-100% | 75-100% | 25-75% | 75-100% |
| 613 | 75-100% | 75-100% | 0-25% | 0-25% | 0-25% | ND |
| 614 | 75-100% | 25-75% | 25-75% | 25-75% | 25-75% | 75-100% |
| 615 | 75-100% | 75-100% | 75-100% | 75-100% | 75-100% | 75-100% |
| 616 | 25-75% | 75-100% | 25-75% | 25-75% | 25-75% | 75-100% |
| 617 | 75-100% | 75-100% | 75-100% | 75-100% | 25-75% | 75-100% |
| 618 | 75-100% | 75-100% | 0-25% | 75-100% | 75-100% | 75-100% |
| 619 | 0-25% | 0-25% | 0-25% | 0-25% | 0-25% | 75-100% |
| 620 | 75-100% | 25-75% | 75-100% | 75-100% | 75-100% | 75-100% |
| 621 | 75-100% | 75-100% | 75-100% | 75-100% | 25-75% | 75-100% |
| 622 | 25-75% | 75-100% | 75-100% | 75-100% | 0-25% | 75-100% |
| 623 | 0-25% | 0-25% | 0-25% | 0-25% | 0-25% | 75-100% |
| 624 | 75-100% | 75-100% | 75-100% | 75-100% | 25-75% | 75-100% |
| 625 | 0-25% | 75-100% | 75-100% | 75-100% | 75-100% | 75-100% |
| 626 | 75-100% | 75-100% | 75-100% | 25-75% | 25-75% | 0-25% |
| 627 | 0-25% | 75-100% | 75-100% | 75-100% | 25-75% | 75-100% |
| 628 | 0-25% | 75-100% | 75-100% | 25-75% | 25-75% | 75-100% |
| 629 | 25-75% | 25-75% | 25-75% | ND | 75-100% | 75-100% |
| 630 | 75-100% | 75-100% | 75-100% | 75-100% | 75-100% | 75-100% |
| 631 | 75-100% | 75-100% | 75-100% | 75-100% | 25-75% | 75-100% |
| 632 | 25-75% | 25-75% | 25-75% | 25-75% | 25-75% | 75-100% |
| 633 | 75-100% | 0-25% | 0-25% | 0-25% | 0-25% | 75-100% |
| 634 | 25-75% | 25-75% | 25-75% | 25-75% | 25-75% | 75-100% |
| 635 | 0-25% | 75-100% | 75-100% | 75-100% | 75-100% | 75-100% |
| 636 | 75-100% | 75-100% | 75-100% | 75-100% | 75-100% | 75-100% |
| 637 | 0-25% | 0-25% | 0-25% | 0-25% | 0-25% | 75-100% |
| 638 | 25-75% | 75-100% | 75-100% | 75-100% | 75-100% | 75-100% |
| 639 | 0-25% | 75-100% | 75-100% | 75-100% | 75-100% | 75-100% |
| 640 | 25-75% | 75-100% | 25-75% | 75-100% | 75-100% | 75-100% |
| 641 | 75-100% | 75-100% | 75-100% | 75-100% | 75-100% | 0-25% |
| 642 | 75-100% | 75-100% | 75-100% | 75-100% | 75-100% | 75-100% |
| 643 | 75-100% | 75-100% | 75-100% | 75-100% | 75-100% | 75-100% |
| 644 | 75-100% | 75-100% | 0-25% | 25-75% | 25-75% | 75-100% |
| 645 | 75-100% | 75-100% | 75-100% | 75-100% | 75-100% | 75-100% |
| 646 | 75-100% | 75-100% | 75-100% | 75-100% | 75-100% | 75-100% |
| 647 | 75-100% | 75-100% | 75-100% | 75-100% | 25-75% | 75-100% |
| 648 | 75-100% | 75-100% | 75-100% | 75-100% | 75-100% | 75-100% |
| 649 | 0-25% | 75-100% | 75-100% | 75-100% | 75-100% | |
| 650 | 0-25% | 75-100% | 75-100% | 75-100% | 25-75% | 75-100% |
| 651 | 25-75% | 25-75% | 25-75% | 25-75% | 25-75% | 75-100% |
| 652 | 75-100% | 75-100% | 75-100% | 75-100% | 75-100% | 75-100% |
| 653 | 75-100% | 75-100% | 75-100% | 75-100% | 75-100% | 75-100% |
| 654 | 75-100% | 75-100% | 75-100% | 75-100% | 75-100% | 75-100% |
| 655 | 75-100% | 75-100% | 75-100% | 75-100% | 25-75% | 75-100% |
| 656 | 75-100% | 75-100% | 0-25% | 75-100% | 75-100% | 75-100% |
| 657 | 75-100% | 75-100% | 75-100% | 75-100% | 25-75% | 75-100% |
| 658 | 75-100% | 75-100% | 75-100% | ND | 25-75% | ND |
| 659 | 25-75% | 25-75% | 25-75% | 25-75% | 25-75% | 75-100% |
| 660 | 75-100% | 75-100% | 75-100% | 75-100% | 75-100% | 75-100% |
| 661 | 75-100% | 25-75% | 75-100% | 75-100% | 75-100% | 75-100% |
| 662 | 0-25% | 75-100% | 75-100% | 75-100% | 75-100% | 75-100% |
| 663 | 0-25% | 75-100% | 75-100% | 75-100% | 75-100% | 75-100% |
| 664 | 75-100% | 75-100% | 75-100% | 75-100% | 0-25% | ND |
| 665 | 25-75% | 25-75% | 25-75% | 25-75% | 25-75% | 0-25% |
| 666 | 0-25% | 75-100% | 75-100% | 75-100% | 75-100% | 75-100% |
| 667 | 0-25% | 75-100% | 75-100% | 75-100% | 75-100% | 75-100% |
| 668 | 75-100% | 75-100% | 75-100% | 75-100% | 25-75% | 75-100% |
| 669 | 0-25% | 25-75% | 0-25% | 0-25% | 25-75% | 0-25% |
| 670 | 0-25% | 75-100% | 75-100% | 75-100% | 75-100% | 75-100% |
| 671 | 75-100% | 75-100% | 0-25% | 75-100% | 75-100% | 75-100% |
| 672 | 75-100% | 75-100% | 0-25% | 75-100% | 75-100% | 75-100% |
| 673 | 25-75% | 75-100% | 25-75% | 25-75% | 0-25% | ND |
| 674 | 75-100% | 75-100% | 25-75% | 75-100% | 75-100% | 75-100% |
| 675 | 25-75% | 25-75% | 25-75% | 25-75% | 25-75% | 75-100% |
| 676 | 0-25% | 0-25% | 0-25% | 0-25% | 0-25% | 75-100% |
| 677 | 75-100% | 0-25% | 0-25% | 0-25% | 0-25% | ND |
| 678 | 75-100% | 75-100% | 75-100% | 75-100% | 25-75% | 75-100% |
| 679 | 75-100% | 75-100% | 75-100% | 75-100% | 75-100% | 75-100% |
| 680 | 25-75% | 75-100% | 25-75% | 25-75% | 25-75% | 25-75% |
| 681 | 0-25% | 0-25% | 75-100% | 0-25% | 0-25% | 75-100% |
| 682 | 0-25% | 25-75% | 0-25% | 0-25% | 25-75% | 75-100% |
| 683 | 75-100% | 75-100% | 75-100% | 75-100% | 75-100% | 75-100% |
| 684 | 0-25% | 25-75% | 0-25% | 0-25% | 0-25% | 0-25% |
| 685 | 25-75% | 25-75% | 25-75% | 25-75% | 25-75% | 75-100% |
| 686 | 75-100% | 75-100% | 75-100% | 75-100% | 25-75% | 75-100% |
| 687 | 75-100% | 25-75% | 25-75% | 25-75% | 25-75% | 75-100% |
| 688 | 25-75% | 25-75% | 25-75% | 25-75% | 25-75% | ND |
| 689 | 0-25% | 75-100% | 75-100% | 75-100% | 75-100% | 0-25% |
| 690 | 75-100% | 75-100% | 75-100% | 75-100% | 25-75% | 75-100% |
| 691 | 0-25% | 0-25% | 0-25% | 0-25% | 0-25% | 0-25% |
| 692 | 0-25% | 75-100% | 75-100% | 75-100% | 75-100% | 75-100% |
| 693 | 75-100% | 25-75% | 75-100% | 75-100% | 75-100% | 75-100% |
| 694 | 75-100% | 75-100% | 75-100% | 75-100% | 75-100% | 0-25% |
| 695 | 75-100% | 25-75% | 75-100% | 75-100% | 75-100% | 75-100% |
| 696 | 75-100% | 25-75% | 25-75% | 25-75% | 0-25% | 0-25% |
| 697 | 75-100% | 75-100% | 75-100% | 75-100% | 75-100% | 75-100% |
| 698 | 75-100% | 75-100% | 75-100% | 75-100% | 75-100% | 75-100% |
| 699 | 75-100% | 75-100% | 75-100% | ND | 75-100% | 75-100% |
| 700 | 0-25% | 25-75% | 0-25% | 0-25% | 25-75% | 75-100% |
| 701 | 75-100% | 0-25% | 75-100% | 75-100% | 75-100% | 75-100% |
| 702 | 0-25% | 75-100% | 75-100% | 75-100% | 75-100% | 75-100% |
| 703 | 0-25% | 75-100% | 75-100% | 75-100% | 75-100% | 75-100% |
| 704 | 25-75% | 25-75% | 25-75% | 25-75% | 75-100% | 75-100% |
| 705 | 75-100% | 25-75% | 75-100% | 75-100% | 75-100% | 75-100% |
| 706 | 25-75% | 75-100% | 25-75% | 25-75% | 25-75% | 75-100% |
| 707 | 0-25% | 75-100% | 75-100% | 75-100% | 75-100% | 75-100% |
| 708 | 75-100% | 75-100% | 75-100% | 75-100% | 75-100% | 75-100% |
| 709 | 0-25% | 75-100% | 75-100% | 75-100% | 75-100% | 75-100% |
| 710 | 75-100% | 75-100% | 75-100% | 75-100% | 75-100% | 75-100% |
| 711 | 75-100% | 25-75% | 75-100% | 75-100% | 75-100% | 75-100% |
| 712 | 25-75% | 75-100% | 75-100% | 75-100% | 75-100% | 75-100% |

ND = not determined

TABLE 7
Overview of the genomic regions and ranges of methylation within which the actual value of
methylation of said genomic regions lies specific of the said cells, tissues and/or organs.
The actual value of methylation is shown in FIGS. 1.1-1.403.

| SEQ | | | | | | |
|---|---|---|---|---|---|---|
| ID | CD4 | CD8 | | Embryonic | | |
| NO: | T- | T- | Embryonic | Skeletal | | Heart |
| Genomic | lymphocyte | lymphocyte | Liver | Muscle | Fibroblast | Muscle |
| 713 | 75-100% | 75-100% | 75-100% | 75-100% | 75-100% | 75-100% |
| 714 | 25-75% | 25-75% | ND | 0-25% | 0-25% | 25-75% |
| 715 | 25-75% | 25-75% | 0-25% | 0-25% | 0-25% | 0-25% |
| 716 | 75-100% | 75-100% | 75-100% | 75-100% | 75-100% | 75-100% |
| 717 | 75-100% | 75-100% | 25-75% | 25-75% | 25-75% | 25-75% |
| 718 | 75-100% | 75-100% | 75-100% | 75-100% | 0-25% | 75-100% |
| 719 | 25-75% | 25-75% | 25-75% | 0-25% | 0-25% | 25-75% |
| 720 | 0-25% | 0-25% | 0-25% | 75-100% | 75-100% | 0-25% |
| 721 | 75-100% | 75-100% | 75-100% | 75-100% | 0-25% | 75-100% |
| 722 | 75-100% | 75-100% | 75-100% | 75-100% | 25-75% | 75-100% |
| 723 | 75-100% | 75-100% | 75-100% | 0-25% | 0-25% | 75-100% |
| 724 | 0-25% | 0-25% | 75-100% | 75-100% | 75-100% | 75-100% |
| 725 | 75-100% | 75-100% | 75-100% | 75-100% | 25-75% | 25-75% |
| 726 | 0-25% | 0-25% | 25-75% | 0-25% | 0-25% | 25-75% |
| 727 | 25-75% | 25-75% | 25-75% | 25-75% | 25-75% | 25-75% |
| 728 | 75-100% | 75-100% | 75-100% | 75-100% | 0-25% | 75-100% |
| 729 | 75-100% | 75-100% | 75-100% | 75-100% | 25-75% | 75-100% |
| 730 | 25-75% | 75-100% | 75-100% | 75-100% | 75-100% | 75-100% |
| 731 | 75-100% | 75-100% | 75-100% | 75-100% | 0-25% | 75-100% |
| 732 | 75-100% | 75-100% | 75-100% | 75-100% | 25-75% | 75-100% |
| 733 | 75-100% | 75-100% | 25-75% | 25-75% | 25-75% | 25-75% |
| 734 | 25-75% | 25-75% | 25-75% | 25-75% | 25-75% | 25-75% |
| 735 | 75-100% | 75-100% | 25-75% | 25-75% | 25-75% | 25-75% |
| 736 | 75-100% | 75-100% | 75-100% | 75-100% | 0-25% | 75-100% |
| 737 | 75-100% | 75-100% | 75-100% | 25-75% | 25-75% | 25-75% |
| 738 | 0-25% | 0-25% | 0-25% | 0-25% | 25-75% | 25-75% |
| 739 | 75-100% | 75-100% | 75-100% | 75-100% | 25-75% | 75-100% |
| 740 | 75-100% | 75-100% | 75-100% | 75-100% | 25-75% | 75-100% |
| 741 | 75-100% | 75-100% | 75-100% | 75-100% | 0-25% | 75-100% |
| 742 | 75-100% | 75-100% | 75-100% | 25-75% | 25-75% | 25-75% |
| 743 | 75-100% | 75-100% | 75-100% | 75-100% | 75-100% | 75-100% |
| 744 | 75-100% | 75-100% | 75-100% | 25-75% | 25-75% | 25-75% |
| 745 | 75-100% | 75-100% | 75-100% | 75-100% | 75-100% | 75-100% |
| 746 | 75-100% | 75-100% | 75-100% | 0-25% | 0-25% | 25-75% |
| 747 | 75-100% | 75-100% | 75-100% | 75-100% | 25-75% | 75-100% |
| 748 | 75-100% | 75-100% | 75-100% | 25-75% | 75-100% | 75-100% |
| 749 | 75-100% | 75-100% | 75-100% | 25-75% | 25-75% | 25-75% |
| 750 | 75-100% | 75-100% | 25-75% | 25-75% | 0-25% | 0-25% |
| 751 | 75-100% | 75-100% | 75-100% | 75-100% | 0-25% | 75-100% |
| 752 | 75-100% | 75-100% | 75-100% | 75-100% | 75-100% | 25-75% |
| 753 | 75-100% | 75-100% | 75-100% | ND | 0-25% | 75-100% |
| 754 | 75-100% | 75-100% | 25-75% | 25-75% | 25-75% | 75-100% |
| 755 | 25-75% | 25-75% | 25-75% | 25-75% | 25-75% | 25-75% |
| 756 | 75-100% | 75-100% | 75-100% | 75-100% | 0-25% | 75-100% |
| 757 | 75-100% | 75-100% | 75-100% | 25-75% | 25-75% | 25-75% |
| 758 | 75-100% | 75-100% | 75-100% | 75-100% | 25-75% | 75-100% |
| 759 | 75-100% | 75-100% | 75-100% | 75-100% | 75-100% | 25-75% |
| 760 | 0-25% | 0-25% | 25-75% | 25-75% | 25-75% | 25-75% |
| 761 | 75-100% | 75-100% | 75-100% | 75-100% | 0-25% | 75-100% |
| 762 | 0-25% | ND | 0-25% | 75-100% | 75-100% | 75-100% |
| 763 | 75-100% | 75-100% | 25-75% | 75-100% | 75-100% | 75-100% |
| 764 | 75-100% | 75-100% | 75-100% | 25-75% | 25-75% | 25-75% |
| 765 | 0-25% | 0-25% | 0-25% | 25-75% | 25-75% | 25-75% |
| 766 | 0-25% | 0-25% | 25-75% | 75-100% | 75-100% | 75-100% |
| 767 | 25-75% | 25-75% | 25-75% | 0-25% | 0-25% | 0-25% |
| 768 | 25-75% | 25-75% | 0-25% | 25-75% | 25-75% | 25-75% |
| 769 | 75-100% | 75-100% | 75-100% | 25-75% | 0-25% | 25-75% |
| 770 | 75-100% | 75-100% | 75-100% | 75-100% | 25-75% | 75-100% |
| 771 | 75-100% | 75-100% | 75-100% | 75-100% | 75-100% | 75-100% |
| 772 | 75-100% | 75-100% | 75-100% | 25-75% | 25-75% | 75-100% |
| 773 | 75-100% | 75-100% | 75-100% | 75-100% | 0-25% | 75-100% |
| 774 | 75-100% | 75-100% | 75-100% | 75-100% | 25-75% | 75-100% |
| 775 | 75-100% | 75-100% | 75-100% | 75-100% | 0-25% | 75-100% |
| 776 | 75-100% | 75-100% | 75-100% | 75-100% | 75-100% | 25-75% |
| 777 | 75-100% | 75-100% | 75-100% | 75-100% | 25-75% | 75-100% |
| 778 | 0-25% | 0-25% | 75-100% | 75-100% | 75-100% | 75-100% |
| 779 | 75-100% | 75-100% | 75-100% | ND | 25-75% | 25-75% |
| 780 | 75-100% | 75-100% | 75-100% | 25-75% | 25-75% | 25-75% |
| 781 | 75-100% | 75-100% | 75-100% | 25-75% | 25-75% | 75-100% |
| 782 | 75-100% | 75-100% | 75-100% | 75-100% | 0-25% | 75-100% |
| 783 | 75-100% | 75-100% | 75-100% | 75-100% | 75-100% | 75-100% |
| 784 | 75-100% | 75-100% | 75-100% | 75-100% | 25-75% | 25-75% |
| 785 | 25-75% | 25-75% | 25-75% | 25-75% | 0-25% | 0-25% |
| 786 | 75-100% | 75-100% | 75-100% | 25-75% | 25-75% | 25-75% |
| 787 | 0-25% | 0-25% | 0-25% | 0-25% | 0-25% | 0-25% |
| 788 | 75-100% | 75-100% | 75-100% | 75-100% | 25-75% | 75-100% |
| 789 | 75-100% | 75-100% | 75-100% | 75-100% | 0-25% | 75-100% |
| 790 | 25-75% | 25-75% | 25-75% | 25-75% | 25-75% | 25-75% |
| 791 | 0-25% | 0-25% | 0-25% | 0-25% | 75-100% | 25-75% |
| 792 | 75-100% | 75-100% | 75-100% | 25-75% | 25-75% | 75-100% |
| 793 | 75-100% | 75-100% | 75-100% | 75-100% | 75-100% | 75-100% |
| 794 | 75-100% | 75-100% | 75-100% | 75-100% | 75-100% | 25-75% |
| 795 | 75-100% | 75-100% | 25-75% | 25-75% | 25-75% | 25-75% |
| 796 | 75-100% | 75-100% | 75-100% | 0-25% | 0-25% | 25-75% |
| 797 | 75-100% | 75-100% | 75-100% | 75-100% | 75-100% | 75-100% |
| 798 | 75-100% | 75-100% | 75-100% | 75-100% | 75-100% | 75-100% |
| 799 | 75-100% | 75-100% | 75-100% | 0-25% | 0-25% | 0-25% |
| 800 | 75-100% | 75-100% | 75-100% | 75-100% | 25-75% | 75-100% |
| 801 | 75-100% | 75-100% | 75-100% | 25-75% | 25-75% | 25-75% |
| 802 | 75-100% | 75-100% | 75-100% | 75-100% | 75-100% | 75-100% |
| 803 | 75-100% | 75-100% | 75-100% | ND | 0-25% | 25-75% |
| 804 | 25-75% | 25-75% | 25-75% | 25-75% | 25-75% | 75-100% |
| 805 | 75-100% | 75-100% | 75-100% | 75-100% | 25-75% | 75-100% |
| 806 | 75-100% | 75-100% | 75-100% | 25-75% | 25-75% | 25-75% |
| 807 | 75-100% | 75-100% | 75-100% | 75-100% | 75-100% | 75-100% |
| 808 | 75-100% | 75-100% | 75-100% | 25-75% | 25-75% | 25-75% |
| 809 | 75-100% | 75-100% | 75-100% | 75-100% | 0-25% | 75-100% |
| 810 | 75-100% | 75-100% | 75-100% | 75-100% | 75-100% | 25-75% |
| 811 | 75-100% | 75-100% | 75-100% | 75-100% | 25-75% | 75-100% |
| 812 | 75-100% | 75-100% | 75-100% | 25-75% | 25-75% | 75-100% |
| 813 | 75-100% | 75-100% | 75-100% | 75-100% | 25-75% | 75-100% |
| 814 | 75-100% | 75-100% | 75-100% | 75-100% | 5β | 75-100% |
| 815 | 75-100% | 75-100% | 75-100% | 25-75% | 25-75% | 25-75% |
| 816 | 75-100% | 75-100% | 75-100% | 75-100% | 75-100% | 75-100% |
| 817 | 75-100% | 75-100% | 75-100% | 25-75% | 25-75% | 75-100% |
| 818 | 75-100% | 75-100% | 75-100% | 75-100% | 0-25% | 75-100% |
| 819 | 75-100% | 75-100% | 75-100% | 25-75% | 25-75% | 75-100% |
| 820 | 75-100% | 75-100% | 75-100% | 75-100% | 25-75% | 75-100% |
| 821 | 75-100% | 75-100% | 75-100% | 75-100% | 25-75% | 75-100% |
| 822 | 25-75% | 25-75% | 25-75% | 25-75% | 75-100% | 25-75% |
| 823 | 75-100% | 75-100% | 75-100% | 75-100% | 25-75% | 75-100% |
| 824 | 75-100% | 75-100% | 75-100% | 75-100% | 75-100% | 25-75% |

| SEQ | | | | | | |
|---|---|---|---|---|---|---|
| ID | | | | | | |
| NO: | | | | | Skeletal | |
| Genomic | Keratinocyte | Liver | Melanocyte | Placenta | Muscle | Sperm |
| 713 | 75-100% | 25-75% | 75-100% | 75-100% | 25-75% | 25-75% |
| 714 | 0-25% | 25-75% | 0-25% | 25-75% | 25-75% | 25-75% |
| 715 | 0-25% | 25-75% | 0-25% | 0-25% | 0-25% | 0-25% |
| 716 | 25-75% | 25-75% | 75-100% | 25-75% | 25-75% | 0-25% |
| 717 | 25-75% | 75-100% | 0-25% | 25-75% | 25-75% | 0-25% |
| 718 | 75-100% | 75-100% | 0-25% | 75-100% | 75-100% | 75-100% |
| 719 | 0-25% | 25-75% | 0-25% | 25-75% | 25-75% | 0-25% |
| 720 | 0-25% | 0-25% | 0-25% | 75-100% | 75-100% | 0-25% |
| 721 | 0-25% | 75-100% | 75-100% | 75-100% | 75-100% | 75-100% |
| 722 | 25-75% | 75-100% | 75-100% | 75-100% | 75-100% | 75-100% |
| 723 | 75-100% | 75-100% | 75-100% | 75-100% | 0-25% | 75-100% |
| 724 | 0-25% | 75-100% | 75-100% | 75-100% | 75-100% | 75-100% |
| 725 | 75-100% | 75-100% | 75-100% | 25-75% | 25-75% | 75-100% |
| 726 | 0-25% | 25-75% | 25-75% | 25-75% | 0-25% | 75-100% |
| 727 | 75-100% | 25-75% | 75-100% | 25-75% | 25-75% | 25-75% |
| 728 | 75-100% | 75-100% | 0-25% | 75-100% | 75-100% | 75-100% |
| 729 | 75-100% | 75-100% | 25-75% | 75-100% | 75-100% | 75-100% |
| 730 | 75-100% | 75-100% | 75-100% | 75-100% | 25-75% | 75-100% |
| 731 | 0-25% | 75-100% | 75-100% | 75-100% | 75-100% | 75-100% |
| 732 | 75-100% | 75-100% | 25-75% | 75-100% | 25-75% | 75-100% |
| 733 | 75-100% | 75-100% | 75-100% | 25-75% | 25-75% | 75-100% |
| 734 | 0-25% | 0-25% | 75-100% | 0-25% | 0-25% | 0-25% |
| 735 | 25-75% | 75-100% | 75-100% | 25-75% | 25-75% | 75-100% |
| 736 | 0-25% | 75-100% | 75-100% | 75-100% | 75-100% | 75-100% |
| 737 | 75-100% | 75-100% | 75-100% | 75-100% | 25-75% | 75-100% |
| 738 | 75-100% | 75-100% | 75-100% | 75-100% | 25-75% | 75-100% |
| 739 | 75-100% | 75-100% | 25-75% | 75-100% | 75-100% | 75-100% |
| 740 | 75-100% | 75-100% | 25-75% | 75-100% | 75-100% | 75-100% |
| 741 | 0-25% | 75-100% | 0-25% | 25-75% | 25-75% | 75-100% |
| 742 | 25-75% | 75-100% | 75-100% | 25-75% | 25-75% | 75-100% |
| 743 | 0-25% | 75-100% | 75-100% | 0-25% | 75-100% | 0-25% |
| 744 | 75-100% | 75-100% | 0-25% | 75-100% | 75-100% | 75-100% |
| 745 | 0-25% | 75-100% | 75-100% | 75-100% | 0-25% | 0-25% |
| 746 | 0-25% | 75-100% | 0-25% | 0-25% | 25-75% | 75-100% |
| 747 | 25-75% | 75-100% | 75-100% | 75-100% | 25-75% | 75-100% |
| 748 | 0-25% | 75-100% | 75-100% | 75-100% | 25-75% | 75-100% |
| 749 | 25-75% | 75-100% | 75-100% | 75-100% | 75-100% | 75-100% |
| 750 | 75-100% | 75-100% | 75-100% | 75-100% | 75-100% | 75-100% |
| 751 | 0-25% | 75-100% | 0-25% | 75-100% | 0-25% | 0-25% |
| 752 | 75-100% | 25-75% | 75-100% | 75-100% | 25-75% | 75-100% |
| 753 | 75-100% | 75-100% | 75-100% | 0-25% | 0-25% | 75-100% |
| 754 | 25-75% | 75-100% | 0-25% | 0-25% | 0-25% | 0-25% |
| 755 | 75-100% | 75-100% | 75-100% | 25-75% | 25-75% | 0-25% |
| 756 | 0-25% | 75-100% | 75-100% | 75-100% | 25-75% | 75-100% |
| 757 | 25-75% | 75-100% | 25-75% | 25-75% | 25-75% | 75-100% |
| 758 | 75-100% | 75-100% | 75-100% | 75-100% | 75-100% | 75-100% |
| 759 | 75-100% | 75-100% | 75-100% | 75-100% | 25-75% | 75-100% |
| 760 | 25-75% | 75-100% | 25-75% | 25-75% | 25-75% | 75-100% |
| 761 | 75-100% | 75-100% | 75-100% | 75-100% | 75-100% | 75-100% |
| 762 | 0-25% | 75-100% | 75-100% | 75-100% | 75-100% | 75-100% |
| 763 | 75-100% | 25-75% | 75-100% | 75-100% | 25-75% | 75-100% |
| 764 | 75-100% | 75-100% | 75-100% | 25-75% | 25-75% | 75-100% |
| 765 | 0-25% | 25-75% | 25-75% | 25-75% | 75-100% | 0-25% |
| 766 | 75-100% | 25-75% | 75-100% | 25-75% | 75-100% | 75-100% |
| 767 | 25-75% | 25-75% | 25-75% | 0-25% | 0-25% | 75-100% |
| 768 | 0-25% | 25-75% | 0-25% | 25-75% | 25-75% | 0-25% |
| 769 | 75-100% | 75-100% | 75-100% | 25-75% | 25-75% | 75-100% |
| 770 | 75-100% | 75-100% | 75-100% | 75-100% | 75-100% | 75-100% |
| 771 | 25-75% | 75-100% | 75-100% | 75-100% | 25-75% | 75-100% |
| 772 | 75-100% | 75-100% | 75-100% | 25-75% | 25-75% | 75-100% |
| 773 | 0-25% | 75-100% | 0-25% | 75-100% | 75-100% | 75-100% |
| 774 | 75-100% | 25-75% | 75-100% | 75-100% | 75-100% | 75-100% |
| 775 | 0-25% | 75-100% | 75-100% | 75-100% | 75-100% | 75-100% |
| 776 | 25-75% | 75-100% | 75-100% | 75-100% | 75-100% | 75-100% |
| 777 | 0-25% | 75-100% | 0-25% | 75-100% | 75-100% | 75-100% |
| 778 | 0-25% | 75-100% | 75-100% | 75-100% | 75-100% | 75-100% |
| 779 | 75-100% | 75-100% | 0-25% | 75-100% | 25-75% | 75-100% |
| 780 | 75-100% | 75-100% | 75-100% | 25-75% | 25-75% | 75-100% |
| 781 | 25-75% | 75-100% | 25-75% | 25-75% | 75-100% | 75-100% |
| 782 | 25-75% | 75-100% | 25-75% | 75-100% | 75-100% | 75-100% |
| 783 | 75-100% | 75-100% | 75-100% | 25-75% | 25-75% | 75-100% |
| 784 | 75-100% | 75-100% | 75-100% | 75-100% | 25-75% | 75-100% |
| 785 | 25-75% | 25-75% | 0-25% | 0-25% | 0-25% | 75-100% |
| 786 | 25-75% | 25-75% | 25-75% | 25-75% | 25-75% | 0-25% |
| 787 | 0-25% | 75-100% | 0-25% | 0-25% | 75-100% | 75-100% |
| 788 | 75-100% | 75-100% | 75-100% | 75-100% | 25-75% | 75-100% |
| 789 | 75-100% | 75-100% | 0-25% | 75-100% | 75-100% | 75-100% |
| 790 | 25-75% | 75-100% | 25-75% | 25-75% | 0-25% | 75-100% |
| 791 | 0-25% | 75-100% | 25-75% | 75-100% | 25-75% | 75-100% |
| 792 | 75-100% | 75-100% | 75-100% | 25-75% | 25-75% | 75-100% |
| 793 | 75-100% | 25-75% | 25-75% | 75-100% | 75-100% | 75-100% |
| 794 | 75-100% | 25-75% | 25-75% | 75-100% | 75-100% | 75-100% |
| 795 | 75-100% | 25-75% | 25-75% | 25-75% | 25-75% | ND |
| 796 | 75-100% | 25-75% | 0-25% | 25-75% | 25-75% | 0-25% |
| 797 | 75-100% | 75-100% | 75-100% | 25-75% | 25-75% | 75-100% |
| 798 | 75-100% | 75-100% | 75-100% | 25-75% | 25-75% | 75-100% |
| 799 | 0-25% | 75-100% | 0-25% | 0-25% | 0-25% | 75-100% |
| 800 | 75-100% | 75-100% | 75-100% | 75-100% | 25-75% | 75-100% |
| 801 | 75-100% | 25-75% | 75-100% | 25-75% | 25-75% | 75-100% |
| 802 | 75-100% | 75-100% | 75-100% | 25-75% | 25-75% | 75-100% |
| 803 | 25-75% | 75-100% | 0-25% | 75-100% | 75-100% | 75-100% |
| 804 | 75-100% | 75-100% | 25-75% | 25-75% | 25-75% | 25-75% |
| 805 | 75-100% | 75-100% | 25-75% | 25-75% | 25-75% | 75-100% |
| 806 | 75-100% | 75-100% | 25-75% | 25-75% | 25-75% | 75-100% |
| 807 | 0-25% | 75-100% | 75-100% | 0-25% | 0-25% | 75-100% |
| 808 | 25-75% | 75-100% | 75-100% | 25-75% | 25-75% | 75-100% |
| 809 | 75-100% | 75-100% | 75-100% | 75-100% | 75-100% | 75-100% |
| 810 | 75-100% | 25-75% | 25-75% | 75-100% | 75-100% | 75-100% |
| 811 | 75-100% | 75-100% | 25-75% | 25-75% | 25-75% | 75-100% |
| 812 | 75-100% | 75-100% | 25-75% | 25-75% | 25-75% | 75-100% |
| 813 | 75-100% | 75-100% | 25-75% | 75-100% | 75-100% | 75-100% |
| 814 | 75-100% | 75-100% | 75-100% | 5β | 25-75% | 75-100% |
| 815 | 75-100% | 75-100% | 25-75% | 25-75% | 25-75% | 75-100% |
| 816 | 25-75% | 75-100% | 75-100% | 25-75% | 25-75% | 75-100% |
| 817 | 75-100% | 75-100% | 75-100% | 25-75% | 25-75% | 75-100% |
| 818 | 75-100% | 75-100% | 75-100% | 75-100% | 0-25% | 75-100% |
| 819 | 75-100% | 75-100% | 25-75% | 25-75% | 25-75% | 75-100% |
| 820 | 0-25% | 75-100% | 75-100% | 0-25% | 0-25% | 75-100% |
| 821 | 75-100% | 75-100% | 75-100% | 75-100% | 25-75% | 75-100% |
| 822 | 75-100% | 75-100% | 75-100% | 75-100% | 25-75% | 75-100% |
| 823 | 75-100% | 75-100% | 75-100% | 25-75% | 25-75% | 75-100% |
| 824 | 75-100% | 75-100% | 75-100% | 25-75% | 25-75% | 75-100% |

ND = not determined

TABLE 8A
Sequences for the differentiation and/or detection of T-lymphocytes.

| SEQ ID NO: | |
|---|---|
| Genomic | Tissue |
| 511 | CD4 T-lymphocyte |
| 634 | CD4 T-lymphocyte |
| 637 | CD4 T-lymphocyte |
| 652 | CD4 T-lymphocyte |
| 416 | CD4 T-lymphocyte, CD8 T- |
| | lymphocyte |
| 417 | CD4 T-lymphocyte, CD8 T- |
| | lymphocyte |
| 426 | CD4 T-lymphocyte, CD8 T- |
| | lymphocyte |
| 438 | CD4 T-lymphocyte, CD8 T- |
| | lymphocyte |
| 442 | CD4 T-lymphocyte, CD8 T- |
| | lymphocyte |
| 445 | CD4 T-lymphocyte, CD8 T- |
| | lymphocyte |
| 449 | CD4 T-lymphocyte, CD8 T- |
| | lymphocyte |
| 451 | CD4 T-lymphocyte, CD8 T- |
| | lymphocyte |
| 452 | CD4 T-lymphocyte, CD8 T- |
| | lymphocyte |
| 458 | CD4 T-lymphocyte, CD8 T- |
| | lymphocyte |
| 467 | CD4 T-lymphocyte, CD8 T- |
| | lymphocyte |
| 468 | CD4 T-lymphocyte, CD8 T- |
| | lymphocyte |
| 474 | CD4 T-lymphocyte, CD8 T- |
| | lymphocyte |
| 481 | CD4 T-lymphocyte, CD8 T- |
| | lymphocyte |
| 482 | CD4 T-lymphocyte, CD8 T- |
| | lymphocyte |
| 483 | CD4 T-lymphocyte, CD8 T- |
| | lymphocyte |
| 489 | CD4 T-lymphocyte, CD8 T- |
| | lymphocyte |
| 490 | CD4 T-lymphocyte, CD8 T- |
| | lymphocyte |
| 491 | CD4 T-lymphocyte, CD8 T- |
| | lymphocyte |
| 492 | CD4 T-lymphocyte, CD8 T- |
| | lymphocyte |
| 493 | CD4 T-lymphocyte, CD8 T- |
| | lymphocyte |
| 497 | CD4 T-lymphocyte, CD8 T- |
| | lymphocyte |
| 513 | CD4 T-lymphocyte, CD8 T- |
| | lymphocyte |
| 515 | CD4 T-lymphocyte, CD8 T- |
| | lymphocyte |
| 518 | CD4 T-lymphocyte, CD8 T- |
| | lymphocyte |
| 522 | CD4 T-lymphocyte, CD8 T- |
| | lymphocyte |
| 527 | CD4 T-lymphocyte, CD8 T- |
| | lymphocyte |
| 528 | CD4 T-lymphocyte, CD8 T- |
| | lymphocyte |
| 531 | CD4 T-lymphocyte, CD8 T- |
| | lymphocyte |
| 535 | CD4 T-lymphocyte, CD8 T- |
| | lymphocyte |
| 542 | CD4 T-lymphocyte, CD8 T- |
| | lymphocyte |
| 554 | CD4 T-lymphocyte, CD8 T- |
| | lymphocyte |
| 555 | CD4 T-lymphocyte, CD8 T- |
| | lymphocyte |
| 557 | CD4 T-lymphocyte, CD8 T- |
| | lymphocyte |
| 558 | CD4 T-lymphocyte, CD8 T- |
| | lymphocyte |
| 562 | CD4 T-lymphocyte, CD8 T- |
| | lymphocyte |
| 566 | CD4 T-lymphocyte, CD8 T- |
| | lymphocyte |
| 574 | CD4 T-lymphocyte, CD8 T- |
| | lymphocyte |
| 588 | CD4 T-lymphocyte, CD8 T- |
| | lymphocyte |
| 597 | CD4 T-lymphocyte, CD8 T- |
| | lymphocyte |
| 598 | CD4 T-lymphocyte, CD8 T- |
| | lymphocyte |
| 607 | CD4 T-lymphocyte, CD8 T- |
| | lymphocyte |
| 632 | CD4 T-lymphocyte, CD8 T- |
| | lymphocyte |
| 639 | CD4 T-lymphocyte, CD8 T- |
| | lymphocyte |
| 651 | CD4 T-lymphocyte, CD8 T- |
| | lymphocyte |
| 659 | CD4 T-lymphocyte, CD8 T- |
| | lymphocyte |
| 669 | CD4 T-lymphocyte, CD8 T- |
| | lymphocyte |
| 675 | CD4 T-lymphocyte, CD8 T- |
| | lymphocyte |
| 676 | CD4 T-lymphocyte, CD8 T- |
| | lymphocyte |
| 682 | CD4 T-lymphocyte, CD8 T- |
| | lymphocyte |
| 683 | CD4 T-lymphocyte, CD8 T- |
| | lymphocyte |
| 685 | CD4 T-lymphocyte, CD8 T- |
| | lymphocyte |
| 691 | CD4 T-lymphocyte, CD8 T- |
| | lymphocyte |
| 695 | CD4 T-lymphocyte, CD8 T- |
| | lymphocyte |
| 697 | CD4 T-lymphocyte, CD8 T- |
| | lymphocyte |
| 710 | CD4 T-lymphocyte, CD8 T- |
| | lymphocyte |
| 463 | CD4 T-lymphocyte, CD8 T- |
| | lymphocyte |
| 465 | CD4 T-lymphocyte, CD8 T- |
| | lymphocyte |
| 679 | CD4 T-lymphocyte, CD8 T- |
| | lymphocyte |
| 480 | CD4 T-lymphocyte, CD8 T- |
| | lymphocyte |
| 701 | CD4 T-lymphocyte, CD8 T- |
| | lymphocyte |
| 706 | CD8 T-lymphocyte |

TABLE 8B
Sequences for the differentiation and/or detection of embryonic liver.

| SEQ ID NO: | |
|---|---|
| Genomic | Tissue |
| 509 | embryonic |
| | liver |
| 459 | embryonic |
| | liver |
| 475 | embryonic |
| | liver |
| 476 | embryonic |
| | liver |
| 477 | embryonic |
| | liver |
| 479 | embryonic |
| | liver |
| 484 | embryonic |
| | liver |
| 485 | embryonic |
| | liver |
| 552 | embryonic |
| | liver |
| 593 | embryonic |
| | liver |
| 596 | embryonic |
| | liver |
| 654 | embryonic |
| | liver |
| 712 | embryonic |
| | liver |
| 429 | embryonic |
| | liver |
| 465 | embryonic |
| | liver |
| 679 | embryonic |
| | liver |
| 480 | embryonic |
| | liver |
| 420 | embryonic |
| | liver |
| 612 | embryonic |
| | liver |
| 621 | embryonic |
| | liver |
| 624 | embryonic |
| | liver |
| 678 | embryonic |
| | liver |
| 505 | embryonic |
| | liver |

TABLE 8C
Sequences for the differentiation and/or detection of embryonic skeletal
muscle.

| SEQ ID NO: | |
|---|---|
| Genomic | Tissue |
| 444 | embryonic skeletal |
| | muscle |
| 658 | embryonic skeletal |
| | muscle |
| 441 | embryonic skeletal |
| | muscle |
| 459 | embryonic skeletal |
| | muscle |
| 475 | embryonic skeletal |
| | muscle |
| 476 | embryonic skeletal |
| | muscle |
| 477 | embryonic skeletal |
| | muscle |
| 479 | embryonic skeletal |
| | muscle |
| 484 | embryonic skeletal |
| | muscle |
| 485 | embryonic skeletal |
| | muscle |
| 552 | embryonic skeletal |
| | muscle |
| 593 | embryonic skeletal |
| | muscle |
| 596 | embryonic skeletal |
| | muscle |
| 654 | embryonic skeletal |
| | muscle |
| 712 | embryonic skeletal |
| | muscle |
| 429 | embryonic skeletal |
| | muscle |
| 465 | embryonic skeletal |
| | muscle |
| 679 | embryonic skeletal |
| | muscle |
| 480 | embryonic skeletal |
| | muscle |
| 420 | embryonic skeletal |
| | muscle |
| 612 | embryonic skeletal |
| | muscle |
| 621 | embryonic skeletal |
| | muscle |
| 624 | embryonic skeletal |
| | muscle |
| 678 | embryonic skeletal |
| | muscle |

TABLE 8D
Sequences for the differentiation and/or detection of fibroblasts:

| SEQ ID NO: | |
|---|---|
| Genomic | Tissue |
| 422 | fibroblast |
| 440 | fibroblast |
| 446 | fibroblast |
| 473 | fibroblast |
| 504 | fibroblast |
| 524 | fibroblast |
| 534 | fibroblast |
| 563 | fibroblast |
| 567 | fibroblast |
| 569 | fibroblast |
| 580 | fibroblast |
| 584 | fibroblast |
| 586 | fibroblast |
| 594 | fibroblast |
| 601 | fibroblast |
| 610 | fibroblast |
| 611 | fibroblast |
| 617 | fibroblast |
| 626 | fibroblast |
| 630 | fibroblast |
| 631 | fibroblast |
| 636 | fibroblast |
| 638 | fibroblast |
| 641 | fibroblast |
| 642 | fibroblast |
| 643 | fibroblast |
| 645 | fibroblast |
| 646 | fibroblast |
| 647 | fibroblast |
| 648 | fibroblast |
| 653 | fibroblast |
| 655 | fibroblast |
| 660 | fibroblast |
| 688 | fibroblast |
| 690 | fibroblast |
| 699 | fibroblast |
| 708 | fibroblast |
| 709 | fibroblast |
| 471 | fibroblast |
| 572 | fibroblast |
| 640 | fibroblast |
| 576 | fibroblast |

TABLE 8E
Sequences for the differentiation and/or detection of heart muscle.

| SEQ ID NO: | |
|---|---|
| Genomic | Tissue |
| 430 | heart muscle |
| 579 | heart muscle |
| 595 | heart muscle |
| 615 | heart muscle |
| 619 | heart muscle |
| 698 | heart muscle |
| 700 | heart muscle |
| 424 | heart muscle |

TABLE 8F
Sequences for the differentiation of heart muscle from skeletal muscle:

| SEQ ID NO: | |
|---|---|
| Genomic | Tissue |
| 525 | heart muscle versus skeletal muscle |
| 590 | heart muscle versus skeletal muscle |
| 599 | heart muscle versus skeletal muscle |
| 704 | heart muscle versus skeletal muscle |

TABLE 8G
Sequences for the differentiation and/or detection of keratinocytes.

| SEQ ID NO: | |
|---|---|
| Genomic | Tissue |
| 463 | keratinocyte |
| 433 | keratinocyte |
| 435 | keratinocyte |
| 439 | keratinocyte |
| 447 | keratinocyte |
| 450 | keratinocyte |
| 454 | keratinocyte |
| 460 | keratinocyte |
| 461 | keratinocyte |
| 462 | keratinocyte |
| 494 | keratinocyte |
| 495 | keratinocyte |
| 499 | keratinocyte |
| 501 | keratinocyte |
| 506 | keratinocyte |
| 512 | keratinocyte |
| 516 | keratinocyte |
| 520 | keratinocyte |
| 521 | keratinocyte |
| 526 | keratinocyte |
| 532 | keratinocyte |
| 533 | keratinocyte |
| 536 | keratinocyte |
| 539 | keratinocyte |
| 541 | keratinocyte |
| 549 | keratinocyte |
| 550 | keratinocyte |
| 551 | keratinocyte |
| 556 | keratinocyte |
| 559 | keratinocyte |
| 561 | keratinocyte |
| 564 | keratinocyte |
| 565 | keratinocyte |
| 570 | keratinocyte |
| 571 | keratinocyte |
| 575 | keratinocyte |
| 587 | keratinocyte |
| 589 | keratinocyte |
| 592 | keratinocyte |
| 600 | keratinocyte |
| 602 | keratinocyte |
| 603 | keratinocyte |
| 604 | keratinocyte |
| 605 | keratinocyte |
| 608 | keratinocyte |
| 609 | keratinocyte |
| 614 | keratinocyte |
| 625 | keratinocyte |
| 627 | keratinocyte |
| 628 | keratinocyte |
| 633 | keratinocyte |
| 635 | keratinocyte |
| 649 | keratinocyte |
| 650 | keratinocyte |
| 662 | keratinocyte |
| 663 | keratinocyte |
| 666 | keratinocyte |
| 667 | keratinocyte |
| 670 | keratinocyte |
| 677 | keratinocyte |
| 687 | keratinocyte |
| 689 | keratinocyte |
| 692 | keratinocyte |
| 696 | keratinocyte |
| 702 | keratinocyte |
| 703 | keratinocyte |
| 707 | keratinocyte |
| 709 | keratinocyte |
| 471 | keratinocyte |
| 572 | keratinocyte |
| 640 | keratinocyte |
| 576 | keratinocyte |
| 613 | keratinocyte |

TABLE 8H
Sequences for the differentiation and/or detection of liver.

| SEQ | |
|---|---|
| ID NO: Genomic | Tissue |
| 415 | liver |
| 427 | liver |
| 434 | liver |
| 448 | liver |
| 456 | liver |
| 457 | liver |
| 503 | liver |
| 508 | liver |
| 529 | liver |
| 537 | liver |
| 540 | liver |
| 546 | liver |
| 548 | liver |
| 553 | liver |
| 568 | liver |
| 582 | liver |
| 583 | liver |
| 591 | liver |
| 606 | liver |
| 616 | liver |
| 620 | liver |
| 661 | liver |
| 680 | liver |
| 684 | liver |
| 693 | liver |
| 705 | liver |
| 711 | liver |
| 701 | liver |
| 613 | liver |
| 505 | liver |

TABLE 8I
Sequences for the differentiation and/or detection of melanocytes.

| SEQ ID NO: | |
|---|---|
| Genomic | Tissue |
| 418 | melanocyte |
| 423 | melanocyte |
| 443 | melanocyte |
| 455 | melanocyte |
| 478 | melanocyte |
| 487 | melanocyte |
| 488 | melanocyte |
| 496 | melanocyte |
| 523 | melanocyte |
| 545 | melanocyte |
| 618 | melanocyte |
| 644 | melanocyte |
| 656 | melanocyte |
| 671 | melanocyte |
| 672 | melanocyte |
| 674 | melanocyte |
| 681 | melanocyte |
| 471 | melanocyte |
| 572 | melanocyte |
| 640 | melanocyte |
| 576 | melanocyte |

TABLE 8J
Sequences for the differentiation and/or detection of placenta.

| SEQ ID NO: | |
|---|---|
| Genomic | Tissue |
| 436 | placenta |
| 538 | placenta |
| 419 | placenta |

TABLE 8K
Sequences for the differentiation and/or detection of skeletal muscle.

| SEQ ID NO: | |
|---|---|
| Genomic | Tissue |
| 432 | skeletal muscle |
| 453 | skeletal muscle |
| 466 | skeletal muscle |
| 469 | skeletal muscle |
| 472 | skeletal muscle |
| 498 | skeletal muscle |
| 500 | skeletal muscle |
| 514 | skeletal muscle |
| 517 | skeletal muscle |
| 530 | skeletal muscle |
| 544 | skeletal muscle |
| 547 | skeletal muscle |
| 573 | skeletal muscle |
| 577 | skeletal muscle |
| 585 | skeletal muscle |
| 622 | skeletal muscle |
| 657 | skeletal muscle |
| 664 | skeletal muscle |
| 668 | skeletal muscle |
| 673 | skeletal muscle |
| 686 | skeletal muscle |
| 441 | skeletal muscle |
| 424 | skeletal muscle |
| 502 | skeletal muscle |
| 519 | skeletal muscle |
| 629 | skeletal muscle |
| 420 | skeletal muscle |
| 612 | skeletal muscle |
| 621 | skeletal muscle |
| 624 | skeletal muscle |
| 678 | skeletal muscle |
| 658 | skeletal muscle |

TABLE 8L
Sequences for the differentiation and/or detection of sperm.

| SEQ ID NO: | |
|---|---|
| Genomic | Tissue |
| 413 | sperm |
| 414 | sperm |
| 421 | sperm |
| 428 | sperm |
| 431 | sperm |
| 437 | sperm |
| 464 | sperm |
| 470 | sperm |
| 486 | sperm |
| 507 | sperm |
| 510 | sperm |
| 543 | sperm |
| 560 | sperm |
| 578 | sperm |
| 581 | sperm |
| 623 | sperm |
| 665 | sperm |
| 694 | sperm |

TABLE 9A
Sequences for the differentiation and/or detection of T-lymphocytes.

| SEQ ID NO: | |
|---|---|
| Genomic | Tissue |
| 730 | CD4 T-lymphocyte |
| 760 | CD4 T-lymphocyte, CD8 T- |
| | lymphocyte |
| 766 | CD4 T-lymphocyte, CD8 T- |
| | lymphocyte |
| 778 | CD4 T-lymphocyte, CD8 T- |
| | lymphocyte |
| 786 | CD4 T-lymphocyte, CD8 T- |
| | lymphocyte |
| 715 | CD4 T-lymphocyte, CD8 T- |
| | lymphocyte |
| 799 | CD4 T-lymphocyte, CD8 T- |
| | lymphocyte |

TABLE 9B
Sequences for the differentiation and/or detection of embryonic liver.

| SEQ ID NO: | |
|---|---|
| Genomic | Tissue |
| 752 | embryonic liver |
| 763 | embryonic liver |

TABLE 9C
Sequences for the differentiation and/or detection
of embryonic skeletal muscle.

| SEQ ID NO: | |
|---|---|
| Genomic | Tissue |
| 781 | embryonic skeletal |
| | muscle |
| 717 | embryonic skeletal |
| | muscle |
| 719 | embryonic skeletal |
| | muscle |
| 714 | embryonic skeletal |
| | muscle |

TABLE 9D
Sequences for the differentiation and/or detection of fibroblasts.

| SEQ ID NO: | |
|---|---|
| Genomic | Tissue |
| 720 | fibroblast |
| 723 | fibroblast |
| 725 | fibroblast |
| 733 | fibroblast |
| 737 | fibroblast |
| 738 | fibroblast |
| 753 | fibroblast |
| 755 | fibroblast |
| 758 | fibroblast |
| 761 | fibroblast |
| 764 | fibroblast |
| 767 | fibroblast |
| 768 | fibroblast |
| 769 | fibroblast |
| 770 | fibroblast |
| 774 | fibroblast |
| 780 | fibroblast |
| 782 | fibroblast |
| 784 | fibroblast |
| 788 | fibroblast |
| 792 | fibroblast |
| 801 | fibroblast |
| 809 | fibroblast |
| 814 | fibroblast |
| 817 | fibroblast |
| 818 | fibroblast |
| 718 | fibroblast |
| 741 | fibroblast |
| 751 | fibroblast |
| 773 | fibroblast |
| 823 | fibroblast |
| 772 | fibroblast |
| 800 | fibroblast |
| 821 | fibroblast |
| 744 | fibroblast |
| 717 | fibroblast |
| 719 | fibroblast |
| 714 | fibroblast |

TABLE 9E
Sequences for the differentiation and/or detection of heart muscle.

| SEQ ID NO: | |
|---|---|
| Genomic | Tissue |
| 759 | heart muscle |
| 822 | heart muscle |
| 824 | heart muscle |

TABLE 9F
Sequences for the differentiation and/or detection of keratinocytes.

| SEQ ID NO: | |
|---|---|
| Genomic | Tissue |
| 716 | keratinocyte |
| 724 | keratinocyte |
| 727 | keratinocyte |
| 728 | keratinocyte |
| 729 | keratinocyte |
| 732 | keratinocyte |
| 734 | keratinocyte |
| 739 | keratinocyte |
| 740 | keratinocyte |
| 743 | keratinocyte |
| 745 | keratinocyte |
| 748 | keratinocyte |
| 762 | keratinocyte |
| 765 | keratinocyte |
| 771 | keratinocyte |
| 776 | keratinocyte |
| 777 | keratinocyte |
| 785 | keratinocyte |
| 789 | keratinocyte |
| 791 | keratinocyte |
| 795 | keratinocyte |
| 796 | keratinocyte |
| 803 | keratinocyte |
| 804 | keratinocyte |
| 805 | keratinocyte |
| 806 | keratinocyte |
| 811 | keratinocyte |
| 812 | keratinocyte |
| 813 | keratinocyte |
| 815 | keratinocyte |
| 816 | keratinocyte |
| 819 | keratinocyte |
| 820 | keratinocyte |
| 778 | keratinocyte |
| 786 | keratinocyte |
| 741 | keratinocyte |
| 751 | keratinocyte |
| 773 | keratinocyte |
| 744 | keratinocyte |
| 717 | keratinocyte |
| 719 | keratinocyte |
| 714 | keratinocyte |
| 807 | keratinocyte |

TABLE 9G
Sequences for the differentiation and/or detection of liver.

| SEQ ID NO: | |
|---|---|
| Genomic | Tissue |
| 746 | liver |
| 757 | liver |
| 793 | liver |
| 763 | liver |
| 713 | liver |
| 787 | liver |
| 790 | liver |
| 715 | liver |
| 799 | liver |

TABLE 9H
Sequences for the differentiation and/or detection of melanocytes.

| SEQ ID NO: | |
|---|---|
| Genomic | Tissue |
| 721 | melanocyte |
| 722 | melanocyte |
| 726 | melanocyte |
| 731 | melanocyte |
| 735 | melanocyte |
| 736 | melanocyte |
| 742 | melanocyte |
| 747 | melanocyte |
| 749 | melanocyte |
| 750 | melanocyte |
| 754 | melanocyte |
| 756 | melanocyte |
| 775 | melanocyte |
| 779 | melanocyte |
| 794 | melanocyte |
| 808 | melanocyte |
| 810 | melanocyte |
| 744 | melanocyte |
| 717 | melanocyte |
| 719 | melanocyte |
| 714 | melanocyte |
| 718 | melanocyte |
| 741 | melanocyte |
| 751 | melanocyte |
| 773 | melanocyte |

TABLE 9I
Sequences for the differentiation and/or detection of placenta.

| SEQ ID NO: | |
|---|---|
| Genomic | Tissue |
| 823 | placenta |
| 824 | placenta |
| 820 | placenta |

TABLE 9J
Sequences for the differentiation and/or detection of skeletal muscle.

| SEQ ID NO: | |
|---|---|
| Genomic | Tissue |
| 783 | skeletal muscle |
| 797 | skeletal muscle |
| 798 | skeletal muscle |
| 802 | skeletal muscle |
| 752 | skeletal muscle |
| 823 | skeletal muscle |
| 772 | skeletal muscle |
| 800 | skeletal muscle |
| 821 | skeletal muscle |
| 759 | skeletal muscle |
| 822 | skeletal muscle |
| 824 | skeletal muscle |
| 820 | skeletal muscle |
| 713 | skeletal muscle |
| 787 | skeletal muscle |
| 790 | skeletal muscle |
| 807 | skeletal muscle |

### EXAMPLES

### Example 1

[0564] More than 300 specific regions of differential methylation have been identified in primary cells and tissues. Some of them are located in known promoter regions, while others are located in intra- or intergenic regions throughout the chromosomes 20, 22 and 6.

### a) Materials and Methods

[0565] Samples: Studied primary cell cultures included lymphocytes (selected and sorted by CD4 and CD8 antigen expression), melanocytes, keratinocytes and fibroblasts. Cells were harvested and kept at −80° C. until RNA isolation. Isolated RNA samples from Heart, Liver and Skeletal Muscle were purchased from commercial suppliers (Ambion) and kept at −80° C. until use in reverse transcription.

### Analyzed Genes

[0566] 10 genes were selected for the expression analysis considering the location of regions of differential methylation. In all of them, the region of differential methylation located in the promoter region, the table below under results provides the names of the analyzed genes.

### Total RNA Isolation and RT-PCR:

[0567] Total RNA was isolated from cells and tissues using RNeasy kits (Qiagen, Hilden, Germany). Concentration and purity of the obtained RNA was determined spectrophotometrically, while the integrity was determined by electrophoresis on denaturing IM urea—2% agarose gel. cDNA was prepared using Omniscript RT kit (Qiagen, Hilden, Germany) with random hexamers in accordance to manufacturer's conditions. PCR was performed using 3 μl of the prepared cDNA, specific primers and HotStartTaq DNA polymerase kit in accordance with manufacturer's conditions. The PCR parameters used were: 15 min at 95° C. followed by 40 cycles of 1 min at 94° C., 1 min at the annealing temperature specific for each primer pair, and 1 min at 72° C., ending with a final extension for 10 min at 72° C. Primers were designed to bind in successive exons in order to avoid amplification in case contaminating genomic DNA was present. Amplification conditions for each fragment were determined experimentally by amplifying cDNA produced from Universal Human RNA (BioCat, Heidelberg, Germany), which is a pool total RNAs isolated from several tissues. The sequences of the specific primers for each analyzed gene are provided in the accompanying sequence listing according to the table below. It further shows the particular annealing temperature used in the amplification reaction. PCR products were separated through a 2.5% Agarose gel.

### b) Results

[0568] All analyzed genes showed a correlation between high methylation and gene silencing. In all of them, the region of differential methylation was located in the promoter region. Table 10 shows the results for each analyzed gene. As an example the results for the three genes MYO18B, SLC22A1 and PLG are shown in FIG. 2. As a control the expression of SERPINB5 was also studied. Finally the expression of a housekeeping gene in all the studied samples demonstrated the feasibility of the assay and gave a baseline for the semiquantitative analysis of the expression.

TABLE 10
Analyzed genes, primers and annealling temperatures and results.

| | | Differential | | | | |
|---|---|---|---|---|---|---|
| | | methylation | | | Annealing | Correlation |
| Gene | Gene SEQ | region | Forward Primer | Reverse Primer | temperature | methylation/ |
| Name | ID NO: | position | SEQ ID NO: | SEQ ID NO: | (° C.) | expression |
| RAET1E | 127 | Promoter | 4945 | 4946 | 60 | Inverse |
| PIB5PA | 53 | Promoter | 4947 | 4948 | 60 | Inverse |
| PLG | 171 | Promoter | 4949 | 4950 | 60 | Inverse |
| TGM3 | 180 | Promoter | 4951 | 4952 | 60 | Inverse |
| SLC22A1 | 170 | Promoter | 4953 | 4954 | 60 | Inverse |
| RP3- | 151 | Promoter | 4955 | 4956 | 60 | Inverse |
| 398D13.4 | | | | | | |
| OSM | 39 | Promoter | 4957 | 4958 | 63 | Inverse |
| MYO18B | 12 | Promoter | 4959 | 4960 | 60 | Inverse |
| CTA- | 43 | Promoter | 4961 | 4962 | 60 | Inverse |
| 299D3.6 | | | | | | |
| PARVG | 85 | Promoter | 4963 | 4964 | 60 | Inverse |
| SERPINB5 | | Promoter | 4965 | 4966 | 60 | Inverse |
| | | | | | | (Positive |
| | | | | | | control) |
| ACTB1 | | | 4967 | 4968 | 56 | No correlation |
| | | | | | | (Negative |
| | | | | | | control) |

### Example 2

### Large-Scale DNA Methylation Profiling of Human Chromosomes 6, 20 and 22

[0569] Using bisulfite DNA sequencing, we report high-resolution methylation reference profiles of human chromosomes 6, 20 and 22, providing a resource of about 1.9 million CpG measurements in 43 samples derived from 12 different (healthy) tissues.

[0570] It was the aim of the study to establish DNA methylation reference profiles for three human chromosomes from a number of healthy (no known disease phenotype) human tissues and primary cells. The study was further controlled for age and sex and comprised the analysis of 43 different samples derived from sperm, various primary cell types (dermal fibroblasts, dermal keratinocytes, dermal melanocytes, CD4⁺ and CD8⁺ lymphocytes) and tissues (heart muscle, skeletal muscle, liver and placenta, table 9). Tissues were pooled from up to three age- and sex-matched individuals (see table 9 for details). Primary cells were cultured for no more than three passages to minimize the risk of introducing aberrant methylation. Additionally, the methylation of selected amplicons were compared before and after cultivation with no difference in average methylation being detected. As dermal fibroblasts, keratinocytes and melanocytes are the major cell types constituting the human epidermis, we compared the average methylation of selected amplicons in these cell types with the corresponding values derived from additional human skin samples. No significant deviation between the methylation of the primary cells and tissues were detected, indicating that cell culturing for a limited number of passages does not change DNA methylation.

[0571] In total, we analyzed 2,524 amplicons associated with 873 genes on chromosomes 6, 20 and 22. Based on Ensembl (NCBI34) annotation, the amplicons were assigned to 6 distinct categories. Taking the number of biological and technical replicates into account, we have determined the methylation status of 1.88 million CpG sites. The corresponding data have been deposited into the public HEP database and can be accessed at www.epigenome.org.

### Material and Methods

[0572] Cell and Tissue samples: Tissue samples were obtained from following sources: Asterand, (Detroit, US), Pathlore Plc. (Nottingham, UK), Tissue Transformation Technologies (T-cubed, Edison, US), Northwest Andrology (Missoula, US), NDRI (Philadelphia, US) and Biocat GmBH (Heidelberg, Germany). Only anonymized samples were used and ethical approval was obtained for the study. Contamination by blood cells is estimated to be low as blood specific methylation profiles were not detected in the tissues. Human primary cells were acquired from Cascade Biologics (Mansfield, United Kingdom), Cell Applications Inc. (San Diego, United States), Analytical Biological Services Inc. (Wilmington, US), Cambrex Bio Science (Verviers, Belgium) and from the DIGZ (Berlin, Germany). Dermal fibroblasts, keratinocytes and melanocytes were cultured according to the supplier's recommendations up to a maximum of 3 passages reducing the risk of aberrant methylation due to extended culturing. CD4⁺ T-lymphocytes were isolated from fresh whole blood by depletion of CD4⁺ monocytes followed by a negative selection. CD8⁺ cells were isolated from fresh whole blood by positive selection. Subsequent FACS analysis confirmed a purity of CD4⁺/CD8⁺ T-lymphocytes greater than 90%. In some cases, DNA samples were pooled according to the sex and age of the donors. All genders were confirmed by sex-specific PCR.

[0573] Amplicon selection and classification: Amplicons were selected and classified based on Ensembl (build NCBI 34) annotation, amplicons were designed in the following genomic regions:

5′-UTR: Overlapping by at least 200 bp with or within a core region of 2,000 bp upstream to 500 bp downstream of the TSS. Where multiple sites were annotated per gene, the first annotated TSS was used.
Exonic: Greater than 50% and at least 200 bp of amplicon overlapping with annotated exon. Intronic: Greater than 50% and at least 200 bp of amplicon overlapping with annotated intron. ECR (evolutionary conserved regions): ≧70% DNA sequence similarity (including ≧4 CpGs) for at least 100 bp between human and mouse non-coding sequences. Out of 3,249 ECRs identified on chromosome 20, 290 intergenic and 206 intronic (496 in total) ECRs were selected.
Sp1: Overlapping with putative Sp1 sites identified by ChIP-chip analysis.
ncRNA: CD box snoRNAs as described by Lestrade, L. and Weber, M. J. snoRNA-LBME-db, a comprehensive database of human H/ACA and C/D box snoRNAs. Nucleic Acids Res. 34, 158-162 (2006) and miRNAs as reported by Griffiths-Jones, S. The microRNA Registry. Nucleic Acids Res. 32, 109-111 (2004) located on chromosome 22.
Other: amplicons that are not located within a gene or a 5′-UTR and additionally do not belong to any other category. CGI (CpG island) were classified based on the criteria by Gardiner-Garden and Frommer J. Mol. Biol. 196, 261-282 (1987).

[0574] DNA extraction, PCR amplification and sequencing: DNA was extracted using the Qiagen DNA Genomic-tip kit according the manufacturer's recommendation. After quantification, DNA was bisulfite converted as previously described in PCT/WO/2005/038051 (2005). Bisulfite-specific primers with a minimum length of 18 bp were designed using a modified primer-3 program. The target sequence of the designed primers contained no CpGs allowing for an unbiased amplification of both hypo- and hypermethylated DNAs. All primers were tested for their ability to yield high quality sequences. Primers that gave rise to an amplicon of the expected size using non-bisulfite treated DNA as a template were discarded, thus ensuring the specificity for bisulphite-converted DNAs. Primers were also tested for specificity on bisulfite DNA by electronic PCR. DNA amplification was set up in 96-well plates using an automated pipeline. PCR amplicons were quality controlled by agarose gel electrophoresis, re-arrayed into 384-well plates for high-throughput processing, cleaned up using ExoSAP-IT (USB Corporation, Cleveland, Ohio) to remove any excess nucleotides and primers and sequenced directly in the forward and reverse directions. Sequencing was performed on ABI 3730 capillary sequencers using 1/32nd dilution of ABI Prism BigDye terminator V3.1 sequencing chemistry after hotstart (96° C. for 30 seconds) thermocycling (92° C. for 5 seconds, 50° C. for 5 seconds, 60° C. for 120 seconds×44 cycles) and ethanol precipitation. PCR fragments were sequenced using the same PCR amplification primers. PCR primers for the differentially methylated amplificates are provided in Table 4. Trace files and methylation signals at a given CpG site were quantified using the software ESME as previously described in Bioinformatics 20, 3005-3012 (2004).

[0575] The bisulfite sequencing-based approach chosen here allows one to measure DNA methylation with high reproducibility and accuracy, as independent measurements are derived from both the sense and antisense strands of a PCR amplicon (R=0.87; N=557,837). In addition, about 4.1% of the amplicons were subjected to independent PCR amplification and sequencing. These technical replicates also displayed high correlation (R=0.9; N=15,655). Furthermore, the signal is independent of the position of the measured CpG within the amplicon, which is supported by high correlation between measurements of the same CpGs in overlapping amplicons (R=0.85; N=91,528).

[0576] RNA extraction and RT-PCR. Aliquots of the same samples of the human melanocytes, keratinocytes, fibroblasts, CD4⁺ and CD8⁺ cells that were used for methylation analysis were used for RNA analysis. Primary cell cultures (maximum of 3 passages) of human melanocytes, keratinocytes and dermal fibroblasts cells were harvested and kept at −80° C. until RNA isolation. Isolated RNA samples from heart, liver and skeletal muscle were purchased from Ambion (Austin, US) and kept at −80° C. until used for reverse transcription. Total RNA was isolated using the RNeasy kit from Qiagen (Hilden, Germany) followed by cDNA synthesis using the Omniscript RT kit from the same supplier and random hexamers. PCR (92° C. for 1 minute, 55-63° C. (depending on assay) for 1 minute, 72° C. for 1 minute for 30 to 40 cycles (depending on assay)) was performed using the HotStartTaq DNA polymerase kit (Qiagen) with 3 μl of the prepared cDNA and gene-specific primers. All kits were used according to the manufacturer's recommendations. PCR products were analyzed by electrophoresis on 2.5% agarose gels. Universal RNA was obtained from Biocat (Heidelberg, Germany) and total RNA isolated from brain and sperm from Stratagene (La Jolla, Calif., US).

[0577] Analysis and Statistical methods: Methylation profiles were calculated as described previously in PLoS Biol. 2, 2170-2182 (2004) and are available from the HEP database/browser at www.epigenome.org. The methylation profile of each individual amplicon is provided in FIGS. 1.1 to 1.403.

### Results

[0578] Each individual matrix represents the sequencing data for an individual amplificate. Each of the discrete blocks of the matrix represent a single sample type and are labeled ‘A’ through ‘L’, said letters representing in each case the following tissue/cell types: A: Melanocytes; B: Heart Muscle; C: Skeletal muscle; D: Liver; E: Sperm; F: Embryonic skeletal muscle; G: Embryonic liver; H: Placental; I: Fibroblast; J: Keratinocytes; K: CD8; L: CD4.

[0579] The SEQ ID NO: of the genomic region of each amplificate is shown to the left of the matrices. This may be cross referenced in Table 4 to determine the amplificate and primer sequences. Each row of a matrix represents a single CpG site within the amplificate (according to the corresponding SEQ ID NO: from Table 4) and is numbered accordingly, each column represents a single pooled DNA sample.

[0580] The degree of methylation is represented by the shade of each position within the column from black representing 100% methylation to light gray representing 0% methylation. White positions represented a measurement for which no data was available.

### Differentially Methylated Regions (DMRS)

[0581] Kruskall-Wallis tests were used to determine differential methylation between tissues, measuring the proportion of uncorrected p-values that were smaller 0.001 for all CpGs. As this test is insensitive to samples that were only measured in a single sample such as sperm and placenta, the obtained number of DMRs is unlikely to be overstated due to putative aberrant methylation within these samples. Some DMRs were experimentally validated by sequencing independent DNA samples. Equality between two groups (age and sex) was performed using Wilcoxon tests.

[0582] Median CpG methylation values were used for the analysis of co-methylation. CpGs for which methylation values derived from both the forward and reverse strands displayed a difference of greater than 10% between the two values were excluded. Methylation changes were calculated based on the absolute methylation differences between CpG pairs of identical samples. To exclude a bias introduced by the amplicon selection, the analysis was performed using both, individual CpGs (window size 20,000 bp) and CpGs of the same amplicons. Co-methylation of CpGs was described as a function of the distance (in bp) displaying the observed ratio of similar methylation degree.

[0583] For scatter plots, equal amounts of measurements were binned and ranked by numerical order of the X-axis values, representing means of X− and Y− data. For box plots and histograms, data were binned according to the intervals indicated on the X-axis containing different numbers of measurements.

[0584] As a measure for the probability of differential methylation, amplicons were sorted by their p-value and binned by rank into groups of 200 and scanned using 211 vertebrate position-weight matrices from the TRANSFAC library40 (version 3.2). For each motif, we picked a threshold such that it matched around 40% of amplicons and performed a □2 test to determine if the hit rate of the motif varied significantly between the highest and lowest 200 amplicons, ranked by P-value of differential methylation.

[0585] Tables 6 and 7 provide an overview of the genomic regions and ranges of methylation within which the actual value of methylation of said genomic regions lies specific of the said cells, tissues and/or organs. The actual value of methylation is shown in FIGS. 1.1-1.403.

[0586] Table 11 provides an overview of 43 different samples derived from sperm, various primary cell types (dermal fibroblasts, dermal keratinocytes, dermal melanocytes, CD4⁺ and CD8⁺ lymphocytes) and tissues (heart muscle, skeletal muscle, liver and placenta. The study was controlled for age and sex and comprised the analysis. Tissues were pooled from up to three age- and sex-matched individuals.

[0587] Table 12 provides summary statistics.

[0588] Table 13 provides an overview of the most preferred of the genes or genomic regions and ranges of methylation within which the actual value of methylation of said genomic regions lies specific of the said cells, tissues and/or organs. The actual value of methylation is shown in FIGS. 1.1-1.403. We found 17% of the 873 analyzed genes differentially methylated in their 5′-untranslated regions (5′-UTR), in at least one of the tissues examined. Differential methylation is observed more frequently in evolutionary conserved regions (ECRs) than within 5′-UTRs, suggesting that methylation has a functional role beyond a direct effect on transcription via promoter methylation. About one third of the differentially methylated 5′-UTRs are inversely correlated with transcription of the respective mRNAs. We did not find any significant sex or age-dependent differences in our study, indicating that methylation is ontogenetically more stable than previously anticipated.

TABLE 11

| | | Age | | |
|---|---|---|---|---|
| # | Tissue/cell type | (average) | Sex | Pool of |
| 1 | heart muscle | 25 Y | female | 3 |
| 2 | heart muscle | 23 Y | male | 3 |
| 3 | heart muscle | 25 Y | male | 3 |
| 4 | heart muscle | 78 Y | male | 3 |
| 5 | heart muscle | 74 Y | male | 3 |
| 6 | heart muscle | 62 Y | male | 3 |
| 7 | skeletal muscle | 19 Y | male | 3 |
| 8 | skeletal muscle | 30 Y | male | 3 |
| 9 | skeletal muscle | 22 Y | male | 3 |
| 10 | skeletal muscle | 59 Y | male | 3 |
| 11 | skeletal muscle | 67 Y | male | 3 |
| 12 | skeletal muscle | 74 Y | male | 3 |
| 13 | skeletal muscle | 65 Y | female | 3 |
| 14 | skeletal muscle | 67 Y | female | 3 |
| 15 | skeletal muscle | 84 Y | female | 2 |
| 16 | liver | 23 Y | male | 3 |
| 17 | liver | 23 Y | male | 3 |
| 18 | liver | 30 Y | male | 3 |
| 19 | liver | 82 Y | male | 3 |
| 20 | liver | 65 Y | male | 3 |
| 21 | liver | 74 Y | male | 3 |
| 22 | liver | 70 Y | female | 3 |
| 23 | liver | 81 Y | female | 3 |
| 24 | sperm | 24 Y | male | 3 |
| 25 | fetal skeletal muscle | 23 W | male | 3 |
| 26 | fetal liver | 24 W | male | 3 |
| 27 | placenta | NB | female | 3 |
| 28 | melanocytes | 30 Y | female | 1 |
| 29 | melanocytes | 41 Y | female | 1 |
| 30 | melanocytes | 42 Y | female | 1 |
| 31 | dermal fibroblasts | 43 Y | female | 2 |
| 32 | dermal fibroblasts | 41 Y | female | 2 |
| 33 | dermal fibroblasts | 39 Y | female | 2 |
| 34 | dermal keratinocytes | 43 Y | female | 3 |
| 35 | dermal keratinocytes | 39 Y | female | 3 |
| 36 | dermal keratinocytes | 33 Y | female | 2 |
| 37 | CD4 lymphocytes | 20 Y | male | 1 |
| 38 | CD8 lymphocytes | 59 Y | male | 1 |
| 39 | CD8 lymphocytes | 60/61 Y | female | 1 |
| 40 | CD8 lymphocytes | 62 Y | male | 1 |
| 41 | CD4 lymphocytes | 59/60 Y | female | 1 |
| 42 | CD4 lymphocytes | 61 Y | female | 1 |
| 43 | CD4 lymphocytes | 62 Y | female | 1 |

[0589] Table 11 provides an overview of 43 different samples derived from sperm, various primary cell types (dermal fibroblasts, dermal keratinocytes, dermal melanocytes, CD4⁺ and CD8⁺ lymphocytes) and tissues (heart muscle, skeletal muscle, liver and placenta.

TABLE 12

| | | Chromosome | Chromosome | Chromosome |
|---|---|---|---|---|
| | Total | 6 | 20 | 22 |
| CpG islands on chromosome | 2,279 | 1,07 | 662 | 547 |
| CpG islands covered | 511 | 256 | 29 | 226 |
| CpG islands percentage covered | 22% | 24% | 4% | 41% |
| Genes covered | 873 | 383 | 89 | 401 |
| Exons covered | 853 | 454 | 23 | 376 |
| Introns covered | 920 | 465 | 118 | 337 |
| Number of tissues analyzed | 12 | | | |
| Number of samples analyzed | 43 | | | |
| Average length of amplicon +/− SD | 411 +/− | | | |
| | 77 bp | | | |
| Average number of CpGs per | 16 +/− 10.8 | | | |
| amplicon | | | | |
| Total number of different amplicons | 2,524 | | | |
| Number of CpGs analyzed | 1,885,003 | | | |

[0590] Table 12 provides summary statistics.

TABLE 13

| Gene | Ensembl ID | CD4 T-lymphocytes | CD8 T-lymphocytes | Embryonic liver | Em. ske. muscle |
|---|---|---|---|---|---|
| ZNRF3 | ENSG00000183579 | 90 | 90 | 80 | 30 |
| SLC7A4 | OTTHUMG00000030129 | 0 | 0 | 0 | 0 |
| Myosin-18B | ENSG00000133454 | 100 | 90 | 80 | 40 |
| (MYO18B) | | | | | |
| Glycoprotein Ib | OTTHUMT00000075045 | 10 | 10 | 10 | 70 |
| (platelet), beta | | | | | |
| polypeptide | | | | | |
| RP1-47A17.8 | OTTHUMG00000030878 | 80 | 80 | 70 | 20 |
| Oncostatin M | ENSG00000099985 | 0 | 0 | 40 | 90 |
| (OSM) | | | | | |
| CTA-299D3.6 | OTTHUMG00000030140 | 90 | 90 | 80 | 70 |
| CTA-941F9.6 | OTTHUMG00000030231 | 90 | 90 | 90 | 80 |
| Cytohesin-4 | ENSG00000100055 | 0 | 0 | 30 | 50 |
| PIB5PA | ENSG00000185133 | 60 | 70 | 60 | 10 |
| SUSD2 | ENSG00000099994 | 100 | 90 | 80 | 40 |
| No gene associated | NA | 90 | 90 | 80 | 30 |
| RP3-438O4.2 | OTTHUMG00000030922 | 90 | 90 | 90 | 30 |
| RP4-756G23.1 | OTTHUMG00000030852 | 90 | 90 | 80 | 50 |
| Somatostatin | ENSG00000183473 | 90 | 90 | 80 | 30 |
| receptor type 3 | | | | | |
| (SSTR3) | | | | | |
| Bcl-2 interacting | ENSG00000100290 | 20 | 40 | 40 | 50 |
| killer (BIK) | | | | | |
| GAS2L1 | ENSG00000185340 | 90 | 90 | 90 | 80 |
| RP3-355C18.2 | OTTHUMG00000030072 | 60 | 60 | 80 | 70 |
| Gamma-parvin | ENSG00000138964 | 30 | 20 | 70 | 90 |
| CARMA 3 | ENSG00000100065 | 100 | 100 | 90 | NA |
| TMPRSS6 | ENSG00000187045 | 10 | 30 | 50 | 0 |
| Platelet-derived | ENSG00000100311 | 20 | 20 | 20 | 0 |
| growth factor B | | | | | |
| chain precursor | | | | | |
| (PDGFB) | | | | | |
| CELSR1 Cadherin | ENSG00000075275 | 10 | 10 | 40 | 60 |
| T-box transcription | ENSG00000184058 | 10 | 10 | NA | 40 |
| factor (TBX1) | | | | | |
| Q6ZRW2_HUMAN | ENSG00000178199 | 40 | 30 | 70 | 30 |
| NKG2DL4 | ENSG00000164520 | 70 | 90 | 70 | 70 |
| (RAET1E) | | | | | |
| DAAM2 | ENSG00000146122 | 90 | 90 | 90 | 60 |
| RP1-47M23.1 | OTTHUMG00000015313 | 10 | 0 | 20 | 40 |
| RP11-397G17.1 | OTTHUMG00000014829 | 90 | 90 | 80 | 90 |
| Nesprin-1 (Syne-1) | ENSG00000131018 | 100 | 100 | 70 | NA |
| Myogenic repressor | ENSG00000112559 | 80 | 80 | 50 | 50 |
| I-mf (MDFI) | | | | | |
| RP11-174C7.4 | OTTHUMG00000015553 | 80 | 80 | 80 | 40 |
| CMAH | OTTHUMG00000016099 | 90 | 100 | 90 | 80 |
| PKHD1 | ENSG00000170927 | 90 | 80 | 70 | 50 |
| glutathione | OTTHUMG00000016307 | 20 | 10 | 30 | 80 |
| peroxidase 5 | | | | | |
| (GPX5) | | | | | |
| GRIK2 | ENSG00000164418 | 10 | 20 | 10 | 10 |
| SLC22A1 | ENSG00000112499 | 100 | 100 | 100 | 90 |
| RP11-235G24.1 | OTTHUMG00000015959 | 90 | 90 | 80 | 90 |
| TBX18 | ENSG00000112837 | 10 | 20 | 0 | 40 |
| TGM3 | ENSG00000125780 | 90 | 80 | 70 | NA |
| RIN2 | OTTHUMG00000031996 | 30 | 50 | 40 | 20 |
| SLC24A3 | OTTHUMG00000031993 | 100 | 100 | 100 | 60 |
| Q9ULE8_HUMAN | ENSG00000188559 | 100 | 100 | 80 | NA |
| C20orf117 | OTTHUMG00000032395 | 80 | 90 | 70 | 10 |
| Breast carcinoma | ENSG00000124243 | 10 | 10 | 10 | 20 |
| amplified sequence | | | | | |
| 4 (BCAS4) | | | | | |
| nuclear factor of | OTTHUMG00000032747 | 100 | 90 | 90 | 40 |
| activated T-cells | | | | | |
| (NFATC2) | | | | | |
| SCUBE1 | ENSG00000159307 | 10 | 10 | 0 | 40 |

| Gene | Fibroblasts | Heart muscle | Keratinocytes | Liver | Melanocytes | Placenta | Skelatal muscle | Sperm |
|---|---|---|---|---|---|---|---|---|
| ZNRF3 | 80 | 70 | 90 | 90 | 90 | 60 | 30 | 100 |
| SLC7A4 | 0 | 0 | 10 | 10 | 50 | 10 | 0 | 0 |
| Myosin-18B | 90 | 60 | 90 | 90 | 90 | 50 | 40 | NA |
| (MYO18B) | | | | | | | | |
| Glycoprotein Ib | 90 | 20 | 40 | 10 | 50 | 70 | 80 | 0 |
| (platelet), beta | | | | | | | | |
| polypeptide | | | | | | | | |
| RP1-47A17.8 | 20 | 80 | 90 | 80 | 70 | 70 | 60 | 90 |
| Oncostatin M | 90 | 90 | 100 | 90 | 100 | 90 | 90 | 90 |
| (OSM) | | | | | | | | |
| CTA-299D3.6 | 70 | 70 | 90 | 80 | 30 | 70 | 70 | 100 |
| CTA-941F9.6 | 90 | 90 | 10 | 80 | 90 | 90 | 80 | 90 |
| Cytohesin-4 | 50 | 50 | 10 | 50 | 60 | 30 | 50 | 90 |
| PIB5PA | 10 | 10 | 10 | 20 | 10 | 10 | 10 | 60 |
| SUSD2 | 50 | 80 | 40 | 60 | 50 | 60 | 50 | 90 |
| No gene associated | 10 | 40 | 10 | 60 | 60 | 20 | 20 | 90 |
| RP3-438O4.2 | 10 | 70 | 20 | 80 | 20 | 20 | 20 | 90 |
| RP4-756G23.1 | 50 | 80 | 80 | 90 | 20 | 70 | 50 | 90 |
| Somatostatin | 10 | 20 | 40 | 30 | 20 | 20 | 20 | 90 |
| receptor type 3 | | | | | | | | |
| (SSTR3) | | | | | | | | |
| Bcl-2 interacting | 80 | 80 | 90 | 80 | 80 | 80 | 50 | 90 |
| killer (BIK) | | | | | | | | |
| GAS2L1 | 80 | 80 | 10 | 90 | 90 | 90 | 70 | 20 |
| RP3-355C18.2 | 60 | 80 | 10 | 70 | 80 | 50 | 50 | 100 |
| Gamma-parvin | 90 | 90 | 90 | 80 | 90 | 80 | 90 | 100 |
| CARMA 3 | 80 | 90 | 80 | 100 | 90 | 80 | 50 | 100 |
| TMPRSS6 | 10 | 30 | 60 | 80 | 10 | 30 | 0 | 0 |
| Platelet-derived | 50 | 30 | 10 | 70 | 70 | 20 | 20 | 0 |
| growth factor B | | | | | | | | |
| chain precursor | | | | | | | | |
| (PDGFB) | | | | | | | | |
| CELSR1 Cadherin | 70 | 70 | 80 | 80 | 80 | 80 | 60 | 0 |
| T-box transcription | 80 | 10 | 0 | 20 | 70 | 80 | 70 | NA |
| factor (TBX1) | | | | | | | | |
| Q6ZRW2_HUMAN | 30 | 60 | 20 | 80 | 40 | 60 | 20 | 100 |
| NKG2DL4 | 50 | 80 | 0 | 100 | 70 | 50 | 50 | 100 |
| (RAET1E) | | | | | | | | |
| DAAM2 | 90 | 90 | 90 | 20 | 90 | 90 | 80 | 100 |
| RP1-47M23.1 | 40 | 80 | 70 | 40 | 60 | 60 | 60 | 90 |
| RP11-397G17.1 | 80 | 90 | 20 | 50 | 80 | 70 | 80 | 90 |
| Nesprin-1 (Syne-1) | 10 | 20 | 10 | 40 | 0 | 60 | 20 | 90 |
| Myogenic repressor | 80 | 40 | 0 | 50 | 60 | 50 | 80 | 0 |
| I-mf (MDFI) | | | | | | | | |
| RP11-174C7.4 | 0 | 50 | 70 | 80 | 50 | 40 | 30 | 80 |
| CMAH | 90 | 90 | 0 | 90 | 100 | 90 | 80 | 0 |
| PKHD1 | 40 | 50 | 10 | 40 | 30 | 50 | 60 | 100 |
| glutathione | 40 | 50 | 90 | 70 | 40 | 80 | 70 | 100 |
| peroxidase 5 | | | | | | | | |
| (GPX5) | | | | | | | | |
| GRIK2 | 80 | 20 | 90 | 10 | 70 | 50 | 10 | 10 |
| SLC22A1 | 100 | 100 | 100 | 60 | 100 | 90 | 100 | 100 |
| RP11-235G24.1 | 50 | 80 | 90 | 60 | 70 | 80 | 90 | 80 |
| TBX18 | 90 | 30 | 10 | 20 | 60 | 40 | 60 | 10 |
| TGM3 | 70 | 70 | 30 | 90 | 80 | 50 | 40 | 90 |
| RIN2 | 20 | 20 | 90 | 90 | 20 | 30 | 10 | NA |
| SLC24A3 | 90 | 80 | 90 | 90 | 90 | NA | 50 | NA |
| Q9ULE8_HUMAN | 90 | 100 | 0 | 60 | 100 | 90 | 100 | 100 |
| C20orf117 | 0 | 30 | 10 | 50 | 10 | 20 | 40 | 10 |
| Breast carcinoma | 20 | 20 | 10 | 20 | 70 | 20 | 30 | 80 |
| amplified sequence | | | | | | | | |
| 4 (BCAS4) | | | | | | | | |
| nuclear factor of | 10 | 70 | 10 | 50 | 10 | 40 | 40 | 100 |
| activated T-cells | | | | | | | | |
| (NFATC2) | | | | | | | | |
| SCUBE1 | 70 | 60 | 50 | 20 | 80 | 60 | 70 | 70 |

[0591] Table 13 provides an overview of the most preferred of the genes or genomic regions and ranges of methylation within which the actual value of methylation of said genomic regions lies specific of the said cells, tissues and/or organs. The actual value of methylation is shown in FIGS. 1.1-1.403.

### LITERATURE

[0592] Murakami M, Masuda S, Shimbara S, Ishikawa Y, Ishii T, Kudo I. Cellular distribution, post-translational modification, and tumorigenic potential of human group III secreted phospholipase A(2). J Biol Chem. 2005 Jul. 1; 280(26):24987-98. Epub 2005 Apr. 29.
[0593] Habib S J, Waizenegger T, Lech M, Neupert W, Rapaport D. Assembly of the TOB complex of mitochondria. J Biol Chem. 2005 Feb. 25; 280(8):6434-40. Epub 2004 Dec. 7.
[0594] Igarashi P, Shao X, McNally B T, Hiesberger T. Roles of HNF-1beta in kidney development and congenital cystic diseases. Kidney Int. 2005 November; 68(5):1944-7.
[0595] Bergmann C, Kupper F, Domia C, Schneider F, Senderek J, Zerres K. Algorithm for efficient PKHD1 mutation screening in autosomal recessive polycystic kidney disease (ARPKD). Hum Mutat. 2005 March; 25(3):225-31.
[0596] Menezes L F, Cai Y, Nagasawa Y, Silva A M, Watkins M L, Da Silva A M, Somlo S, Guay-Woodford L M, Germino G G, Onuchic L F. Polyductin, the PKHD1 gene product, comprises isoforms expressed in plasma membrane, primary cilium, and cytoplasm. Kidney Int. 2004 October; 66(4):1345-55.
[0597] Gresh L, Fischer E, Reimann A, Tanguy M, Garbay S, Shao X, Hiesberger T, Fiette L, Igarashi P, Yaniv M, Pontoglio M. A transcriptional network in polycystic kidney disease. EMBO J. 2004 Apr. 7; 23(7): 1657-68. Epub 2004 Mar. 18.
[0598] Zhang M Z, Mai W, Li C, Cho S Y, Hao C, Moeckel G, Zhao R, Kim I, Wang J, Xiong H, Wang H, Sato Y, Wu Y, Nakanuma Y, Lilova M, Pei Y, Harris R C, Li S, Coffey R J, Sun L, Wu D, Chen X Z, Breyer M D, Zhao Z J, McKanna J A, Wu G. PKHD1 protein encoded by the gene for autosomal recessive polycystic kidney disease associates with basal bodies and primary cilia in renal epithelial cells. Proc Natl Acad Sci USA. 2004 Feb. 24; 101(8):2311-6.
[0599] Onuchic L F, Furu L, Nagasawa Y, Hou X, Eggermann T, Ren Z, Bergmann C, Senderek J, Esquivel E, Zeltner R, Rudnik-Schoneborn S, Mrug M, Sweeney W, Avner E D, Zerres K, Guay-Woodford L M, Somlo S, Germino G G. PKHD1, the polycystic kidney and hepatic disease I gene, encodes a novel large protein containing multiple immunoglobulin-like plexin-transcription-factor domains and parallel beta-helix I repeats. Am J Hum Genet. 2002 May; 70(5):1305-17. Epub 2002 Mar. 15.
[0600] McCann J A, Xu Y Q, Frechette R, Guazzarotti L, Polychronakos C. The insulin-like growth factor-II receptor gene is associated with type I diabetes: evidence of a maternal effect. J Clin Endocrinol Metab. 2004 November; 89(11):5700-6. PMID: 15531531
[0601] Grundemann, D.; Gorboulev, V.; Gambaryan, S.; Veyhl, M.; Koepsell, H. Drug excretion mediated by a new prototype of polyspecific transporter. Nature 372: 549-552, 1994.
[0602] Leabman, M. K.; Huang, C. C.; DeYoung, J.; Carlson, E. J.; Taylor, T. R.; de la Cruz, M.; Johns, S. J.; Stryke, D.; Kawamoto, M.; Urban, T. J.; Kroetz, D. L.; Ferrin, T. E.: Clark, A. G.; Risch, N.; Herskowitz, I.; Giacomini, K. M.; {Pharmacogenetics of Membrane Transporters Investigators}: Natural variation in human membrane transporter genes reveals evolutionary and functional constraints. Proc. Nat. Acad. Sci. 100: 5896-5901, 2003.
[0603] Shu, Y.; Leabman, M. K.; Feng, B.; Mangravite, L. M.; Huang, C. C.; Stryke, D.; Kawamoto, M.; Johns, S. J.; DeYoung, J.; Carlson, E.; Ferrin, T. E.; Herskowitz, 1.; Giacomini, K. M.; Pharmacogenetics of Membrane Transporters Investigators: Evolutionary conservation predicts function of variants of the human organic cation transporter, OCT1. Proc. Nat. Acad. Sci. 100: 5902-5907, 2003.
[0604] Bourdet D L, Pritchard J B, Thakker D R. Differential substrate and inhibitory activities of ranitidine and famotidine toward human organic cation transporter 1 (hOCT1; SLC22A1), hOCT2 (SLC22A2), and hOCT3 (SLC22A3). J Pharmacol Exp Ther. 2005 December; 315(3):1288-97
[0605] Lips K S, Volk C, Schmitt B M, Pfeil U, Arndt P, Miska D, Ermert L, Kummer W, Koepsell H. Polyspecific cation transporters mediate luminal release of acetylcholine from bronchial epithelium. Am J Respir Cell Mol Biol. 2005 July; 33(1):79-88.)
[0606] Grover B, Buckley D, Buckley A R, Cacini W. Reduced expression of organic cation transporters ROCT1 and rOCT2 in experimental diabetes. J Pharmacol Exp Ther. 2004 March; 308(3):949-56.)
[0607] Wang D S, Kusuhara H, Kato Y, Jonker J W, Schinkel A H, Sugiyama Y. Involvement of organic cation transporter I in the lactic acidosis caused by metformin. Mol Pharmacol. 2003 April; 63(4):844-8.)
[0608] Sleutels F, Zwart R, Barlow D P. The non-coding Air RNA is required for silencing autosomal imprinted genes. Nature. 2002 Feb. 14; 415(6873):810-3.
[0609] Grover B, Buckley D, Buckley A R, Cacini W. Reduced expression of organic cation transporters rOCT1 and rOCT2 in experimental diabetes. J Pharmacol Exp Ther. 2004 March; 308(3):949-56. Epub 2004 Jan. 8.
[0610] Karbach U, Kricke J, Meyer-Wentrup F, Gorboulev V, Volk C, Loffing-Cueni D, Kaissling B, Bachmann S, Koepsell H. Localization of organic cation transporters OCT1 and OCT2 in rat kidney. Am J Physiol Renal Physiol. 2000 October; 279(4):F679-87.
[0611] Endoh M, Tamura G, Honda T, Homma N, Terashima M, Nishizuka S, Motoyama T. RASSF2, a potential tumor suppressor, is silenced by CpG island hypermethylation in gastric cancer. Br J Cancer. 2005 Dec. 12; 93(12):1395-1399.
[0612] Akino K, Toyota M, Suzuki H, Mita H, Sasaki Y, Ohe-Toyota M, Issa J P, Hinoda Y, Imai K, Tokino T. The Ras effector RASSF2 is a novel tumor-suppressor gene in human colorectal cancer. Gastroenterology. 2005 July; 129(1):156-69.
[0613] Hesson L B, Wilson R, Morton D, Adams C, Walker M, Maher E R, Latif F. CpG island promoter hypermethylation of a novel Ras-effector gene RASSF2A is an early event in colon carcinogenesis and correlates inversely with K-ras mutations. Oncogene. 2005 Jun. 2; 24(24):3987-94.
[0614] Vos M D, Ellis C A, Elam C, Ulku A S, Taylor B J, Clark G J. RASSF2 is a novel K-Ras-specific effector and potential tumor suppressor. J Biol Chem. 2003 Jul. 25; 278(30):28045-51. Epub 2003 May 5. PMID: 12732644
[0615] Ooms L M, Fedele C G, Astle M V, Ivetac I, Cheung V, Pearson R B, Layton M J, Forrai A, Nandurkar H H, Mitchell C A. The Inositol Polyphosphate 5-Phosphatase, PIPP, Is a Novel Regulator of Phosphoinositide 3-Kinase-dependent Neurite Elongation. Mol Biol Cell 2005 Nov. 9;
[0616] Ohkura S, Kondoh N, Hada A, Arai M, Yamazaki Y, Sindoh M, Takahashi M, Matsumoto I, Yamamoto M. Differential expression of the keratin-4, -13, -14, -17 and transglutaminase 3 genes during the development of oral squamous cell carcinoma from leukoplakia. Oral Oncol. 2005 July; 41(6):607-13. Epub 2005 Apr. 14.
[0617] Zhang J, Zhi H Y, Ding F, Luo A P, Liu Z H. Transglutaminase 3 expression in C57BL/6J mouse embryo epidermis and the correlation with its differentiation. Cell Res. 2005 February; 15(2): 105-10.
[0618] Zainelli G M, Dudek N L, Ross C A, Kim S Y, Muma N A. Mutant huntingtin protein: a substrate for transglutaminase 1, 2, and 3. J Neuropathol Exp Neurol. 2005 January; 64(1):58-65.
[0619] Raghunath M, Tontsidou L, Oji V, Aufenvenne K, Schurmeyer-Horst F, Jayakumar A, Stander H, Smolle J, Clayman G L, Traupe H. SPINK5 and Netherton syndrome: novel mutations, demonstration of missing LEKTI, and differential expression of transglutaminases. J Invest Dermatol. 2004 September; 123(3):474-83.
[0620] Luo A, Kong J, Hu G, Liew C C, Xiong M, Wang X, Ji J, Wang T, Zhi H, Wu M, Liu Z. Discovery of Ca2+-relevant and differentiation-associated genes downregulated in esophageal squamous cell carcinoma using cDNA microarray. Oncogene. 2004 Feb. 12; 23(6):1291-9.
[0621] Gonzalez H E, Gujrati M, Frederick M, Henderson Y, Arumugam J, Spring P W, Mitsudo K, Kim H W, Clayman G L. Identification of 9 genes differentially expressed in head and neck squamous cell carcinoma. Arch Otolaryngol Head Neck Surg. 2003 July; 129(7):754-9.
[0622] Hitomi K, Presland R B, Nakayama T, Fleckman P, Dale B A, Maki M. Analysis of epidermal-type transglutaminase (transglutaminase 3) in human stratified epithelia and cultured keratinocytes using monoclonal antibodies. J Dermatol Sci. 2003 August; 32(2):95-103.
[0623] Nakano T, Tani M, Nishioka M, Kohno T, Otsuka A, Ohwada S, Yokota J. Genetic and epigenetic alterations of the candidate tumor-suppressor gene MYO18B, on chromosome arm 22q, in colorectal cancer. Genes Chromosomes Cancer. 2005 June; 43(2):162-71.
[0624] Yanaihara N, Nishioka M, Kohno T, Otsuka A, Okamoto A, Ochial K, Tanaka T, Yokota J. Reduced expression of MYO18B, a candidate tumor-suppressor gene on chromosome arm 22q, in ovarian cancer. Int J Cancer. 2004 Oct. 20; 112(1):150-4.
[0625] Nishioka M, Kohno T, Tani M, Yanaihara N, Tomizawa Y, Otsuka A, Sasaki S, Kobayashi K, Niki T, Maeshima A, Sekido Y, Minna J D, Sone S, Yokota J. MYO18B, a candidate tumor suppressor gene at chromosome 22q12.1, deleted, mutated, and methylated in human lung cancer. Proc Natl Acad Sci USA. 2002 Sep. 17; 99(19):12269-74. Epub 2002 Sep. 3.
[0626] Kumar U, Grigorakis S I, Watt H L, Sasi R, Snell L, Watson P, Chaudhari S. Somatostatin receptors in primary human breast cancer: quantitative analysis of mRNA for subtypes 1-5 and correlation with receptor protein expression and tumor pathology. Breast Cancer Res Treat. 2005 July; 92(2): 175-86.
[0627] Kumar U. Expression of somatostatin receptor subtypes (SSTR1-5) in Alzheimer's disease brain: an immunohistochemical analysis. Neuroscience. 2005; 134(2):525-38.
[0628] Liu H L, Huo L, Wang L. Octreotide inhibits proliferation and induces apoptosis of hepatocellular carcinoma cells. Acta Pharmacol Sin. 2004 October; 25(10):1380-6.
[0629] Hu C, Yi C, Hao Z, Cao S, Li H, Shao X, Zhang J, Qiao T, Fan D. The effect of somatostatin and SSTR3 on proliferation and apoptosis of gastric cancer cells. Cancer Biol Ther. 2004 August; 3(8):726-30. Epub 2004 Aug. 10.
[0630] Goodyer C G, Grigorakis S I, Patel Y C, Kumar U. Developmental changes in the expression of somatostatin receptors (1-5) in the brain, hypothalamus, pituitary and spinal cord of the human fetus. Neuroscience. 2004; 125(2):441-8.
[0631] Jia W D, Xu G L, Xu R N, Sun H C, Wang L, Yu J H, Wang J, Li J S, Zhai Z M, Xue Q. Octreotide acts as an antitumor angiogenesis compound and suppresses tumor growth in nude mice bearing human hepatocellular carcinoma xenografts. J Cancer Res Clin Oncol. 2003 June; 129(6):327-34. Epub 2003 Jun. 14.
[0632] Vikic-Topic S, Raisch K P, Kvols L K, Vuk-Pavlovic S. Expression of somatostatin receptor subtypes in breast carcinoma, carcinoid tumor, and renal cell carcinoma. J Clin Endocrinol Metab. 1995 October; 80(10):2974-9.
[0633] Drebin J A, Hartzell S W, Griffin C, Campbell M J, Niederhuber J E. Molecular cloning and chromosomal localization of the human homologue of a B-lymphocyte specific protein tyrosine kinase (blk). Oncogene. 1995 Feb. 2; 10(3):477-86.
[0634] Lin Y H, Shin E J, Campbell M J, Niederhuber J E. Transcription of the blk gene in human B lymphocytes is controlled by two promoters. J Biol Chem. 1995 Oct. 27; 270(43):25968-75.
[0635] Law D A, Gold M R, DeFranco A L. Examination of B lymphoid cell lines for membrane immunoglobulin-stimulated tyrosine phosphorylation and src-family tyrosine kinase mRNA expression. Mol Immunol. 1992 July-August; 29(7-8):917-26.
[0636] Yao X R, Scott D W. Antisense oligodeoxynucleotides to the blk tyrosine kinase prevent anti-mu-chain-mediated growth inhibition and apoptosis in a B-cell lymphoma. Proc Natl Acad Sci USA. 1993 Sep. 1; 90(17):7946-50.
[0637] Vallat L, Magdelenat H, Merle-Beral H, Masdehors P, Potocki de Montalk G, Davi F, Kruhoffer M, Sabatier L, Orntoft T F, Delic J. The resistance of B-CLL cells to DNA damage-induced apoptosis defined by DNA microarrays. Blood. 2003 Jun. 1; 101(11):4598-606. Epub 2003 Feb. 13.
[0638] Texido G, Su I H, Mecklenbrauker I, Saijo K, Malek S N, Desiderio S, Rajewsky K, Tarakhovsky A. The B-cell-specific Src-family kinase Blk is dispensable for B-cell development and activation. Mol Cell Biol. 2000 February; 20(4):1227-33.
[0639] Malek S N, Dordai D I, Reim J, Dintzis H, Desiderio S. Malignant transformation of early lymphoid progenitors in mice expressing an activated Blk tyrosine kinase. Proc Natl Acad Sci USA. 1998 Jun. 23; 95(13):7351-6.
[0640] Goriounov D, Leung C L, Liem R K. Protein products of human Gas2-related genes on chromosomes 17 and 22 (hGAR17 and hGAR22) associate with both microfilaments and microtubules. J Cell Sci. 2003 Mar. 15; 116(Pt 6):1045-58. PMID: 12584248
[0641] Brancolini C, Bottega S, Schneider C. Gas2, a growth arrest-specific protein, is a component of the microfilament network system. J Cell Biol. 1992 June; 117(6):1251-61. PMID: 1607387
[0642] Stilo R, Liguoro D, Di Jeso B, Formisano S, Consiglio E, Leonardi A, Vito P. Physical and functional interaction of CARMA1 and CARMA3 with Ikappa kinase gamma-NFkappaB essential modulator. J Biol Chem. 2004 Aug. 13; 279(33):34323-31. Epub 2004 Jun. 7.
[0643] Rauch A, Devriendt K, Koch A, Rauch R, Gewillig M, Kraus C, Weyand M, Singer H, Reis A, Hofbeck M. Assessment of association between variants and haplotypes of the remaining TBX1 gene and manifestations of congenital heart defects in 22q11.2 deletion patients. J Med Genet. 2004 April; 41(4):e40. No abstract available.
[0644] Vitelli F, Taddei I, Morishima M, Meyers E N, Lindsay E A, Baldini A. A genetic link between Tbx1 and fibroblast growth factor signaling. Development. 2002 October; 129(19):4605-11. PMID: 12223416
[0645] Zhang L, Zhong T, Wang Y, Jiang Q, Song H, Gui Y. TBX1, a DiGeorge syndrome candidate gene, is inhibited by retinoic acid. Int J Dev Biol. 2006; 50(1):55-61. Nakaya M A, Habas R, Biris K, Dunty W C Jr, Kato Y, He X, Yamaguchi T P. Identification and comparative expression analyses of Daam genes in mouse and Xenopus. Gene Expr Patterns. 2004 November; 5(1):97-105.
[0646] Kida Y, Shiraishi T, Ogura T. Identification of chick and mouse Daam1 and Daam2 genes and their expression patterns in the central nervous system. Brain Res Dev Brain Res. 2004 Oct. 15; 153(1):143-50.
[0647] Busso D, Cohen D J, Hayashi M, Kasahara M, Cuasnicu P S. Human testicular protein TPX1/CRISP-localization in spermatozoa, fate after capacitation and relevance for gamete interaction. Mol Hum Reprod. 2005 April; 11(4):299-305. Epub 2005 Feb. 25.
[0648] Wang H, Zhou Z, Xu M, Li J, Xiao J, Xu Z Y, Sha J. A spermatogenesis-related gene expression profile in human spermatozoa and its potential clinical applications. J Mol Med. 2004 May; 82(5):317-24. Epub 2004 Feb. 24.
[0649] Haendler B, Toda I, Sullivan D A, Schleuning W D. Expression of transcripts for cysteine-rich secretory proteins (CRISPs) in the murine lacrimal gland. J Cell Physiol. 1999 March; 178(3):371-8.
[0650] Grady R M, Starr D A, Ackerman G L, Sanes J R, Han M. Syne proteins anchor muscle nuclei at the neuromuscular junction. Proc Natl Acad Sci USA. 2005 Mar. 22; 102(12):4359-64. Epub 2005 Mar. 4.
[0651] Pare G C, Easlick J L, Mislow J M, McNally E M, Kapiloff M S. Nesprin-1alpha contributes to the targeting of mAKAP to the cardiac myocyte nuclear envelope. Exp Cell Res. 2005 Feb. 15; 303(2):388-99.
[0652] Fan J, Beck K A. A role for the spectrin superfamily member Syne-1 and kinesin II in cytokinesis. J Cell Sci. 2004 Feb. 1; 117(Pt 4):619-29. Epub 2004 Jan. 6.
[0653] Gough L L, Fan J, Chu S, Winnick S, Beck K A. Golgi localization of Syne-1. Mol Biol Cell. 2003 June; 14(6):2410-24. Epub 2003 Mar. 7.
[0654] Zhang Q, Skepper J N, Yang F, Davies J D, Hegyi L, Roberts R G, Weissberg P L, Ellis J A, Shanahan C M. Nesprins: a novel family of spectrin-repeat-containing proteins that localize to the nuclear membrane in multiple tissues. J Cell Sci. 2001 December; 114(Pt 24):4485-98.
[0655] Kusano S, Raab-Traub N. I-mfa domain proteins interact with Axin and affect its regulation of the Wnt and c-Jun N-terminal kinase signaling pathways. Mol Cell Biol. 2002 September; 22(18):6393-405.
[0656] Tsuji K, Kraut N, Groudine M, Noda M. Vitamin D(3) enhances the expression of 1-mfa, an inhibitor of the MyoD family, in osteoblasts. Biochim Biophys Acta. 2001 May 28; 1539(1-2):122-30. Kraut N, Snider L, Chen C M, Tapscott S J, Groudine M. Requirement of the mouse 1-mfa gene for placental development and skeletal patterning. EMBO J. 1998 Nov. 2; 17(21):6276-88. Hall L, Williams K, Perry A C, Frayne J, Jury J A. The majority of human glutathione peroxidase type 5 (GPX5) transcripts are incorrectly spliced: implications for the role of GPX5 in the male reproductive tract. Biochem J. 1998 Jul. 1; 333 (Pt 1):5-9. PMID: 9639555
[0657] Drevet J R, Lareyre J J, Schwaab V, Vernet P, Dufaure J P. The PEA3 protein of the Ets oncogene family is a putative transcriptional modulator of the mouse epididymis-specific glutathione peroxidase gene gpx5. Mol Reprod Dev. 1998 February; 49(2):131-40.
[0658] Lareyre J J, Claessens F, Rombauts W, Dufaure J P, Drevet J R. Characterization of an androgen response element within the promoter of the epididymis-specific murine glutathione peroxidase 5 gene. Mol Cell Endocrinol. 1997 Apr. 25; 129(1):33-46.
[0659] Karjalainen J M, Kellokoski J K, Mannermaa A J, Kujala H E, Moisio K I, Mitchell P J, Eskelinen M J, Alhava E M, Kosma V M. Failure in post-transcriptional processing is a possible inactivation mechanism of AP-2alpha in cutaneous melanoma. Br J Cancer. 2000 June; 82(12):2015-21. PMID: 10864211
[0660] Luscher B, Mitchell P J, Williams T, Tjian R. Regulation of transcription factor AP-2 by the morphogen retinoic acid and by second messengers. Genes Dev. 1989 October; 3(10):1507-17.
[0661] Melki S A, Abumrad N A. Expression of the adipocyte fatty acid-binding protein in streptozotocin-diabetes: effects of insulin deficiency and supplementation. J Lipid Res. 1993 September; 34(9): 1527-34.
[0662] Turner B C, Zhang J, Gumbs A A, Maher M G, Kaplan L, Carter D, Glazer P M, Hurst H C, Haffly B G, Williams T. Expression of AP-2 transcription factors in human breast cancer correlates with the regulation of multiple growth factor signalling pathways. Cancer Res. 1998 Dec. 1; 58(23):5466-72.
[0663] Linton M F, Fazio S. Macrophages, inflammation, and atherosclerosis. Int J Obes Relat Metab Disord. 2003 December; 27 Suppl S35-40. Review.
[0664] Jean D, Gershenwald J E, Huang S, Luca M, Hudson M J, Tainsky M A, Bar-Eli M. Loss of AP-2 results in up-regulation of MCAM/MUC18 and an increase in tumor growth and metastasis of human melanoma cells. J Biol Chem. 1998 Jun. 26; 273(26):16501-8. PMID: 9632718
[0665] Ropponen K M, Kellokoski J K, Pirinen R T, Moisio K I, Eskelinen M J, Alhava E M, Kosma V M. Expression of transcription factor AP-2 in colorectal adenomas and adenocarcinomas; comparison of immunohistochemistry and in situ hybridization. J Clin Pathol. 2001 July; 54(7):533-8. PMID: 11429425
[0666] Zhang L, Zhan S, Navid F, Li Q, Choi Y H, Kim M, Seth P, Helman L J. AP-2 may contribute to IGF-II overexpression in rhabdomyosarcoma. Oncogene. 1998 Sep. 10; 17(10):1261-70. PMID: 9771969
[0667] Zhang Q, Rubenstein J N, Jang T L, Pins M, Javonovic B, Yang X, Kim S J, Park I, Lee C. Insensitivity to transforming growth factor-beta results from promoter methylation of cognate receptors in human prostate cancer cells (LNCaP). Mol Endocrinol. 2005 September; 19(9):2390-9. Epub 2005 May 19. PMID: 15905358 [PubMed—in process]
[0668] Harder A, Rosche M, Reuss D E, Holtkamp N, Uhlmann K, Friedrich R, Mautner V F, von Deimling A. Methylation analysis of the neurofibromatosis type 1 (NF1) promoter in peripheral nerve sheath tumors. Eur J Cancer. 2004 December; 40(18):2820-8. PMID: 15571966
[0669] Zhu C H, Huang Y, Broman M T, Domann F E. Expression of AP-2 alpha in SV40 immortalized human lung fibroblasts is associated with a distinct pattern of cytosine methylation in the AP-2 alpha promoter. Biochim Biophys Acta. 2001 May 28; 1519(1-2):85-91. PMID: 11406275
[0670] Sergeeva O A, Amberger B T, Eriksson K S, Scherer A, Haas H L. Co-ordinated expression of 5-HT2C receptors with the NCX1 Na+/Ca2+ exchanger in histaminergic neurones. J Neurochem. 2003 November; 87(3):657-64. PMID: 14535948
[0671] Kraev A, Quednau B D, Leach S, Li X F, Dong H, Winkfein R, Perizzolo M, Cai X, Yang R, Philipson K D, Lytton J. Molecular cloning of a third member of the potassium-dependent sodium-calcium exchanger gene family, NCKX3. J Biol Chem. 2001 Jun. 22; 276(25):23161-72. Epub 2001 Apr. 9. PMID: 11294880
[0672] Barlund M, Monni O, Weaver J D, Kauraniemi P, Sauter G, Heiskanen M, Kallioniemi O P, Kallioniemi A. Cloning of BCAS3 (17q23) and BCAS4 (20q13) genes that undergo amplification, overexpression, and fusion in breast cancer. Genes Chromosomes Cancer. 2002 December; 35(4):311-7. PMID: 12378525
[0673] Feske S, Draeger R, Peter H H, Eichmann K, Rao A. The duration of nuclear residence of NFAT determines the pattern of cytokine expression in human SCID T cells. J Immunol. 2000 Jul. 1; 165(1):297-305. PMID: 10861065
[0674] Amasaki Y, Miyatake S, Arai N, Arai K. Regulation of nuclear factor of activated T-cell family transcription factors during T-cell development in the thymus. J Allergy Clin Immunol. 2000 July; 106(1 Pt 2): S1-9. PMID: 10887328
[0675] Avni O, Lee D, Macian F, Szabo S J, Glimcher L H, Rao A. T(H) cell differentiation is accompanied by dynamic changes in histone acetylation of cytokine genes. Nat Immunol. 2002 July; 3(7):643-51. Epub 2002 Jun. 10. PMID: 12055628
[0676] Willard-Gallo K E, Badran B M, Ravoet M, Zerghe A, Burny A, Martiat P, Goldman M, Roufosse F, Sibille C. Defective CD3gamma gene transcription is associated with NFATc2 overexpression in the lymphocytic variant of hypereosinophilic syndrome. Exp Hematol. 2005 October; 33(10):1147-59. PMID: 16219537
[0677] Yang R B, Ng C K, Wasserman S M, Colman S D, Shenoy S, Mehraban F, Komuves L G, Tomlinson J E, Topper J N. Identification of a novel family of cell-surface proteins expressed in human vascular endothelium. J Biol Chem. 2002 Nov. 29; 277(48):46364-73. Epub 2002 Sep. 21. PMID: 12270931
[0678] Grimmond S, Larder R, Van Hateren N, Siggers P, Hulsebos T J, Arkell R, Greenfield A. Cloning, mapping, and expression analysis of a gene encoding a novel mammalian EGF-related protein (SCUBE1). Genomics. 2000 Nov. 15; 70(1):74-81. PMID: 11087664
[0679] Stadler F, Kolb G, Rubusch L, Baker S P, Jones E G, Akbarian S. Histone methylation at gene promoters is associated with developmental regulation and region-specific expression of ionotropic and metabotropic glutamate receptors in human brain. J Neurochem. 2005 July; 94(2):324-36. PMID: 15998284
[0680] Bah J, Quach H, Ebstein R P, Segman R H, Melke J, Jamain S, Rietschel M, Modai I, Kanas K, Karni O, Lerer B, Gourion D, Krebs M O, Etain B, Schurhoff F, Szoke A, Leboyer M, Bourgeron T. Maternal transmission disequilibrium of the glutamate receptor GRIK2 in schizophrenia. Neuroreport. 2004 Aug. 26; 15(12):1987-91. PMID: 15305151
[0681] Sinclair P B, Sorour A, Martineau M, Harrison C J, Mitchell W A, O'Neill E, Foroni L. A fluorescence in situ hybridization map of 6q deletions in acute lymphocytic leukemia: identification and analysis of a candidate tumor suppressor gene. Cancer Res. 2004 Jun. 15; 64(12):4089-98. PMID: 15205317
[0682] Wolf S, Janzen A, Vekony N, Martine U, Strand D, Closs E I. Expression of solute carrier 7A4 (SLC7A4) in the plasma membrane is not sufficient to mediate amino acid transport activity. Biochem J. 2002 Jun. 15; 364(Pt 3):767-75. PMID: 12049641
[0683] Sperandeo M P, Borsani G, Incerti B, Zollo M, Rossi E, Zuffardi O, Castaldo P, Taglialatela M, Andria G, Sebastio G. The gene encoding a cationic amino acid transporter (SLC7A4) maps to the region deleted in the velocardiofacial syndrome. Genomics. 1998 Apr. 15; 49(2):230-6. PMID: 9598310
[0684] Peyrl A, Krapfenbauer K, Slavc I, Strobel T, Lubec G. Proteomic characterization of the human cortical neuronal cell line HCN-2. J Chem Neuroanat. 2003 November; 26(3):171-8. PMID: 14615026
[0685] Niki T, Takahashi-Niki K, Taira T, Iguchi-Ariga S M, Ariga H. DJBP: a novel DJ-1-binding protein, negatively regulates the androgen receptor by recruiting histone deacetylase complex, and DJ-1 antagonizes this inhibition by abrogation of this complex. Mol Cancer Res. 2003 February; 1(4):247-61. PMID: 12612053
[0686] Killebrew D A, Troelstrup D, Shiramizu B. Preferential HIV-1 integration sites in macrophages and HIV-associated malignancies. Cell Mol Biol (Noisy-1e-grand). 2004; 50 Online Pub:OL581-9. PMID: 15555424
[0687] Shou S, Scott V, Reed C, Hitzemann R, Stadler H S. Transcriptome analysis of the murine forelimb and hindlimb autopod. Dev Dyn. 2005 September; 234(1):74-89. PMID: 16059910 [PubMed—in process]
[0688] Plageman T F Jr, Yutzey K E. T-box genes and heart development: putting the “T” in heart. Dev Dyn. 2005 January; 232(1):11-20. Review. PMID: 15580613
[0689] Bussen M, Petry M, Schuster-Gossler K, Leitges M, Gossler A, Kispert A. The T-box transcription factor Tbx18 maintains the separation of anterior and posterior somite compartments. Genes Dev. 2004 May 15; 18(10):1209-21. PMID: 15155583
[0690] Rosemann M, Kuosaite V, Nathrath M, Strom T M, Quintanilla-Martinez L, Richter T, Imai K, Atkinson M J. Allelic imbalance at intragenic markers of Tbx18 is a hallmark of murine osteosarcoma. Carcinogenesis. 2003 March; 24(3):371-6. PMID: 12663494
[0691] Ding L H, Shingyoji M, Chen F, Hwang J J, Burma S, Lee C, Cheng J F, Chen D J. Gene expression profiles of normal human fibroblasts after exposure to ionizing radiation: a comparative study of low and high doses. Radiat Res. 2005 July; 164(1):17-26. PMID: 15966761
[0692] Yankee T M, Draves K E, Clark E A. Expression and function of the adaptor protein Gads in murine B cells. Eur J Immunol. 2005 April; 35(4):1184-92. PMID: 15761845
[0693] Shiraiwa H, Takei M, Yoshikawa T, Azuma T, Kato M, Mitamura K, Ueki T, Kida A, Horie T, Seki N, Sawada S. Detection of Grb-2-related adaptor protein gene (GRAP) and peptide molecule in salivary glands of MRL/lpr mice and patients with Sjogren's syndrome. J Int Med Res. 2004 May-June; 32(3):284-91. PMID: 15174222
[0694] Guyot B, Mouchiroud G. Characterization of promoter elements directing Mona/Gads molecular adapter expression in T and myelomonocytic cells: involvement of the AML-1 transcription factor. J Leukoc Biol. 2003 February; 73(2):263-72. PMID: 12554803
[0695] Guyot B, Arnaud S, Phothirath P, Bourette R P, Grasset M F, Rigal D, Mouchiroud G. Genomic organization and restricted expression of the human Mona/Gads gene suggests regulation by two specific promoters. Gene. 2002 May 15; 290(1-2):173-9. PMID: 12062812
[0696] Chou H H, Hayakawa T, Diaz S, Krings M, Indriati E, Leakey M, Paabo S, Satta Y, Takahata N, Varki A. Inactivation of CMP-N-acetylneuraminic acid hydroxylase occurred prior to brain expansion during human evolution. Proc Natl Acad Sci USA. 2002 Sep. 3; 99(18):11736-41. Epub 2002 Aug. 21. PMID: 12192086
[0697] Igaz P, Salvi R, Rey J P, Glauser M, Pralong F P, Gaillard R C. Effects of cytokines on GnRH gene expression in primary hypothalamic neurons and in GnRH neurons immortalized conditionally. Endocrinology. 2005 Nov. 10; [Epub ahead of print] PMID: 16282355 [PubMed—as supplied by publisher]
[0698] Loewen G M, Tracy E, Blanchard F, Tan D, Yu J, Raza S, Matsui S, Baumann H. Transformation of human bronchial epithelial cells alters responsiveness to inflammatory cytokines. BMC Cancer. 2005 Nov. 4; 145. PMID: 16271139 [PubMed—in process]
[0699] Znoyko I, Sohara N, Spicer S S, Trojanowska M, Reuben A. Expression of oncostatin M and its receptors in normal and cirrhotic human liver. J Hepatol. 2005 November; 43(5):893-900. Epub 2005 Jul. 26. PMID: 16169119 [PubMed—in process]
[0700] Finelt N, Gazel A, Gorelick S, Blumenberg M. Transcriptional responses of human epidermal keratinocytes to Oncostatin-M. Cytokine. 2005 Aug. 21; 31(4):305-13. PMID: 16023359
[0701] Kong W, Abidi P, Kraemer F B, Jiang J D, Liu J. In vivo activities of cytokine oncostatin M in the regulation of plasma lipid levels. J Lipid Res. 2005 June; 46(6):1163-71. Epub 2005 Mar. 16. PMID: 15772430
[0702] Znoyko I, Sohara N, Spicer S S, Trojanowska M, Reuben A. Comparative studies of oncostatin M expression in the tissues of adult rodents. Anat Rec A Discov Mol Cell Evol Biol. 2005 March; 283(1):182-6. PMID: 15674824
[0703] Li C, Zhang F, Lin M, Liu J. Induction of S100A9 gene expression by cytokine oncostatin M in breast cancer cells through the STAT3 signaling cascade. Breast Cancer Res Treat. 2004 September; 87(2):123-34. PMID: 15377837
[0704] Holzer R G, Ryan R E, Tommack M, Schlekeway E, Jorcyk C L. Oncostatin M stimulates the detachment of a reservoir of invasive mammary carcinoma cells: role of cyclooxygenase-2. Clin Exp Metastasis. 2004; 21(2):167-76. PMID: 15168734
[0705] Cross A, Edwards S W, Bucknall R C, Moots R J. Secretion of oncostatin M by neutrophils in rheumatoid arthritis. Arthritis Rheum. 2004 May; 50(5):1430-6. PMID: 15146412
[0706] Gwechenberger M, Moertl D, Pacher R, Huelsmann M. Oncostatin-M in myocardial ischemia/reperfusion injury may regulate tissue repair. Croat Med J. 2004 April; 45(2):149-57. PMID: 15103750
[0707] Levy M T, Trojanowska M, Reuben A. Oncostatin M: a cytokine upregulated in human cirrhosis, increases collagen production by human hepatic stellate cells. J Hepatol. 2000 February; 32(2):218-26. PMID: 10707861
[0708] Vasse M, Pourtau J, Trochon V, Muraine M, Vannier J P, Lu H, Soria J, Soria C. Oncostatin M induces angiogenesis in vitro and in vivo. Arterioscler Thromb Vasc Biol. 1999 August; 19(8):1835-42. PMID: 10446061
[0709] Battini R, Battaglia A, Bertini V, Cioni G, Parrini B, Rapalini E, Simi P, Tinelli F, Valetto A. Characterization of the phenotype and definition of the deletion in a new patient with ring chromosome 22. Am J Med Genet A. 2004 Oct. 1; 130(2):196-9. PMID: 15372517
[0710] Formstone C J, Mason I. Expression of the Celsr/flamingo homologue, c-fmi1, in the early avian embryo indicates a conserved role in neural tube closure and additional roles in asymmetry and somitogenesis. Dev Dyn. 2005 February; 232(2):408-13. PMID: 15614764
[0711] Tissir F, De-Backer O, Goffinet A M, Lambert de Rouvroit C. Developmental expression profiles of Celsr (Flamingo) genes in the mouse. Mech Dev. 2002 March; 112(1-2):157-60. PMID: 11850187
[0712] Bacon L, Eagle R A, Meyer M, Easom N, Young N T, Trowsdale J. Two human ULBP/RAET1 molecules with transmembrane regions are ligands for NKG2D. J Immunol. 2004 Jul. 15; 173(2):1078-84. PMID: 15240696
[0713] Jan Chalupny N, Sutherland C L, Lawrence W A, Rein-Weston A, Cosman D. ULBP4 is a novel ligand for human NKG2D. Biochem Biophys Res Commun. 2003 May 23; 305(1):129-35. PMID: 12732206
[0714] Eckfeld K, Hesson L, Vos M D, Bieche I, Latif F, Clark G J. RASSF4/AD037 is a potential ras effector/tumor suppressor of the RASSF family. Cancer Res. 2004 Dec. 1; 64(23):8688-93. PMID: 15574778
[0715] Chow L S, Lo K W, Kwong J, Wong A Y, Huang D P. Aberrant methylation of RASSF4/AD037 in nasopharyngeal carcinoma. Oncol Rep. 2004 October; 12(4):781-7. PMID: 15375500
[0716] Futscher B W, Oshiro M M, Wozniak R J, Holtan N, Hanigan C L, Duan H, Domann F E. (2002) Role for DNA methylation in the control of cell type specific maspin expression. Nat Genet. 31(2):175-9.

1. A method for classifying a biological sample, comprising:
obtaining a biological sample from a subject;
determining the expression status of at least one gene or genomic sequence selected from the group consisting the genes or genomic sequences according to Table 1 in said sample; and
classifying said biological sample according to said expression status.

2. The method according to claim 1, wherein the class is selected from the group consisting of organ type, tissue type, cell type and disease state.

3. The method according to claim 2, wherein said class consists of T-lymphocytes.

4. The method according to claim 3, wherein said genomic sequences are selected from at least one of Tables 8A and 9A.

5. The method according to claim 2, wherein said class consists of embryonic liver.

6. The method according to claim 5, wherein said genomic sequences are selected from at least one of Tables 8B and 9B.

7. The method according to claim 2, wherein said class consists of embryonic skeletal muscle.

8. The method according to claim 7, wherein said genomic sequences are selected from at least one of Tables 8C and 9C.

9. The method according to claim 2, wherein said class consists of fibroblasts.

10. The method according to claim 9, wherein said genomic sequences are selected from at least one of Tables 8D and 9D.

11. The method according to claim 2, wherein said class consists of heart muscle.

12. The method according to claim 11, wherein said genomic sequences are selected from at least one of Tables 8E and 9E.

13. The method according to claim 2, wherein said classes are heart muscle and skeletal muscle.

14. The method according to claim 13, wherein said genomic sequences are selected from Table 8F.

15. The method according to claim 2, wherein said class consists of keratinocytes.

16. The method according to claim 15, wherein said genomic sequences are selected from at least one of Tables 8G and 9F.

17. The method according to claim 2, wherein said class consists of liver.

18. The method according to claim 17, wherein said genomic sequences are selected from at least one of Tables 8H and 9G.

19. The method according to claim 2, wherein said class consists of melanocytes.

20. The method according to claim 19, wherein said genomic sequences are selected from at least one of Table 8I and 9H.

21. The method according to claim 2, wherein said class consists of placenta.

22. The method according to claim 21, wherein said genomic sequences are selected from at least one of Table 8J and 9I.

23. The method according to claim 2, wherein said class consists of skeletal muscle.

24. The method according to claim 23, wherein said genomic sequences are selected from at least one of Table 8K and 9J.

25. The method according to claim 2, wherein said class consists of sperm.

26. The method according to claim 25, wherein said genomic sequences are selected from Table 8L.

27. The method according to claim 1, wherein the sample is selected from the group consisting of cells or cell lines, histological slides, biopsies, paraffin-embedded tissue, bodily fluids, sputum, stool, nipple aspirate, cerebrospinal fluid, ejaculate, urine, blood, and combinations thereof.

28. The method according to claim 1, wherein the expression is determined by measuring the level of at least one of mRNA, cDNA or polypeptide.

29. The method according to claim 1, wherein the expression is determined by use of at least one technique selected from the group of Northern blot analysis, reverse transcriptase PCR, real-time PCR, RNAse protection, and microarray.

30. The method according to claim 1, wherein said expression is determined by determining the level of methylation or methylation status of one or more CpG positions within said genes or genomic regions.

31. The method according to claim 30, comprising contacting genomic DNA isolated from a biological sample, with at least one reagent, or series of reagents that distinguishes between methylated and non-methylated CpG dinucleotides within at least one target region of the genomic DNA, wherein the target region comprises, or hybridizes under stringent conditions to a sequence of at least 16 contiguous nucleotides of at least one gene or genomic sequence selected from Table 1, wherein said contiguous nucleotides comprise at least one CpG dinucleotide sequence, and wherein classification of said sample is, at least in part, afforded.

32. The method according to claim 31, comprising:
isolating genomic DNA from a biological sample taken from a subject;
treating the genomic DNA, or a portion or fragment thereof, with one or more reagents to convert 5-position unmethylated cytosine bases to uracil or to another base that is detectably dissimilar to cytosine in terms of hybridization properties;
contacting the treated genomic DNA, or the treated portion or fragment thereof, with an amplification enzyme and at least two primers comprising, in each case a contiguous sequence at least 18 nucleotides in length that is complementary to, or hybridizes under moderately stringent or stringent conditions to a converted sequence selected from Table 1 and complements thereof, wherein the treated DNA or a fragment thereof is either amplified to produce one or more amplificates, or is not amplified;
determining, based on the presence or absence of, or on the quantity or on a property of said amplificate, the methylation state of at least one CpG dinucleotide sequence of at least one gene or sequence selected from Table 1, or an average, or a value reflecting an average methylation state of a plurality of CpG dinucleotide sequences of at least one gene or sequence selected from Table 1; and
classifying said sample according to said methylation state.

33. A treated nucleic acid derived from the genomic sequences of Table 2, wherein the treatment is suitable to convert at least one unmethylated cytosine base of the genomic DNA sequence to uracil or another base that is detectably dissimilar to cytosine in terms of hybridization.

34. A nucleic acid, comprising at least 16 contiguous nucleotides of a treated genomic DNA sequence selected from the converted sequences according to Table 1 and sequences complementary thereto, wherein said nucleic acid is not identical or complementary to a genomic sequence according to Table 2, and wherein the treatment is suitable to convert at least one unmethylated cytosine base of the genomic DNA sequence to uracil or another base that is detectably dissimilar to cytosine in terms of hybridization.

35. The nucleic acid of any one of claims 33 and 34, wherein the contiguous base sequence comprises at least one CpG, TpG or CpA dinucleotide sequence.

36. The nucleic acid of claim 35, wherein the treatment comprises use of a reagent selected from the group consisting of bisulfite, hydrogen sulfite, disulfite, and combinations thereof.

37. An oligomer, comprising a sequence of at least 9 contiguous nucleotides that is complementary to, or hybridizes under moderately stringent or stringent conditions to a treated genomic DNA sequence selected from the converted sequences according to Table 2 and sequences complementary thereto, wherein said nucleic acid is not identical or complementary to a genomic sequence according to Table 2.

38. The oligomer of claim 37, comprising at least one CpG, CpA or TpG dinucleotide sequence.

39. A kit for use in for use in the classification of a biological sample, the kit comprising means for detecting the polypeptides of a gene or genomic region selected from Table 1.

40. The kit according to claim 39, further comprising:
a container suitable for containing the means for detecting polypeptides, and a biological sample of the patient comprising said polypeptides, wherein the means for detecting polypeptides can from complexes with the polypeptides; and
a means to detect the complexes.

41. A kit for use in the classification of a biological sample, comprising means for measuring the level of mRNA transcription of a gene or genomic region selected from Table 1.

42. The kit according to claim 41, further comprising:
a container suitable for containing the means for measuring the level of mRNA, and a biological sample of the patient comprising mRNA of a gene or genomic region selected from Table 1 wherein the means for measuring the level of mRNA are able to hybridize to the mRNA; and
a means for detecting the hybridized mRNA complexes.

43. A kit comprising:
a) at least one bisulfite reagent selected from the group consisting of bisulfite hydrogen sulfite, and disulfite; and
b) at least two nucleic acid molecules comprising, in each case a contiguous sequence at least 16 nucleotides that is complementary to, or hybridizes under moderately stringent or stringent conditions to a converted sequence selected from Table 2, and complements thereof.

44. A composition comprising the following:
a nucleic acid comprising a sequence at least 18 bases in length of a segment of the converted genomic DNA according to one of the converted sequences of Table 2 and sequences complementary thereto; and
a buffer comprising at least one of magnesium chloride, dNTP, taq polymerase, an oligomer, in particular an oligonucleotide or peptide nucleic acid (PNA)-oligomer, said oligomer comprising in each case at least one base sequence having a length of at least 9 nucleotides which is complementary to, or hybridizes under moderately stringent or stringent conditions to a converted genomic DNA according to one of the converted sequences of Table 1 and sequences complementary thereto.

45. (canceled)

46. The kit of claim 40, further comprising instructions for use and interpretation of the kit results.

47. The kit of claim 42, further comprising instructions for use and interpretation of the kit results.

The application's sequence listing, which the Patent Office published only in electronic form, follows.

SEQUENCE LISTING (4968 sequences)

SEQ ID NO: 1 - DNA, 444 bp, Homo Sapiens
ttgttgattggatagatggatggatggatggacggacggacggaccgatggatggaaatctggctatcactgacgcctgagctccccaccctcttgggccctccacctccggagccctcactcgcttgtgacagctgtacgagaaatacatgcctctcctaggagcaaaccctcaacccaaacaggcagcacagagccagtccagcacctcacactggaggcactcagggtggagcccaggtcgatgagacggcgtaggatgaggctttttggcccagctgggaaccacttctttccagatttcccgtccagagtctaactttcctttctcccagcgccatcttttctgctagtttgcccagctcctcagggtgcctggactttcaggcctcaccttgtgtccagtatagcagggtccagcgccccagcaactgggaaggtctg

SEQ ID NO: 2 - DNA, 457 bp, Homo Sapiens
gggacaggacctattgcaaggcccccgggcctacccatggtaggtgcaggcctgtgcgcacaagggtacttaactccgacacatacccggaggagggaagagggccttggctgggggttcttgagcgggactgctggctgtccctcgtcaaacccctgacctcagcatccctccccgccacgcctttcccccagggtccgtgtatccccagctcctgatcccgctgctgggcgctgggttggtgctcggactgggagctttgggcctggtctggtggctgcacaggtgagcaggagggacccggcctcgttaaatggggagtgaccagaggtggaaggggcaggaccagaaccttcgcaaaagaaagagctagacctagagctctggtcctggcttggcgaagaatgggagaggtcaaaggtgggagcgaggccgctggctggtgagtagagcccca

SEQ ID NO: 3 - DNA, 498 bp, Homo Sapiens
aagctgcaggtggatggagcagcgatcagaagccagagccacagcgcaaccctggggggcgggagcccccagggccagaacagccaccacacctgcgctggccagggcctgcacgtagcccgacaccgccgatgccagggcgcccgtggcctcatccgccacttccaggaaacctgccagggagggagaaaggtgaggcctagctccatggagacaggaaaccaagcagtcactgccggacactgggtcccagagtaggctgaggggacagtgggatggggcggacatgggggcctgaggctcacagtcaggccggatccgggtgaggttgtagtcggcccgcagggagcgcacggctcgcgtgatgcttagcgccagctcaagggcggcttctgcctcggggtccttccaggagcactgtggggtggaggagggggtgagggggcctggagggcaggtcagactcccctctccaggccatgccatacctctgagggc

SEQ ID NO: 4 - DNA, 482 bp, Homo Sapiens
gggagaaagaggattagatgagagtggcgcctccgctcatgtccgccccctccccgcagagaattaccttttccagggacggcaggaatgctacgcgtttaatgggacacagcgcttcctggagagatacatctacaaccgggaggagttcgcgcgcttcgacagcgacgtgggggagttccgggcggtgacggagctggggcggcctgctgcggagtactggaacagccagaaggacatcctggaggagaagcgggcagtgccggacaggatgtgcagacacaactacgagctgggcgggcccatgaccctgcagcgccgaggtgagtgagggctttgggccggcggtcccagggcagccccgcgggcccgtgcccagggcgcaggagcagccgggttggcctaagggaccttagtgccgggcggaaaggggactttgggttggggattcatggggggagcccatctggagcttgtcaggg

SEQ ID NO: 5 - DNA, 497 bp, Homo Sapiens
agggacatggcctgggcacaatgttaacacaactccctatattcccccaccccatagtagctcagcaccctcaatgtgctcttacgtcgggtgtccccagcgaaagccagtcgggagctcagcaccatcagtgtcactgtcaacgctgccaagctggagcctccagggagcttcagacacaccatgctggagaagaggacaggaccaggggccagaggagcaggcaagtctcactcagggagaactatgacccccctccacccacattccaaattatagggaggaagttactgatttccttgctcctggattgggtaatctcgtgtcggagaaccaatcagcatctgagttcaacagcatcatcagttgctgctcagagatgctgtatgaaggtcctcttctgaaataatttcattctttaaaggattgttttaatttagtacttgaaaggtttgaaccagttgcatgtaaaacactttaattggggagctattgtg

SEQ ID NO: 6 - DNA, 484 bp, Homo Sapiens
caacaggatgctggcagggacctcgggggataagaatgggggtgggatctcctatccatcactcaccaagctccctttggggccctggggaccatccatgcctcggacgccctgaaacacaagatgggtgtgagcagcctgaaggtggcccggagggacctgtggttttcagaggcccggccattcccgagggtgtgacggtcagacctccaatccatcccaaacccaagcaaacacagctggcccaggcctgcagtgtgtgggactgtggatctgtgggcttgtgggctttggttttgtttttcttgaagatttatttcctatgcccagagccctcagggcaccacgccacatggccctccctgtgcacggggagcgaatgctgaggcagggcagtgtggggccagagcagggggagctcacagggaatgggaagcatgccgagagaggagagggagcaggaaggcagctagaaaggtggaga

SEQ ID NO: 7 - DNA, 476 bp, Homo Sapiens
atgcccctgcccttggctgggtaatctctggatttacctactgtctgtaaccccccgggctgaagagaccaccccccgggagtcaattaacttactctctggagcgcgcgttcctccctgctcccaggagtcggtttcccaaaactttctgaggcccgcgcatgctcccctcgactccccgtgtttccactctccacagaaatccacgcattcacgcccctcccctcccccgagcctgcagaggactccgccctgctttccctacattcagggctgctccttttgtcgccaatacaaacctgttgacaggtcacgcctgggaagcgggtggggtgtcccggagcggtgctgaggcgctgcaggcccggcttctggctgcgggggagctgtaccctgaagcctcgccggaactcgcgtctggggccagcagggggcactagagtcaacagggactgtatgcaaaacccacttcctcc

SEQ ID NO: 8 - DNA, 391 bp, Homo Sapiens
cccctgtgggtaggagaacaaggaccacctgggttctccagtcttgaacgagaatctcactcttatcagaatgtttttcttaacctcagcgtatgatgaggaaatttacttatctctagctaggatttgacaaattccaacatcaaatgatcaaaacatttgccactgaggcttcactggtgagatccgttctccgtcctcgggtgcagtcccttgggggctgctcctcggactgcgccccgcacacctgttatcgagggtgtgagaagcgcctaagctggtgacatgtgatctgggacgccttcatttctcgggccaggagtagcagctgctaaggacagcagcttgcattgcgtggttttagggaagcagggtctggcttttaatatga

SEQ ID NO: 9 - DNA, 483 bp, Homo Sapiens
gctgtgctctaactggcaagggattgtgccaaagacttgaatggacgatgtcacgactttagattacatgatctcttctaacctcatagactttgtataaatgaagtgctggactttacctgaaagctgcaaaaattaatggtttagatatatttataataaactgatttaaactttttctataagaagaaaaattaagaccacttatttgaaaagaaagatggagagggaggaggaagaagagaaaacggccgggcggcggcggctgtaggttgtgcagcggtagcggctctcccccgcggcggacgatggacagccaggacaggaaggtggtggtgtacaacaacagcaccgggcttgtgaagtgtggttatatgcaggctctaactttccagaagacatcttcccagctttggttggaagacctattatcagatcaaccaccaaagtgggaaacattgaacaaggatcttatggttggtg

SEQ ID NO: 10 - DNA, 431 bp, Homo Sapiens
aacatgctttcacttcatttggtcctgttaggtaagcaagggatcttgtgtgttggaaaaagaattactttggtgcagccgcccaagaggagcttggggaggacgctggcccgcgaggctcgtcgcagacaaggtggcggcgatgtccgggagccaggccagtgccgcggcggcagcgtcggggcctttcgcgcggcagggcggcctgggcttcggcctcccgccggttccctggaagcgggcccgcggctagcgcgggagcagcagcagagatggaggctccagcgcctctctctcttccccgtccgcctgagccaggggaggccaggcggcccgggtgtctggagccgggggtctgctgtccgagaatgagaattttcttcccccagaacgtggagactgttcgatcaccaggagcacaaagttatcat

SEQ ID NO: 11 - DNA, 412 bp, Homo Sapiens
tgtggcccaggcagccacctggccacagacagacagtggcggctacatacacccccgcccctgcacccgtggccaggctggggtatccgcgcgccaggcggaatgcaggggcgccctgggcccgcacacctccccatgtccgacacgccgctgctgctagagcctgctccgccgcgcccccgtccccggacacctgcgccttcgcctgttcttgggcctgagcccgtcccagtccccgtccccgcaggatctgctgcaacccacctgctgctgccgcagccgctgcctccgctctgagcactgagcccgcccagttcgccggcgccgagcgcagggcccgcccccatcccaggccccccgcgcggccccacccgctgccacacacccagatatttcaccctgcccactctgc

SEQ ID NO: 12 - DNA, 475 bp, Homo Sapiens
cagctgctgctatcacattggcccagaaggagggtggggggaggacgggtcggggaggggcagtaaggggaagggatgtgtgtcggtgtgtgtggagagggtgctccttcgctcctgctttcccggctcggtggggtcccttcgcggccacccggggagacgtcttagacagtcgtggttcctgtgatctgtgtcctctttgcagaaggtactattgggctgggttttagacgggcaccttgcgagcggatcggcgagttttaattttccggaatgcgctgctgggggctgcggtggcaggcctccggtcttttggtctattttaggcctttctggtgttgagagcttccgaggcctgattcctttgcctgttgcccgtgctgctcactttgaaaacaagagtgtttcggtggaaggatttgagaacaaaatgctggggcaaatggacattcgtaagaatcactctcctcaggcc

SEQ ID NO: 13 - DNA, 443 bp, Homo Sapiens
ggcagcccctcctcatcacagggaccctgtgtgccaggccccagctgcgttgccgctgaattatggatttaatagcagagaagccttgcaggccgcctgtgctggctcgggaaaccggggcccagccggggcctgtcacggtcctggtgccgccctgcttcctgtcggcgccacggagcaagcggagagatttatcttcccggctttaagaggtactaacggaggaggctgagaggcaggagctgaataattgatggccttctctggctcaggatctgctgaaaatgacacggtgcaaggcagaggggctgagagtgctgaccacaaaatgctgagaagccactccagggcggtcacggccagaaggaggacccccactcaggacggggtcacaggcatttggggcgggtgtcagaggctcctgccctgggtcattccagggg

SEQ ID NO: 14 - DNA, 270 bp, Homo Sapiens
catcttcacctgcaccattttattcttcttctttggaaaataaatctacttgtggttccaaagcctaactcatcctcagtaaccccggtagctatgaattcctatacaagaggctcccgcaggcccagcgccaaagctgcctcccctgcagcctcggtgacttcccgggtctctccctccggccctggtgtcccgggtgagcccagcacacgttgggattttggttgtttgttggcctggcccgactgtccctgtctctgagggcagagt

SEQ ID NO: 15 - DNA, 382 bp, Homo Sapiens
ggtggtttcctggcccactgtcctcagcccactcgctggcctttatctctgtttcacgtccaggaccccacgccctgtcggcgctgcttgggctacggtcactgtccacccggggcccacggaaacgcggtctctgtcccccaccgccgcttgccttgggaacgcggcccgaagcccaggacctggtagatgggcgcaggcgggcggtcggccgtgtcctcgccgcgggtcaccatcgcctcgcgcacggccgccagcccattgagcacgaccaccggcgtccaggccagctgcaggctgaacacgtccccgaagcggcgccgcaactgcagagggagggtcagggcctcttgtcaagccaggatcaccccagactacaggt

SEQ ID NO: 16 - DNA, 282 bp, Homo Sapiens
gttccccactgctcccaggagcggttacctgggcactctgtgcccctccttcctgttcgggcccaggccgaggacctgccagtagggctcagttgcctggagcccgttcagcccatcccccagttcactttgcctgtgggatctccccgttgctcctgcccgtggactgagtggcaggccatcctacaagcacccggacacttgacatccgtggtgtcaagacaactctaagaaggttttccgtgatcctgcaagccctgccttcctttctgggatcctgcc

SEQ ID NO: 17 - DNA, 493 bp, Homo Sapiens
tcctgtcctggtgacaggagaacaatgttggtgaacgtcgcagcgggtgtccgagtgctccgtgtgcccctgagagcgggtgggagcggaagcctgagcggcctgcggcctccggcgatagtgtgctatctgccgctgcagcgcgcgtccgcgcggcctctgggctatttctggccaggccgcagcactgtggtcggtgcgggcgtggcaggggcggggcggccttatcgctcggctctcccgcctacgcctcccgctgcagagtaagccgggctgccgtcttctcgccatgggctccggtgagtctggagtccggtcgggcccccggctgctccctaggccgacccgggttgagaggagctctggtcgtttggctgcagctgggagagacttgggtcagacttagaggggacttccagccggcgtgcggggtggtcagggtggagaggctggcgggctaccgggacgccgggcatcaggggctggatggagc

SEQ ID NO: 18 - DNA, 284 bp, Homo Sapiens
ccaggctgcaggaggagcttgcagtcctggaggcttctggctctcctctcaccccgctgcccgcccctcagtgattagttggaatccaagacagcaatacaagatgtgtcgttggtgggagtgatggagtgcctgctgagtgggccgcagataagcaccgtgatttcggaggacgcttcatcatttcgccgtaagaacatgttaacgggtgattgtttgaatgtctccagctaataggatattattcataacactctggctagttggaatggaagatgataaga

SEQ ID NO: 19 - DNA, 457 bp, Homo Sapiens
gcagggacatgggggctgcagctcacagtgaaggtgggggagacagggcgagagggcgttgctggaggtggggtgtgagggacggcttgcgataccctgggactgcggggtagaaagcgcagttctaggggaggtcggggtcagaggtgaagctcgtggggagggcgagacccgggcgcaggtgctcacaggcgagggcggggttcaggttccagctgggctttgagttccggttcaggcttccatctgtggttccggttccaatttgaggtggagtttgggattaaagtttagacgaggcctctcgttcagggtttgcgttggggattggggtggggatttgcaccctgggtcagcctgggtgcatctcatcgggaccaccggggcgggggacatgggccgggtggctccttgggagaagagggacagggagcgcagctggtggagaggacaagaa

SEQ ID NO: 20 - DNA, 452 bp, Homo Sapiens
ggcctgctcacccctcttcttggtgtgatcccctcaagtccaatccccagggaccttccccaggaatgctgagagcaccagctgtcccggccatgtcaggcatctggccaccaggtctccttccactccaggggcaaccaccgccagagggaaaaacggaaacaccaggttatttgtgatctgcatactcactcctcgtttagagagacaagcaggaggccaggggaatagatgggactgtgggaacagccaagggcagagggtgaagggcggcgatcagaaggaaagacggaatgcccacacattccctgccgctcccggctccagccgtggaggaagcggggctcggaggacattgcaccagacaggtcttgtttagaaaattggaaaagaacaaatattgattacaagagtgcaggagaatgggcccttccatcatcaaaaacaggtat

SEQ ID NO: 21 - DNA, 410 bp, Homo Sapiens
gaaatcccctgttgctcatcctggctcgaggaggcctaggggccccggagggggaccagtagaggcaggtctctggctgagggagagtgagggtgtgcccaggactctgcgggtgtggccagcacctggtgaatgcacagccgattcgcaggtccagctcctggcgagcatccactgagagcgcctcgttgtggtcaggctcgcctaggcaggccatggcattacagatgtctgtgtccgtgatggagctaaacctggcccggaacacggtcttctcgccaccatgggccttgttcatgacgggcagaacagcatcaagaacctgggggtggggagtggccagctgtgacccacctcccagatccctgccacagctccccaccccactgtgaagcctggttccttccagg

SEQ ID NO: 22 - DNA, 424 bp, Homo Sapiens
aggacatcaaggagaacctggaatcccggcgcttccaggtggtggactcccgagccactggcaggttccgcggcaccgagcccgagccccgagacggtaacgcgggggaagggggcaggaggtcgtcgggggcgcggcctctacgccctgagcagtgccctggacttgacctttcttttatttttttaatttatcttgctttcatttcctttccttttttctttcctttccttccctttcccttccctcctttcccccttttccctacccttgccttcttttcacagggtctggctctaccgcccaggctggagtgcagtggcacaatcatggctcactgcagcctcaacctcctgggctcaggtgaccctccccgctcagcctgaccttgcctttaaaggccactgcatgaggtggggaagga

SEQ ID NO: 23 - DNA, 313 bp, Homo Sapiens
caggggagctgccaggaccaagctggatggagccaggccgccctgtggctcctggggagggttcccagagggctgccgggcgaagggagtcctttccaaaacggtttcctgagctctgatgcacacacatgcagctcacccccaagtctagcgttccattagtctaccgttccgttcttcccagcacattcggtgcgcagccgcgaccagtctaaccgtggcacctttccaccggccctgagccctggcgtgcccctccacgacatcccctgggcacggagttgtgtcgacaggtctctgtgactggctgggc

SEQ ID NO: 24 - DNA, 410 bp, Homo Sapiens
ttagcaacagtgaagggagggagaatggtgggagaggattccagatgaacggtgggtcgctggaggctgagcatgccagcaggatgtcagttctcagagcaaagcccatgtcaaacagccaacgcttgctccttctgtccccaggatcacctcctcgcacggggagcatctcctacatcaacatcatcatgccttcggtgttcggcaccatctgcctcctgggcatcatcgggaactccacggtcatcttcgcggtcgtgaagaagtccaagctgcactggtgcaacaacgtccccgacatcttcatcatcaacctctcggtagtagatctcctctttctcctgggcatgcccttcatgatccaccagctcatgggcaatggggtgtggcactttggggagaccatgtgc

SEQ ID NO: 25 - DNA, 494 bp, Homo Sapiens
tcttgaaggagcaccaggtggaagcgacgctccacctccaggatgtgctcctgcacctgcgggctgctggggtccaggctgttgtcatagcccaggtcgaagaagagcaggtttcggaggtagtgggcattgaagccgttggggtcgtagtagcgatccgggtcttgcaggaactcggtcagcttgtcgccggccgagagcttccacgtgaggggcaccaccggcccgaagtagtggaaggaggactcgaacaagcgggcggggtcgcggagcaccgtgatgaagatggcgttggtcggcaccaggccgcgcacctcgtcgtagtggaagcgcatgtggttgcagatgatgttgaagcaggccccgggccgatagtcctgcaccaggctgcgggcgaagaaggtcgggtagtcgaagtcattgcggccgttagggaaggcgaacttgagccggtgcttctggccgaagcggaacaggatgttgagcagggtgct

SEQ ID NO: 26 - DNA, 449 bp, Homo Sapiens
gtcctctgggcccctgccagtcaagggacgctcgtcgcgcgccaattgttaagtctttcattgtttctgtaaacctgctgacgccctcccagcgcatagggagactgcgcacgtgagtccgcccccgcgcgcactgcggagaggtagaggcacgaatgtagtacaaggtacaaaatgactactccagagagggccagatgactaagtcagcaaacacttagggaacacgactgtgtccgctgcgcgtttcccggagtagacacaagggtgaatgaacaaagaatggatttcggtcactgaaagtggagaggtagccgactccgtccgtggaggcccttagcagagctggatctggtagtcccccggtcatgaggggagattctgctggaggaaagaggtctccattcccaccgtttgaaatgtgtaggatgccctcagattctttggcc

SEQ ID NO: 27 - DNA, 424 bp, Homo Sapiens
cccctgctttgcatattcatgaagtctagcgaggccggtcgcccaggctagccgtggacgggtcatgaattattcatgaggaaacctctggtcccgcccagaaaggcctcgttgactattcatgagccgaggagcgggtttgggccggaaaaggccgttgacccccggtgggagggaagcgtcgacgagctgaggtgagggctgttgagacgcgaggtctcggcccagagagggcactcgggcgttgttagttctgtctttatgtcaaaaaacaatttttttttcttttcttattacttaaggctttaagttggatttgaaagtatcatatttcgtgagggcctaaagtactgtgaagagaatcgggagggcagggggctgaggaggaaggcaaaagggaggcgatttcccccagaactggaca

SEQ ID NO: 28 - DNA, 371 bp, Homo Sapiens
atcttcagagacatccccttgggaagacagctggaaggcagggctgagccggggtcatttgtgacccagcggtgaggtgatgaggtactgacgaaagtactgtatttcccccttttgagaaacgctttggcatcagatgagtcttgggggagggaggagaggaatttggcagggatctggttataagccatctggagggtggcgtgaggaccggaaaagccgctgcccgttctgtttggtctcatcccctgaatgaggtcactgaatgtgcacgggaggctcagcgctgccccactccagcctgatggagaaatcctacccgaaatcccaaagcagggcagggacattcccaccagatacttttgcagcct

SEQ ID NO: 29 - DNA, 500 bp, Homo Sapiens
tcctctcccacagggtcccagggctggtggttgctttgggtctacagctacgtcttacccgcctcctgcctcaacagcctgtgtggtggcaaagccggtgtggggctggggaacgcagcgttctccaggaggggacccggctctccttctgcagtgcaggcgaaggcctagatgccagtgtgacctcccacaaggcgtggcttccagactccccggccggaagtgatgcttttttgccgcgggccctgggtttgaagcagcctggctttctcttggtaagtggctggtgtcttagcagctgcaatctgagctcagccacctacacaccaccgtggccgacactttcattaaaaagtttcctgagacgacttgcgtgcatgttgacttcatgatcagcgccgctgggaagaaccccagagccggtggggtggggctggaagcagcaggtgcagtgatagggctgggtgcccaggaggcctcagtgctcaatcaggccaagg

SEQ ID NO: 30 - DNA, 431 bp, Homo Sapiens; identical to SEQ ID NO: 10

SEQ ID NO: 31 - DNA, 451 bp, Homo Sapiens
ttgagggcagacctccaaggttggaggaagaagccgcctctgggagcaggaggagctgctggatcccctcctcccaggtttcttttcctgccccccagcgcctcttgcaggcaggcaaacaaccccagcaggagcagcagcaggcccttcagccgcagggctgcagctctgctgaatgagagaagcctctctctggcgagtcagaggagcgcaggccatatacccgggtctctacctccatgtctcccactgtgcccaggactgagcccagcgtgggagatgcgggctggggccgtgctggccaccccctctcttccacctcttgctccagccatgctttcagctccagggctgaggccagtggctagagcagatctcatgatgtcaggtagctcctcactgggctggtccttggcaggaccaggacaggggcaggagggatctggagctg

SEQ ID NO: 32 - DNA, 402 bp, Homo Sapiens
atctgggcccaggaccctgcattctggaacctcttgtttccctttgtgttgtcataaggccaggaagcctgcaattctcacagcatcaaggattctaaggaggcccaggagtaggctggcagaggcccgtggcaaaggtgtggcagccgtgaccctactctccccctctcacgtgtgtctgtgtcccgtggcgccacctcacagacaccctgtctgagaagggattatgcctgggaattcccagggccggactttgattgcagaacctgacgaaaggggctttgcagggtccagaatgaggaggaggcaatgagaattatccctggaggattctagaagtagaggctgggagcatccacaggtgaatggagcctgaactatgactagaaaggaattgggaga

SEQ ID NO: 33 - DNA, 500 bp, Homo Sapiens
caaagtttgacagagaaggatgacccacaggagcagccttgctgtgcttgaggattgtttgacacttgaaatgagcttcggatcagttcttggctgaagtccacctaggcccctttcgcgaaggctaagctatcagagtcaaccaccactcttgccccaccctgttcaaataccgtcgtcggggttgataactgtatccagtgaacatctgtactggaatccggagcatctacctccctccacctgcagcctgaggaattctgatcctttggtgatttccagaagcctctggacgcagctgtccgtgaggcggatctgcccgtcgccggcctcggggctggacgacacgcccggagtcccagggaggccgcgaggagcctgcccctcggccaggaagtgaccgctgtctgcgtcgcggcccttaaggacaacccctgggcggcaaccatcttcctccacccaggagatcaatttctttgttgaggttccacctaaggctg

SEQ ID NO: 34 - DNA, 480 bp, Homo Sapiens
gcctccacctaccacagctgtcagtttcccctaatcctaggaacccccgccccaagggaaacaggacagacagcgcccgtgtcccactctgctcattttcagatgaggaaacagtcaccaaggtcccgtgcaaactcgccgcccacccaacagcccacatcacttgccttgctccagcttcccgctcgccagctggtgttcctggcagccagcaggtccgcgggggccccgtctcagccaggctgggggccgggggctgggcctcaggaactctgctgctgctgttggggctgccccaagctagcgtggacagaagcccagagctcaggggcacctcagggctgaggggctcaggctggcccttgggtctcgggctcagggcagtcacccagggtgtgtgcctgcagccaatcagggttgtggggaggaaggtccccggcactgccacagtctgcaggtcccatgagcctggtcctgggg

SEQ ID NO: 35 - DNA, 364 bp, Homo Sapiens
gggccaggggtcccacaggtgagtggagccccagcagccccctcagctctgcgtgcccatgtactggtcttctccctggctctatactcagtgttcaaggggttgcagtgagacggggcttgggccgcggagctgcgcctggctttgctgctccacaagggcaccgtggctgtcagcctgtccctgcaactgctgcagagccacgtagggttacaggtggtggctggctgtgggatccacttcttgtgcatgacacttctaggcatccggctgggtgcggctctggcagtcagcagggcctctgcaccagctggcccagtctgtgctagagggcatggtggctggcaccttcctctataccacc

SEQ ID NO: 36 - DNA, 467 bp, Homo Sapiens
tgccctcactgggcagggcaaattataccgtggcccgaccataaaagccactttccaaaaaaagaagctttaaggcccccgagagacgcagctgagcctctcacctggcagtgcctgactcaggaggtgatgtctgggccatgagccacagagcctggtgtccctttaagcagggagtacaaattctcatccctccctcctgctctccctgacgtcagctggaaggcgtgtgagtgagtgaggggctgaggtaccgcccgcgcgagcacacacagacacacacacacacacacacacacacacacacacacatcttccagacccatcccctgcctgccagctccacgagccagagagagacagagcgcggacgccgcaggaggcagtgcctggaccccagctgcccaggagaggtgaggggctagatggggcctgaggacactgtgccagaaactgtggctttggcc

SEQ ID NO: 37 - DNA, 366 bp, Homo Sapiens
ggggagaaatgaaagcattgagtttaagtggcctgcagaaccccgggggcccaggcggcacggcgggcgctggggctccgggcagagctttctggaggtttgtggcagcttcactttcacggcatccacccccctcgggccctgccgcagagaggaggaagctcctgccggctgagcgggcctggaggaagtgagcagcggggctcctgcctcccggcctggtccccgaagaccccagaagaacccggaacttgcttccattcggaatccagggaccaccctttgcactcagtaggcctttgttttcctgcgtggaaagcggttgggtgagttctggcatcggggccaccatacttgagtgttggg

SEQ ID NO: 38 - DNA, 333 bp, Homo Sapiens
cccacatgacccagtggatgggcaccgtgaggaggtccttccaggaagccctcaatttggtgaccaccacggtgggccacgaacggacgagtgcagagtcggccagccggacccccttcaagcgtacttcctccttccgacacctggcttcccggagtcgggaatccttccgccgcttctctgctcgcagccaacagagattttcttcactgaggaaaaggcatacagattcggaaccgccagatattgtaagcttattatgttttaaaaaatattaaaacaacactgaaagctcctcccctccagtcctcccagggagggggtcccagacat

SEQ ID NO: 39 - DNA, 378 bp, Homo Sapiens
gctgtgagcctgtcagaaggtgttgggggcgggtacagttaccgctcaccaccacccccaacggggcaccggcagccacgtggtcggaaggggcctatggcgcaatggcccggaaggcagtgacaccatcgttcccgtcctaagaaccatccggccctttggggaagactggctgttggggagggccaaggggccaggcacccaggcttagcgaccccacggcaccctcgccgcctccccaggtatctgctgccgggctctggcaggggcctgtgcctgtggcagcgcacgtgggactggggtttctgtgtggctgtgcatctgggtctgtgtgcggcgtgagggagacctgttccgttcaccatggggactctggtc

SEQ ID NO: 40 - DNA, 269 bp, Homo Sapiens
cctttggggaagactggctgttggggagggccaaggggccaggcacccaggcttagcgaccccacggcaccctcgccgcctccccaggtatctgctgccgggctctggcaggggcctgtgcctgtggcagcgcacgtgggactggggtttctgtgtggctgtgcatctgggtctgtgtgcggcgtgagggagacctgttccgttcaccatggggactctggtctgcatgtgggggttcctgggctggtgagatccagggctgtagatga

SEQ ID NO: 41 - DNA, 496 bp, Homo Sapiens
ctcctggccagacctggagctcacaagctaattttagaaatgactggtcgactcagctgctgctatcacattggcccagaaggagggtggggggaggacgggtcggggaggggcagtaaggggaagggatgtgtgtcggtgtgtgtggagagggtgctccttcgctcctgctttcccggctcggtggggtcccttcgcggccacccggggagacgtcttagacagtcgtggttcctgtgatctgtgtcctctttgcagaaggtactattgggctgggttttagacgggcaccttgcgagcggatcggcgagttttaattttccggaatgcgctgctgggggctgcggtggcaggcctccggtcttttggtctattttaggcctttctggtgttgagagcttccgaggcctgattcctttgcctgttgcccgtgctgctcactttgaaaacaagagtgtttcggtggaaggatttgagaacaaaatgctggggcaaa

SEQ ID NO: 42 - DNA, 285 bp, Homo Sapiens
aggggcagcccctcctcatcacagggaccctgtgtgccaggccccagctgcgttgccgctgaattatggatttaatagcagagaagccttgcaggccgcctgtgctggctcgggaaaccggggcccagccggggcctgtcacggtcctggtgccgccctgcttcctgtcggcgccacggagcaagcggagagatttatcttcccggctttaagaggtactaacggaggaggctgagaggcaggagctgaataattgatggccttctctggctcaggatctgctga

SEQ ID NO: 43 - DNA, 448 bp, Homo Sapiens
tccttcctcagctgcctgagggctggctggtgtgagcccaggctcctgtagggtatgccaggagcaagctgtgacctggccccgggctgtggagcccatgctactctccactgaggatcctgggctgctctgtcccgcgtacgggcatccgggttctgatagcccgccgggccctgggccaccagaggccttgaattgcgtcctggtgacagtcagccccttgcatggggcacgcacagacctgggcctaggctggggcaccgagatccccacatccagcagccgcggtgaggctggcctgcctgcttcccggggccacctctgccgtgccgtctcctccctctcccctgccccctctgttggttgctcctcccccgccctctctgggcaggcacggccgggtgggggtgaggttctggcaaagccccctctgttttccagcccagtg

SEQ ID NO: 44 - DNA, 374 bp, Homo Sapiens
cctgctgggcacagtgggcaatgggctggtgctggcagtgctcctgcagcctggcccgagtgcctggcaggagcctggcagcaccacggacctgttcatcctcaacctggcggtggctgacctctgcttcatcctgtgctgcgtgcccttccaggccaccatctacacgctggatgcctggctctttggggccctcgtctgcaaggccgtgcacctgctcatctacctcaccatgtacgccagcagctttacgctggctgctgtctccgtggacaggtgcgctgtgcctggggcctggctgggcagggctgtgggggcgggggttgggggaggagtcctgaacagatcctcactggccttaggaaggagagagt

SEQ ID NO: 45 - DNA, 500 bp, Homo Sapiens
ggagatggctgatgcccagaacatttcactggacagcccagggagtgtgggggccgtggcagtgcctgtggtctttgccctaatcttcctgctgggcacagtgggcaatgggctggtgctggcagtgctcctgcagcctggcccgagtgcctggcaggagcctggcagcaccacggacctgttcatcctcaacctggcggtggctgacctctgcttcatcctgtgctgcgtgcccttccaggccaccatctacacgctggatgcctggctctttggggccctcgtctgcaaggccgtgcacctgctcatctacctcaccatgtacgccagcagctttacgctggctgctgtctccgtggacaggtgcgctgtgcctggggcctggctgggcagggctgtgggggcgggggttgggggaggagtcctgaacagatcctcactggccttaggaaggagagagtgggggaccagaaagggaggtgggtgggaggaaacaaaag

SEQ ID NO: 46 - DNA, 419 bp, Homo Sapiens
gctgggcccaacccctccctaggggaattctaagacaaagttgggggatgggagttcaggcagaaactgctgggggaactgagtcagagctgaaagtcttctctgtgactttcactcccagccctctggctggtccacaggggccgggagggaggcagggggacatcacctggctgagacatggggcggtggcagcgcgcgctctccagtcctccccggtgctgggaccgtggccatctctccagggccctgctgagctctggctgctggggccgcaaagactaaaagcccagagccagcccacttcctgtgcagaggatagaggggcaaggcctggggtggagaggcggggagacgaggcttatgagaaagcctgaaactcctcaagcacccagggccagataaagatctgcctccta

SEQ ID NO: 47 - DNA, 483 bp, Homo Sapiens
aggcctgcaatggtgttggcatctgtcagagcaaagcagaacctccctcctcccagactccagtggctgagctgggccgtcagggcagggatggtgagggttcaaatgccagggcagagcaggccacggcatcccgtccacccacaaatgtctccgcagaccctggtgatggctgtactgggggtgcagcccccagaaccactcgaagctcacgtagactgctcccccaagcacgggggtgggggaggctggccccctgagcagggcccggcctctgcaccagtgcagccccacctccctcccagcccaggtccaggctgctgggggtgcagagagggcgagctgcaagtggaggtgagaagggagctcgtgggacgcaggctcagagagaagcctccgaggaacctctctgttcccttcacgagcggagccttggggcagctccgtgtttctgccacagttatctcaggagatgatggctgt

SEQ ID NO: 48 - DNA, 439 bp, Homo Sapiens
ttgatgtcctcccccagcccccatcttcttttcagaagtttcctctttctgctccgagaggggctgagccagccgtggctcccttccatcccgattccagtggagacaagccggggaagtttctgggagctgcgcgggtgagcagagctgagacccggcatggctgtactggccgggtcactgcagggtgactggcggctcggcttgataacacgtttacctgagtcatctttggcaaaggttaccaggctccaggatggaacacgcatgggggaaatgcctcttccgtgacacgcccacctcgctctaaagtgagacgagggagggagggcgcggctgccaggtaatgaagtctagagtttactagagttgagggattgatgtgttgcgtatgggctgggtctcatttccaggaagctcaggacaaaaccctgttcat

SEQ ID NO: 49 - DNA, 450 bp, Homo Sapiens
aggcacatctgtttagttcctggccacgtgggcacctggcgctgagtacttacttgtccgtgctgattgatgtcctcccccagcccccatcttcttttcagaagtttcctctttctgctccgagaggggctgagccagccgtggctcccttccatcccgattccagtggagacaagccggggaagtttctgggagctgcgcgggtgagcagagctgagacccggcatggctgtactggccgggtcactgcagggtgactggcggctcggcttgataacacgtttacctgagtcatctttggcaaaggttaccaggctccaggatggaacacgcatgggggaaatgcctcttccgtgacacgcccacctcgctctaaagtgagacgagggagggagggcgcggctgccaggtaatgaagtctagagtttactagagttgagggattgatgt

SEQ ID NO: 50 - DNA, 481 bp, Homo Sapiens
tcacccaggtcatctctttgcttgtatgaacctcaggccacccttagaaagggtctcatagccccggtgtctcactctctgacctttgccaagtcgtcttcagcagcagctggaactctttgaagtggctgccacagatgttggcaaagcccggcctgggatgcctccaccctgcaccaggcacggggctgcctctgctgcatattcacctggaaatcatccacatgccaagcaccgcagaggcaaggggagtctgccattggactgcgttcaacacggctgcagggatacagacaagcacattccctggcagaggcacgggcccggctggctggagctgcagcagctgtgtgtggtcacagagcttccaaatgagggagatggatggcctcgcttcacagtgtgcccagagcatgtccacggtgcctgggaagaccagggactcaccatgcccggctctggtttccctcacagtgaagcc

SEQ ID NO: 51 - DNA, 223 bp, Homo Sapiens
ccctgctgctcaaaactctgccagtttttaggaagtgctgttttgtcaaaagcctgcacacgagacccccgtgggccaggactgacttcctccccacacagggctgggcggggcaagcaggaaggagcctgttacagtcaaggtgacgcatccttgccgggccagcccgaacagcagctgggtcggcaagcgacaggagcacgggtcatcttttccccagagg

SEQ ID NO: 52 - DNA, 495 bp, Homo Sapiens
cccacaggctctttcttctctgggactggccagactccctccagatggccccacccctgccatggctgattggtccaggctggacacgtgacccaagtgaaacccaatgggattctctcctgtgattctgaacccggggaggagacctggagcctggaggtggcagcgacttgggagccgcgtgggcctgtctgttccacacactgccttcttgccccttccttcaacctatggccccctcagaggacaacctttttccttaaactcctcggacgaggttcctgtggcagccgagagagtcacgcagcgggggtgccttccccgcctgtgggggagccccaggcggcccgcacagtctcgtggtggtcgggcctggccacgtgtgctcctcggtccccatgtggccccagcagggcgcccgcctccctcccagggcttcctcccccaggagggatagcaggaaggcaggcaaggacaggacctgagtccacacct

SEQ ID NO: 53 - DNA, 390 bp, Homo Sapiens
cagatgggtacactctcccctccccactccatggctgttccagcctcagcagccagtttgaaggattcccagggggtagccaccttgcttcggcctcttccaggctgggaagtgggagcctgtgcctttaaattctcagcaggttgaaatggctgatgacatcactggttcccgggagcggtagagctggagccggagccaagggagtccaggctgccgggggctgcagacatggagggccagagcagcaggggcagcaggaggccagggacccgggctggcctgggttccctgcccatgccccagggtgttgcccaaactggggcaccctccaaggtaagacccctgagacccagtgccccccgctttcctgatccctggttccacaca

SEQ ID NO: 54 - DNA, 497 bp, Homo Sapiens
cagctccacttgccctgcctgcccccagcagacactgccctcctcttcattcccaaagcccccacccggcccagatcctctcctgagatcagtatcatccaacagccttttataaaaaattgtttccttgattaccgagggtaacaatgaaaacacgtaattgaatctccaagaaattaccatttttataacttgcgcccagttcccgagataaattaaacgcctcccctgtatggtgagccgctcactgcgcatcagagaggggctgatactgccctttatcatcgatgcgggacttactaagaagaatgcctcacactgcctcccgggaggctcctggcacctccagctcatggccctgagcgggcagagttggccagctggaggcgccgggcgggtggtcaggtgggccccctcctgatcactcctggccctgttactggctagctgcgtggtggtgtgggtggtaagtgggagggccagtcagaatcttagcc

SEQ ID NO: 55 - DNA, 349 bp, Homo Sapiens
caggcatggtccatcctctcttctctcgctggtgccctccaccagggactccactctgccctgctgctcgcttcttcctggcccctgctggactctcctcaagcgctcggcatgcctcccactgactctgaagagtggccagtgctctctgcagctcgggtccgggggtgtggatgaaggagccccaggcagtctcatgagcacagagagcaccgtaggctgcggtgagctccggctcatcctcccagctacatgactgcagcctcctatgcgcatcccagcgggcatggatcagggccagtccctgagcatccttggccaggaagctcaggtaccccagtgggttgcc

SEQ ID NO: 56 - DNA, 355 bp, Homo Sapiens
cagaatctccaactccacaccacagtgtgccaggcatggtccatcctctcttctctcgctggtgccctccaccagggactccactctgccctgctgctcgcttcttcctggcccctgctggactctcctcaagcgctcggcatgcctcccactgactctgaagagtggccagtgctctctgcagctcgggtccgggggtgtggatgaaggagccccaggcagtctcatgagcacagagagcaccgtaggctgcggtgagctccggctcatcctcccagctacatgactgcagcctcctatgcgcatcccagcgggcatggatcagggccagtccctgagcatccttggccaggaa

SEQ ID NO: 57 - DNA, 475 bp, Homo Sapiens
tcactcctcatttatccttcttagagatacttaagacatcaacagcaggactgggatgtgtttacgaaaagaacccaaatcctagctcaagccacaggcacaaagtacagcccaacagacagggaaggggcagggcaagggagtgtgaccctggcggcagctggagaaggcactgctggagtatgtccaggaggagctcgccagtgccagggcaatgggacaggaagggcaagccaagtccgagcccagggaatgtaaaggaaacagcagccatgtttcctttacgtcgtcttggtatttccaagcagctccgcataaaatctttgcgcacacacacacatgcatgctcactctctctctctctctctctctctctctatctgcctgatagtttccttcaggtctggattctacgtctgacctttgtcctggcaagcttgtcctcccctccagcctgccaggggcacactctgca

SEQ ID NO: 58 - DNA, 223 bp, Homo Sapiens
ttccactccttgtcctgggctaggtgggcactaccaggggctcctttggtaaggagtaccgggtaggcacccggtcctgccaatccaccactggaacagctggggggacagcagacaggcacggtcggacagacttgacagatcaggcatcaggccctctgcgctggtcccgggctctttaagcaggaacgtgaatggcctcaagatgtctcacatggtccca

SEQ ID NO: 59 - DNA, 448 bp, Homo Sapiens
gcctcatgtctaggtcccagccccgcccactgcaaccctgtgcccgtcatgcccagcaggctcctgctccagcccagcccccagagagcagaccccaggtgctggccccgggggttttggtctgagcctcagtcactgtgttatgtcttcggaactgggaccaaggtcaccgtcctaggtaagtggctctcaacctttcccagcctgtctcaccctctgctgtccctggaaaatctgttttctctctctggggcttcctcccctctgtcctcccagccttaagcactgacccttacctttctccatggggcctggaggaggtgcattagtctccgggtaaccggcaggaagggcctccacagtgggagcagccggatgcagcctggtcccggggcctgagctgggattgggcagggtcagggctcctcctctcttccagggcagatgt

SEQ ID NO: 60 - DNA, 383 bp, Homo Sapiens
tccaatcccatcctgctggcccagaagtaggacgaggggagagacaaagccaaacccttgaccagctccccctgccctggtcaggaagccagagtgtgagagtgtgcggggctcggcatccggccccactcggccatccgtgctgaacaggatgccctgaaggacgacaaggctgcctcggatcctgatgccacgcttgtttcaaatccttgacggggagaaacgcggggcgccacgcggcacctccaggtcaccggttcccactctgggattcaggtgagaagccagggtctcggggtcccctgtgacctcttggcctttgcccatggagggcagtcgtttgactaaaacaggacctttctctcccaaggcacatttccaag

SEQ ID NO: 61 - DNA, 293 bp, Homo Sapiens
gggctgccagggactgagccctgagccagcctgagactcaggaaaccccgtcaggagggagaagggagaagcagactctggacaccagaaagccaggggaagggtcacaaaaggagtggatgtgacggaagggcgggctcctgggtctcttcagaacatatcccctgtgcccagggggatcagaggggcagagtccactgcgtgaaagccccactgctatgaccaggtagccgggacgtggggtggatgccagaaaagactccacggaataagagagagcccaggacagcagg

SEQ ID NO: 62 - DNA, 388 bp, Homo Sapiens
ctctgaggggctgaactgccccccaccttctggaagctgggaggttggaagaggggatgcgtgcgatggactcagcacacagctgggaactcgaggcacacctaagccttcgcttgtgctgtgcggagtccacacttccttccccactggggtctcaaaacctcccctcactcaacagggtggtgctgctcaaagctctgggcacacattagggctggggagggggtggtggagagggggctccagcctgcccaaccaccaggcaacggggcacctgcccctctctcagctgggtctggacccgcgtcccaggctcaggctgcaatgcctttctctttctctttctcttctttttgcagttccgttgggtcctgcccaggacagataa

SEQ ID NO: 63 - DNA, 267 bp, Homo Sapiens
ccctggcctgacttcctctttgtaggttggggtgggaatgggagagtcgcactgtgctcagctgggttggatatcggagacctgggtctttttcttttccccacattgggccccatcctttcctgacctatcgacagtgatccctctcgccaccccagttccccgcctctacccaggccacgttatctgacctggaggacagtgctggtggccagaaatatgactgcctgtcccagagcctcctgccctggcaagccccagatgccc

SEQ ID NO: 64 - DNA, 408 bp, Homo Sapiens
tctcctgctctagtcaggaaccttgtggggctgatgagggccaatattccacctctctccttcttcgtggctgatccctgggggtggtgatctggtcctttccctccctgctaaagccagagctgctgacggcttgccattggctcttcagccagggctggcttttgtttctgtggcccagttgctgagtcggggctttgtctcccaggggcccctcttccctccctgcctataagagcccgacctcggctggtctcagatctgacatgttccctgggcctatctcggtaagtcccaggtttggaggaggggtgggatcagagttctgagtgagcattctgggaggcgaggaacccaggtccccagtcctagggatgtcactgtgtcatcctgaatgccatcctcatc

SEQ ID NO: 65 - DNA, 432 bp, Homo Sapiens
aaaacagccctgccttattcaccctgcgcatcccatcctctgcttcagccccgccgggctcgccctgcatgcaaggcggggctgggacccagggtctgagcttcgccctctggacatccggctcatcgcctgccaaaggtcctgtggctggaggctccggcctcctcaccctcccacagggtcccagggccgatccaggcctgcgggccaggaatgtgctaacggggcaacttgggccttgctggtccacgcaggcacctgtggactttgagaggggactgggtggggaggggcggggaggggcggggcggggcggtgccgcagagtgcagggcgggcggggccaggccagcagggagtgagcttgtctggccgcctcgcctcggagccactgcactgctggctgcagacacaggctgcaccatgaagccag

SEQ ID NO: 66 - DNA, 359 bp, Homo Sapiens
cctgcctccccctgaggatgagttgggtgcacctccttcctgcaggaagatgagggctagagatggaggtctatgtcagggccacagagtctggaatcctccctggagctaaaacagccctgccttattcaccctgcgcatcccatcctctgcttcagccccgccgggctcgccctgcatgcaaggcggggctgggacccagggtctgagcttcgccctctggacatccggctcatcgcctgccaaaggtcctgtggctggaggctccggcctcctcaccctcccacagggtcccagggccgatccaggcctgcgggccaggaatgtgctaacggggcaacttgggccttgctggtcca

SEQ ID NO: 67 - DNA, 436 bp, Homo Sapiens
caatttgcaaacctcctcctgaaataagagagagagggcaattgaaactatctaaggcagcacttggaacacgcaggccaaagactgagccagggagggattgttatcacatgggctgtggggaggcagagctcccctgtgtccccgagagcacccctccccggggccccaccagcccccaactcgcctctcgaattcccacctctccccttgctctgcgcctttggaaacccagacagcggccccactcccgtgattcatccagcaggaatgtgggagttctcgaattgctccagctaaagccttttaattccccttcggtgatgaatgggtgaggccctcaaatgaaatgtggaggctcccagtcccagcccgcggccctccccctcctcggcgtaattatttctgtgcagaacatgtcaagtgccctgcttcc

SEQ ID NO: 68 - DNA, 391 bp, Homo Sapiens
tggggccaagttcaccttatggactctcttccctgcccttccaggagcagctcactgaaatgtgttccccgtctacagaagtaccgtgatacacagacgccccatgacacactgtacacaccaggggccctgtgctccccaggaagagggccctcacttgaagcggggcccgatggccgccacgtgccggttcatgctccccttggccctgccgatgttcagggacatggagcgctgcagcaggctggagaagatctccacttggtcagagctgcagtacttggcgatctcaaaccgctgcaccaggaactgagcgaaaagaggaagacgctgtggtggtggggctgagccgggctaaccctggggccggcagagacagctgaggaggggt

SEQ ID NO: 69 - DNA, 258 bp, Homo Sapiens
gagttggctggggattttcagtgtgcgccttttggtattgatccactgaagttggagctggctggggaatggcaggaggacgccgcagtgttattagtgcggaggacacgctgtaatctgtcagtgtcaccccggttgcagctggccaggaaccatcctgctgttaacgcctcccttcccagcagccatggagcacacaacttgtacagcacctgccagtgcctccacctctccttgtaggagggagagtgtggatat

SEQ ID NO: 70 - DNA, 486 bp, Homo Sapiens
caggggaagtagagaatgaagattgaccagaataaccctctgggaatgtgccctgggcctcctagagggaagagcttcccttctattcagcgctgcaggatccacagaggaaggagagccctggccaccagggaggagccacatgagaggacccggtgtccccacaaatgggaacgtgagtccatgaaagtcggtccctgctctgggtttgattgtgacctatgaggacattgtgtagtcaccacctgagtcctctacaataaacagtgagagcgccacggacagattcactcccgaggagcccagtaaagtgggaggactgaggtcacagggagaagacacaggcaccacctggcctggccctgacagggggcagtggacagaacagtgcggaggcagtggggtctctagaggctctggtcaccttgtcataccatggtttgtctcggtctggacactagagggcacttggggatcattcctgag

SEQ ID NO: 71 - DNA, 411 bp, Homo Sapiens
cacagaggaaggagagccctggccaccagggaggagccacatgagaggacccggtgtccccacaaatgggaacgtgagtccatgaaagtcggtccctgctctgggtttgattgtgacctatgaggacattgtgtagtcaccacctgagtcctctacaataaacagtgagagcgccacggacagattcactcccgaggagcccagtaaagtgggaggactgaggtcacagggagaagacacaggcaccacctggcctggccctgacagggggcagtggacagaacagtgcggaggcagtggggtctctagaggctctggtcaccttgtcataccatggtttgtctcggtctggacactagagggcacttggggatcattcctgagaagactgaggttgatcagagcagaacc

SEQ ID NO: 72 - DNA, 386 bp, Homo Sapiens
agggccactgtgctgcaactgccaccacttcctggcacctcaagtgacacccgagcatcattcaagggaaatggcccatatcccggcaattcccccacccgccccactttcttctctgaattagggacttcggcagagacagagccccagcagcctccacccgtcccctcgtgtcggccttgctcacccacggatgagtcagttggaatgtttggacatcccagctcagcggctgtggtaccaggagctgtcaggaggcgggaatgcagagaatgtggctcactgtgctcccgcccgcccaggctgaatccgcagagaggtttggaaggtgaatgacacaatgtttgtcaagggtttgggacgacaggtgcatgtgaagatgagga

SEQ ID NO: 73 - DNA, 500 bp, Homo Sapiens
catggagccagaactcaaatctaggtatgtgaggtctgagcccaggcttccaccagggccactgtgctgcaactgccaccacttcctggcacctcaagtgacacccgagcatcattcaagggaaatggcccatatcccggcaattcccccacccgccccactttcttctctgaattagggacttcggcagagacagagccccagcagcctccacccgtcccctcgtgtcggccttgctcacccacggatgagtcagttggaatgtttggacatcccagctcagcggctgtggtaccaggagctgtcaggaggcgggaatgcagagaatgtggctcactgtgctcccgcccgcccaggctgaatccgcagagaggtttggaaggtgaatgacacaatgtttgtcaagggtttgggacgacaggtgcatgtgaagatgaggacaaagactgattcttttcttggggctgccagcacagtttcgcatccctcccacacatgtc

SEQ ID NO: 74 - DNA, 340 bp, Homo Sapiens
gggggtagatcacactatccccaacttaccaagggatcttcctctgacagagactgagcaagatccaactgttctgagctgtgtggatcccacgtccagctgtgcatctgtgtaataaccagacacgtcctccggcctcccagatataccctggaattcgaaagggaaagtgaaagtcacaacttcccagcagctcatgaccaagcacagtaaacacgctgctccccagcaccacctgcagtccaggcccagcctccttgctgctgcacttagaggagcagccgcagaccagacatccgggtccctctcatccaacccacctgcctcacatcctcaggat

SEQ ID NO: 75 - DNA, 495 bp, Homo Sapiens
agagggggcagagacttacctgaggccactgagctgctctgaatccccccttgcaccatcgggcccaaagactcacccctccatgccgcctggaactgctggtccagcctggaggcgcagcgcagggacaggctgtccccgcctggcaggagcccccctccacggcccgcaggcctggcagctgggacagggctgaatgggaggcattgtcggcagaccaggcaagccaggcttccccaggctgaggtgaagaaggggcgggcggcgggcgggagcagcggctggagttacagggcctcctgcctgccccagccgaggactgaggccccggcctgaatccttgggccagcccgacagggagggggcaccagcagctggcccgggagtcagcagtcctgggctccctcctgccatgtgggctgccctcccagaggctgcttcctagtctctgaaaaacacatcccattaataagtagctctgaggtcacagtgggg

SEQ ID NO: 76 - DNA, 492 bp, Homo Sapiens
tgtctcagagcccaccttgggagacccccttcctggagaaccccaggaagtccccagagcccctgcccgccagcctctgagaggcccagagggggcagagacttacctgaggccactgagctgctctgaatccccccttgcaccatcgggcccaaagactcacccctccatgccgcctggaactgctggtccagcctggaggcgcagcgcagggacaggctgtccccgcctggcaggagcccccctccacggcccgcaggcctggcagctgggacagggctgaatgggaggcattgtcggcagaccaggcaagccaggcttccccaggctgaggtgaagaaggggcgggcggcgggcgggagcagcggctggagttacagggcctcctgcctgccccagccgaggactgaggccccggcctgaatccttgggccagcccgacagggagggggcaccagcagctggcccgggagtcagcagtcctgggctccc

SEQ ID NO: 77 - DNA, 354 bp, Homo Sapiens
taggcccagagagcctggaggaggagcctctgccagactggagagaagcaggcctgagcctccccaaaggcagctcctggggactcccaggaccacaggctgagacgagacgcagggtggctggaggaagtgagaggtgaactcagcctgggactggctgggcgagactctccacctgctccctgggaccatcgcccaccatggctgtggcccagcagctgcgggccgagaggtgagtgccggggtgtggccgcccccgggccttctcactgctcctcataggccttagggacaaaggccagtccttctgcagtccctgatcaacatgagaggctggggttgagtcagaaccca

SEQ ID NO: 78 - DNA, 282 bp, Homo Sapiens
ggagcctctgccagactggagagaagcaggcctgagcctccccaaaggcagctcctggggactcccaggaccacaggctgagacgagacgcagggtggctggaggaagtgagaggtgaactcagcctgggactggctgggcgagactctccacctgctccctgggaccatcgcccaccatggctgtggcccagcagctgcgggccgagaggtgagtgccggggtgtggccgcccccgggccttctcactgctcctcataggccttagggacaaaggccagtc

SEQ ID NO: 79 - DNA, 398 bp, Homo Sapiens
agtaagcagggaggggctgagggccggagagcaggtgtggggggtgggggcggggtgcaggttaagggaggaggcccggagagggagcaggaggggcgcagaccctgttaccggggagatttcagccacccacgcccgctggccttggctcctgcagggagttggagagaagaatgtgctcagtgctcaggggagccgaggctgccagccagtagccagagcagctcgtgaggccactgcggcacaggtcccccggggcagcagctgtgtcccaaggcaaggctgggtgtggggctggccagcccgggagtccacagtccagccctgcagtcgggcacaccggccgcagcacggaccactggggaggccgggtgggggtcattagtcctgggattggt

SEQ ID NO: 80 - DNA, 479 bp, Homo Sapiens
tgccacagatggtgacatggagcccgtgaaggagggagtaagcagggaggggctgagggccggagagcaggtgtggggggtgggggcggggtgcaggttaagggaggaggcccggagagggagcaggaggggcgcagaccctgttaccggggagatttcagccacccacgcccgctggccttggctcctgcagggagttggagagaagaatgtgctcagtgctcaggggagccgaggctgccagccagtagccagagcagctcgtgaggccactgcggcacaggtcccccggggcagcagctgtgtcccaaggcaaggctgggtgtggggctggccagcccgggagtccacagtccagccctgcagtcgggcacaccggccgcagcacggaccactggggaggccgggtgggggtcattagtcctgggattggttacatctggagagccccaggcagggtgaggagtggaaggacagaa

SEQ ID NO: 81 - DNA, 500 bp, Homo Sapiens
acctgtccctggcattcctgggcaacaaagcagagcccagggcccttttctctctcgccgtcctcattgagcccagatggtacatttccaccgtggtcttaagagggggtgctacgtgagctcggatcctagatcctgggggctgggcctctcagcgagtctccggtgggggaatagagtgggcagtggcttgtgagggccctgtagaatgggggtttattttccacgtggccagctctggaagacagggccaaacacccggtgggctggcgggcggctggctggcggaggaagcaggaagttggaatgaatttgaccacaaacagtccataccacgcggcccctgcaggtggaggcgcccacggaaagggccccgggtggctgtggggtgggagggcacaggcccctgctccccacagctgtgatggtgtcatctaagtacaggctgcccctacctgctcctgcagtaatggctttgtccccccatcctctttgtctat

SEQ ID NO: 82 - DNA, 467 bp, Homo Sapiens
cacagtgtagtgcctggctccttcatggcgcgcgacaacgtggccaccttcatcggctggtgccgcgtggagctgggtgtgccggaggtgctcatgtttgagactgaggacctggtgctgcgcaagaacgagaagagcgtggtgctgtgcctgctggaggtggcgcggcgtggggcacgcctgggcctgctggccccacgcctcgtgcagtttgagcaggagattgagcgggagctgcgtgctgcacccccagcccccaacgcccctgccgctggggaggacaccactgaaaccgcccccgcaccagggactcctgcccgcggcccccgcatgacacccagcgacctgcgcaacctcgacgagctggtgagtcccccagcaccaggtgccagggacccgacagcacagccagtgcctgcaatctgtccctgaacctcccagggtccaccctgctatctgcagaacag

SEQ ID NO: 83 - DNA, 385 bp, Homo Sapiens
gactgggcctggtgaccctgtcgccgcaggccttttgcagcacaggctctgagagcaacggtgcggttgcctgactgtcacggaacaaacacacaccaggcgagcactagcctgaggccgaggggcacatggagctggcctgagcccagccaggagtctggaagcaagcccagctcctcccggccgtgccctcgagggcctgaccgcgaaacgctcgtacgcacgggttggagttgtttgccacgcgtggcaactgcggcaggaacctgactcacgcacggacgccagcacccacaagtgagaggcgcctcagacacgtggtgtcggctttggaagcagctggtgggtggtgaggaaatgtcacagctctggaaagacagaggcc

SEQ ID NO: 84 - DNA, 500 bp, Homo Sapiens
caaccctttggttctttccaagcgtttccctcgtatcctcctgaccacagcagctggtggcatagtgtgcgtatctgtgggcaggagttagtgaaggcctccttccctccctccaaagccccaggccccacggtctgccacccgcaaaattccaaccacgagggggcgccttcctgcccgccgccccgtagggagacccggcctaggccgctggagttccgagttccagggtccttgtgatggaagggcgggcgcggcccccacacctggtcttccagccctatccaaggaggactgccagacagtcccgctctgaggtgcaggaggccgggccgcctcggctaccctgaatccacccgaagctagagggcccgagcccggggggcggtcgggtgctcacctccagagcttgcccagcgtcttgctgagctcagcgttgtgcaggtgcgggtactggtccgcgagcttcctgcgcgctgcctgagcccacaccatgaagg

SEQ ID NO: 85 - DNA, 402 bp, Homo Sapiens
ggaggaggaagatgaacagtgcctctgtcaaccctggcccttccggtttatgggatgggagatgtcaccattccacgtatccacctcagccagccccacacaggccgaccggggaggtttcccttgagctcaacctgacaagctctgaggagtgagctgtacctactttgtcctgtctgggatagggtggggggtccctgggtagggggctgggggctgcaggagcacggtgggcggccgctctgcacctgcctgaggaaggaccacttcctccgccaagcctttgcttggctgtgcccgccctcagcttctgtgcctttttctaacccgtcaccccgcaagggttggctcaagggctctttctcacagggcccgtaccccctgcctaggctggcatgctga

SEQ ID NO: 86 - DNA, 439 bp, Homo Sapiens
ctactacattgcaaaagctgccccttcccttgcctccccgacccatctccccagggcctaccgccagctgcaggtcacggctgcgaagtacagccgagttcttctcctcactgagctgtgccaggcgcatggcgatcatgtagttctcatccttgagccgcagcagctccaggctgcccgcctcccagtcctcccgcagccgttgacagcgctcctgagcctgctgctggtcccgcagccgctgctccagccctgcccgctcctcctcgagcacccggccccgggcctgcagttgctgctcccgctgcagctggctcttgcgagcttcccgcagccgtcgcacctctgtcatcaagaattgggtcaggccctcaggcccctcctcatctgccaggacagaacaggggacagaataggcagctcaggcaagtaaaatcca

SEQ ID NO: 87 - DNA, 451 bp, Homo Sapiens
ccctgatagtgtctgacctccagtgcttttcgtgcctgggtgaagggcctgtgtctctgagctgagttgctggcaggcactctggaggtagagcaggccaactctggcatgaacttggcggtcctggcattcgcaacctgtcctgacatcccctccgtgagccaggtggtgagtcaccccacaatgcaatcttaaactgaggctttctgccctcccctaggatctcctccctcacagcatcactacatgcacacagccgcaaaaaggtcaagaggaaacatccccgacgggcccaggactccaaaaagcccccaagggcccctcgtaccagcaaggcccagcgccgccgtctcacaggcaaagcacggcacagcggggagtgagaccgagaacgaagcggtgccccagtctaggctgcggggacctgtccttgctcagcttggctgtccct

SEQ ID NO: 88 - DNA, 384 bp, Homo Sapiens
cctgctctctcctctggccacaccttccttcatctggctgaaatggcaggcactccagaattcccggggcaggatcaccaccctctgctcccacaccgcataggacttcccgggagccccgtcacaggtcctcaccggatgaactcctggaaggccttcaccacctgcttggtggcttcggggatgtgcacggtgtcaaacggggctgccacagcacacgtcccgcccttgtacttgccgagccgacagcccacggtgttatcctccccatccaccccgacgccaaccagaaactcacacttattacgatactcagtctgcagggagagagagctgcaccttaccctggctgcccagcgcttgggcctggaaaccctgatttcc

SEQ ID NO: 89 - DNA, 499 bp, Homo Sapiens
ctcccagcctggaggaggtagaggggtctgcccagctcccacctcttaaagtgcacttctcagtggctagtagcagaggggaacaggtttggggacccgggagctgtcatcctgcgatggttcctctcatccacagagcacctgccgcatccttcaccggcaaggggtgctctcgaggctaccggggcagctgtcccctggtcatgagtctcttgcctttcctggagggtctggtcctgcgcacccccttcctcagggcctggtgggggctgtgtctccggctccggttcgggctctccccccacttgctgaagacccgccccactgagtgcatgaagcgatggtagccatgcaggaacctgcagccctccagcttgcgctgaaaagcatccgaggcaggggtgggggtgggcggctgagaggccccccggccagccttcgtgggctcagccgtgtctgagttgtccagcagctgggccatgcagtagatgttgttcct

SEQ ID NO: 90 - DNA, 455 bp, Homo Sapiens
tgtaagggagtggtgaccttcttaagccgggagctcttccatcagggggttccctaagggcatctctgttcctagcgggggagccgtcaccccactttgctctgcttagcctgagacacgcaattttctccagcttttactcttcgctgaattctcaaggcggggttggggggatgttcaggctcaggaaggaggttgggggcccggccgctggacgctgttcaccggtagcccggaccagagcaggagtttcatcaccacctgcggggacaggtgggacacatgcatttccggggccatcctagacctcctggaggatgctgattgacactgtccagtttgagaactactgtgtccccggagcagaggcctccccattgcccttgggtagcgggcgtcgggcacagggcttctccggatgagcggggcgggcatgagagcacatggaactgggg

SEQ ID NO: 91 - DNA, 471 bp, Homo Sapiens
cctctatctgcccaccctggacaacaaccagcacagtgcagtgtggccctgcagtgacaccacctgcagagaggtcaggcccagcctcccccgtctcctaaaaggccagcaggtcccaggagctgggggtggggcctggctgtggggcctccatgccccaggggccagggcagaccctccttagccggcaaccactgcagattcctcccctggccagcactcggggacctccctgcccctgccccgtccccctaccttgcctgctgagacatagggctccacgggtctctctcctggggccgggctgactgtggcctgcgaggggcagtcatcgtgttgggttttcctgccagaggcagaaaccacaaaattacctggaacatacacgccccaagtgacagattcaattcaattccacaaatattgacctcgcgtctaatccactcgtcctccagtgccagctcattcctg

SEQ ID NO: 92 - DNA, 371 bp, Homo Sapiens
aagctcaaattctcctgacttcacgcctgttactacagctggagggaaaccgatttcagaatctatctgatatgtcggatttctttgtggcatccacttcatcgctcagcagccagccatgatgtcataagcccatcagatttccggtagggggaaaacgctggggaattggaaagaatggatgtttcttacccgtcaggaaggcaggggaaggagctgggtatgtttgggaggagaagccgcgtggctggtgggggacaggagcaggctcaatgtttgtgatattaaatgtcaggcagaaacctgaaaaccccagctacccagatgttttctcaatatccagatgtctggcactgagcagaccatgctcc

SEQ ID NO: 93 - DNA, 467 bp, Homo Sapiens
ctgcccctttgccccacacataacgcccttccagaaggaagggaagagctaggaggggaggggcaggggcctacaggccgcattaaatggtggttttctaccgtaaaattcagcccaatttgaatcccagcactagagggcctatggggtggagccccgggacccccagccccgcccttctccaggccaggtgttacggcgcagatccgcacggtctccctccgcctcccgccgcaagtccccgctgctcaccgccctcgcgcaaggcgccccagcccgtaatccagcagtgcaggccgggctcgaagaagtgggagcgcgcgggcaggcagacggggcgcacggcggccgagcgcaccaccgggtggtcgagctgcagcagcgccacgtcgtagtcatggctgtcctcttcgtggtacgggtgcaggagcaggcggctcaccttgaaggacacctctccaggccag

SEQ ID NO: 94 - DNA, 340 bp, Homo Sapiens
ttaattgcactgcaatgagaggattcaatccccatccccgactgtcgggatctctgcagcttccagagctggcaggggctgggagtgctgcctaggtaggtccctggagaagggagtggcaagaggattcggagtcaccgtgttcggagattggaagaaacctggacgaagttgagaaggcatcacttgtctgtatcgtagaagtaacaagaaaatttcagaaattggcaaccggcggatgtgcatcttcctttacctgcactgactggcattttgagttcttgaaaggagtggttggaagaagagaatgcagaatcttggacatggctctcatcctgga

SEQ ID NO: 95 - DNA, 468 bp, Homo Sapiens
ccatcctgggcaagctgggcccgcagcgtgggcgcggtgaggacgcgcagctcatgcagccgctcccaagagcaagagaaagcgtcggggccttcaccgcagccgccggtgggaggcacactggggtagccggggtgcgccatcagctcggctgtcagggtgtggcccgctagggtaccttccaggacccgcgccagggccccggacacgcggtgagcggacatgtgccggccgcaagtgctcaggcccacgaaggcgtctgtccacctgtggggggcgggacatcagaggtgggaccaggccgggccatggccaagggctaggtaggctagggaagggacggcggggtgggagggggtaactggggtggcggcagcggtcgacgccagactcgcttccgggttgagaaacggacacagctagccaggtgaacagccagtgcggagggacagaggcagctatggtagg

SEQ ID NO: 96 - DNA, 494 bp, Homo Sapiens
tggccatgtgttcaagaatgctgtgactaaagtgaggagaaaggcagtttctgtgccacagcctccaccccagatacacgagcccgtggagctgtgggaaagaaggaggaggtgctggacgaagctggaaatggtaaggggaggctggggaaacatccagctgtcagcggcctccccggggcacgctgggatcagccaagagaatgcaacagccaggggtgggagccccctccgcggttgcacacgccaggtccctccagtcttgcaggttcaaatgaaggcttatgtgaagggggaatcgctctggacagctcagtgcccctcagagtcacatcaccaccattttccaccacgcggaggtggttgaaaaaaaggagtcacagatgggtaaggtttgaggggcgtcgggctgacgaggcaaaaaaaaaagtaggtgctgtggtgctgatgggaggttctccctccctcacaggacgccaggaaggaaatggggc

SEQ ID NO: 97 - DNA, 377 bp, Homo Sapiens
gggcaatgaggggaagtcagggttttgggggaaattccctacttggggtgagggatgtggaggcagacattgggcactggggtagggttagggggtggaggtgccttggggaggagagggtaggactgggcccgtactgggatgtactgttccagccggccctctgggaagactccgtacagctggggccccagcgaccgctccgcaagtatggcgaacatcacgctttctagcaccagggagtccacgccctgaaaaaggatggacagcaaaggggccaaggcaaagtggcacagggacacacatgagggctcgccttcctcccaccagagctgcgacttctgatccaattgcctggaggctctggagcacaggct

SEQ ID NO: 98 - DNA, 498 bp, Homo Sapiens
caagaccctgtcctatgtcaccttcccccgagaactggcctccctcagccctaacctggtgtccagctttttctggaacaatgccccggtcacgccccaggccagccccgagccaggaggccctgacctgctgcgtaccccactctactcccactcgcccctgctgcagccgctgccgcccagcaaggcggccgaggagctccaccgggtggacttggtgctgcccgaggacaccaccgagtatttcgtgcgcaccaaggccggcggcgtctgcttcaaacccggcaccaagatgctggagaggccgcccccgggacggccggaggagaagcctgagggggccaacggctcctcggcccggcggccaccccggtacctcctgagcgcccgggagcgcacggggggccgaggcgcccggcgcaagtgggtggagtgcgtgtgcctgcccggctggcacggacccagctgcggcgtgcccactgtggtgcagtactccaa

SEQ ID NO: 99 - DNA, 484 bp, Homo Sapiens
atagagaactcagtgtgaagaaaagacaaggacaaatctggaccacgtgtacagacttcaggccctgcctcagaggagtcctgcgggagtccaggaccggcccctcctccacggatggccagcttcctcctgactgcccccaagcccggctgtgttaagcacttcgcgtcgatataaagcattggtatttgacattttaacagtaacaaacttgccagtgctttacacactgccagcttccagagcttatcatccgtgctcccagaacagacgccaaggtcatgctcccagccggattgtcgtagcctcgccgccgtgatgaggcaggtgtggaggccccagcagccttcccggcgctggcgtggaggcccctcccgcggatcacctgaagcagggccacgttgcattgcagttgcacagtattgtaaggatcaagcagcgatgtcctaaccgtaaacgaagaggaaggtgaaatgaaggcaaa

SEQ ID NO: 100 - DNA, 482 bp, Homo Sapiens
ctggcagcacttgggaagccccagcggctcctcatcggtggccctgccggtccagatgggatggtaagggccggtggccacagcgcagccctgcaggtcattggcagctaggcgtttgaggtcacggccagccaggcgttgcgggaggctgcagggcacctcggaggaggagccgcggaacttctgcagccaggcccagagtgggcgtgcccggcagtcacacacccaggggttgtcgttgagcctcaggtactgcagggcacgcaggggggccagggcctcagtgggcagcgctgatagattgttggcaaacagatagagtgtcatgaggcggccaaggtcacggaaggcatgcgggtgcacatgggccacgcggttctggtgcagtaggagacggtcgaggctgtgcagcccacggaaggcgcgctcgggcacgctggagatgcggttgccgtgcaggaagaggtgtgtgaggttgccca

SEQ ID NO: 101 - DNA, 395 bp, Homo Sapiens
ggaggacagacaagtgaagggcagtcacagcccagggcaccaggggccaccgcaggccaggctggggcgcacccagggccgggcatgggaggggcgctgtgcctgccacatgctgccctctctccagctccccggggctccctgcccagccttcctgaggcctcccagcagcctcggatctgctcaggagggaggaagcatcgcctacccacgtagtcgtcctcagaggagtagcccgaggaagagcccaggaagtcctcggtggccttgcgccccacaagcccgctggccctgctgctctctgagccacccgtgcctctcctcctccgcacccgcaggtcctcacctgtgcagggaagaaccaggggctcttctgggcctccaagagcttctga

SEQ ID NO: 102 - DNA, 390 bp, Homo Sapiens
aaacagttggccaagaggaaagacagtggtggcaatgctgagagagtgccgaggaaagagtggagagtttgtagccaagacgaacatttatagtaagctcccaacagccaaggacttgaaagccatcaccgtccagctggacacgagagcaagaattcagtacatcctgccgggccctgctagttgtgcagagcacaaggtcctaggcaagccagtgtcggggtaaaacactgcttccgtcgaaagtagagttaagaatggaatggaaaaagactgaggcctgcatagcgcacgcacggggatttcaaaatggattcgaaaacactccacaatgcaatcttgggagatcgcaacataaaaaggaaggaattcaatgcaggtgagcctcaa

SEQ ID NO: 103 - DNA, 444 bp, Homo Sapiens
agggctgtgccatcctggctgcagcagggtcgtacctgcttccctaaccaatgtaccaccttttccagaaatagaacaaagacaaaagcggatgcataataaatcatttcagcctgccagcgctctgagagatgaaaaacctcgcccagagataggattgtgggtttacaaaaaaaccataaagcccaggcactctgccaagcccctagaacgctgccgggtcgccctttccttctccatgctcagccgtgcgtggctgccgggacagcgctcactccggcaggcgacgagtcagtgtgggaacccaggggccgcctcagtttcgctggggtgttgagttgcagggagtggcctgcaccgactcccctctcccccattcacgccactcaaaagcacactagaggggttttgagatgaaatccgcacacttctcagagccttccc

SEQ ID NO: 104 - DNA, 346 bp, Homo Sapiens
aaacatgtcatctccttcacctaagaggtaagaaccggctgtaagtcatggggtcactaaaccggccgcagttacagtaagcagaagaggtcacggctcaggccttctcagactttccctgggacacacggctctctgggggggcccggcgaaaccactcggaccaggagccatcgtacacggccacatcaggcttgccgcagaggtaggcagccaaggccacgtggcaggcggtgactcccttgcggcacgtggcaatgagaggctgcgagagatccaccttcttggtctggaacagagcacggagctcttctgggcccttctcgaagccatcctcagtcaggaa

SEQ ID NO: 105 - DNA, 400 bp, Homo Sapiens
tttctgtctctccagctgtccctgggacaccccagtatgtggacgagcagttcctgtcacgcctcttcctatttgtggccctggtgatcatgttctggctcctgattgcctaatgctgggctcctgcctacatccgtggcagggctctggactggtgacgtgccaccccaactcctggtgtttggcttcctggctaatcttgactcctggaatcagtgggatcagtaacacatcaaggagtcttgtttcttcatcagagctttggaactcgagaccagttggcgatgacccctgaatatcgccaccgctgtaaacactctataacttcaggccttggcattgagtcatctctcatgggtgacaccatgaaatcttgtttcagccagttctgcaggtcctg

SEQ ID NO: 106 - DNA, 500 bp, Homo Sapiens
atttagtggagctggggaaggaagaaagtggggttgggagaacctccccaaccccatccctgctggcccggggacgggcatcggctctcagcaagagaagtattcccgggatgctgagcgcttcattctgtctccaggactcaggcaggtaggtcccagctccgccgcgcccccggacctacaggtcagcgtggtccgaagtttcctctgggggcttcgcgggcgcccacacgtactcggggggcacctgcgcgtcgggcgccgccttgcggtagaagccgagctcctgcactagcgcattgatctcttcgcgggtcatttcactgagtgggatgcgctgaggcggaggaggggcggggtcagcaggctgggcctcgcctctggcctcgcccccagcccacctcccacggcctcacctctagttcctcgtagcggcggcccagcagcacgagctcagggtcggccccagggaggtgtttcatcaccaggttgtgactgga

SEQ ID NO: 107 - DNA, 470 bp, Homo Sapiens
ttctgattgtgaaaagggtaccaacctgtgcaatggcgccgcgacccggccgcggactccagcctctaaagtcgggtacctttaattaggagaaattaagtggggctgctacatattttgagaataagtaacactatttaaacttaggcagccttaaccactaacttaaccgctgaattctcgctgctacatgtctcctaaatagatcagcataatcttaactaggacttaaaatgcatcatcttcgttccggaactcagaacctgcagccgacgggagcctttggaggcttaatgactttaattatggcgagaaatatcttctcccggtggggaggggcgcggccggtggcgaggagggcactttcccgggtcggagaaggccggatggcagcccgccccgaaagtcccggcccgctggattgggggttcgggggtggggggaacatagagaagcagggctggtggagg

SEQ ID NO: 108 - DNA, 491 bp, Homo Sapiens
tcacagaaggtgactgtgggctgagcctgaggcccttcccagatggggaagagagaacagcacacctctcctgcccacgcctcggtatctcactcaagaatcagctgcccgttagtcacctgtcatcggagacagctctgttggcggctttcagaaaaagcgaagcagccagaggatgaatcgttattcggggaacacacctgcacacaggacaggaatggatgggagtggggagcgccctggggctactgttcaaacgccatcctcatggtctccaagacttgcatcagcagctcagccgctgatgaattataattctcggacaagctgcagaggcccccctcgttccatgtgttcacccctgccgctcatactgggggatttatgcttcctggggctaggaggagaaaataatgagtcactggggacaagagaaaaacaaaaatgccctgtatgtgcaaaaccacctaaaatggaggcttttagaggac

SEQ ID NO: 109 - DNA, 478 bp, Homo Sapiens
ttaaggaacctgggctcaggcactgaccctgaggagctggcgatgcaggtatggggcatccacgcagggctccagcaacctttgggaaggagaacccggggtctgaaggtgaggcgagtggacccaggactggataacttgggggtcccagggaagtgagatctgaagcagccaggtcacaccgggccttcggcagcaggtagagggctccccgtgggaagtttctggccgctggcatttggcagctgctccctgcagaggcactgggcgcagagctgtgctcaccgtcctgaaatctgcgacgcttagcagccctgttccagcctcatcatagcttttgaacgtgcgccgcattggcctccagcagtgcacaattttgggctgaatacgcagcagagcagagtaaaaagatggcgtctccgcgccggcttctttctagacacaagacaagaaggggtgaggagggagcttttgaaca

SEQ ID NO: 110 - DNA, 292 bp, Homo Sapiens
aaccagctggtgaaggttcttaaccagcaaaggaggaagcagccggggccggtgagggtgaggccggcagccaggcaggaaggcagcaggaggaggaggaagcggaggcggcaccttctgagaggcgcatgctcagtgagtcgtgaagatggcagggctggcggagcggccgccgcatctgatctctcccctttttttaggatatgtgatggcgtccagtttggagctgggataaggttcctgtagccgacacccctacaggagaagctctgggactggggcagcagcaagg

SEQ ID NO: 111 - DNA, 246 bp, Homo Sapiens
cctcagagcccttggtgtggggtggggcacacaggcagggaccaactcatggagtctccagcctgctttgcagtgttctttataaaagctatggatcctcccctgcctgccacatgccgtgcccaccactgtgacggtttcttccacggggacctccatacgacagagagcaaggcgtcagttaaggatcactgggcagtcgggggctggcggtgctaagcagcaggaagcagcccagctggatga

SEQ ID NO: 112 - DNA, 500 bp, Homo Sapiens
actagggcagtcaaggggaaagactgacgcagaaggaatgaggttcccatgggctgggtccaaaagacctagagcgagtgcttagttgaaacatttgccaaaacctcaaggaacacccacacaaaaataagaagttgctcggcacagaagtcagggtaggggatgttcttcgaaggccacactccatggcaggcatacagcagcacgcttaaacatggttcctgttaaggctagagaggcaccattcacatagaagaagtcatcatcgtgactctacccaccccgcgcccccaccgcgtaattgaatgctgagtgtggacggcacttcttccagcacttggctgcgttaccgtgctcagttggcaagccttgggggagaagagaggttcagaaggaagaccatctgagtccatcagaacaatgtgtgcttttaacaaggcaggggcgcccaaactcagtaggtccaacagaccaagttatgctatgaaggtcttgtggac

SEQ ID NO: 113 - DNA, 442 bp, Homo Sapiens
caccctgccccaagggcaagcaaggaatacgttcccccagccccaggggccaccgcggctctccccttccccagcctcgaagccatgggggccccctcgccacccccagccccttgggctatcgaagtatccggttccccagtccctggagccaccgcgggtccttccccggccccgagggccaagggggtccccgcccgccagtgccaaagcgcccggtcggaggcggaaggaagtgatatttattgttctccccgagaccgcgtcgcccgcggcccggccggcagttgcagtgtagacagcccgagagccccgcctgcaggcggtgtagatacatgtagatactgtagatactgtagataccgccccggcgccgacttgataaacggtttcgcctcttttggaagccgcctgcgtgtccatttatttgtgcccagttaga

SEQ ID NO: 114 - DNA, 333 bp, Homo Sapiens
ccctctccctctttctaaatcttcatctgacattaaataaagcaaatcccaaacagattaactgtcgcacggttctgctccgtctcctcagtctgtttccaggtctggcggggggccgggctgcggtggcggcagcggtgggagatgccggggcggccggcggaggtccatgtggcgctctaggtgggatgccagcgtcctgaaggcggaggccctggccctcctcccctgcggcctgggcatggcattctcccagtcccacgtgatggccgctcggcggcaccagcacagccggctcatcatcgaggtggacgagtacagctccaaccccac

SEQ ID NO: 115 - DNA, 457 bp, Homo Sapiens
tgtccagtctgggaagtgtctcaagaccaccctgggagaggcctgggctgcggcgccttcgtccctctgctccgcgcaaggccggggatcctgctctcccggagcgagggtgtccggcaggcaccagcggccagcagcagccggggccgggcctcacccgaggaccgaggtgccgatgaacgctcatgttcggaagacactggctccctggtttatgtatttacttaattttaagttaggctccccagatccctaaatcaacagtggattctgtaaattgttgcgtcagaggaaaatctaagcgagcccgatcgcgggaagcaccgtcgccatgaaaggcggtggctcagcgccacctgccgggacgcggcagccaagggagccggtgtcgggggaggcctgaggcctcgggtcctcgggaggaaacagagctgtttgcaggaacaaaggaggaaag

SEQ ID NO: 116 - DNA, 312 bp, Homo Sapiens
ggctgggtgtccagttcacagggaaagaggcggctgactgcagacatgatcagccacccactcggggacttccgccacaccatgcatgtgggccgtggcggggatgtcttcggggacacgtccttcctcagcaaccacggtggcagctccgggagcacccatcgctcaccccgcagcttcctggccaagaagctgcagctggtgcggagggtgggggcgcccccccggaggatggcatctccccctgcaccctccccggctccaccggccatctcccccatcatcaagaacgccatctccctgccccagctc

SEQ ID NO: 117 - DNA, 439 bp, Homo Sapiens
ataattccaagctcccctttgcagttatcagtaggctacaaagagcaaagggtccaggaacgtgttaagaagttgtcccctggccctccgctatcccagccacttctgaccacaaggctgttctcagaaggaaggcagtagagaatggttctacactgtccgattcgggcgctgtacccagcgctcactctgagcctcatcaacgaacagctgggcctgaaaccacttctcccccaggtttgcacagcaactcaagccaccgcaaagctcacctttgtagcctttgcccttggtcaccccgatgacgtcgatcatctcatcctgcccaaacacttggttcacaggtacctgctgctcaagcctctcgcgggcccagtccagcttctcggccacagtgcctccgttcacctggatctccatcaggtgggccttcttctgg

SEQ ID NO: 118 - DNA, 453 bp, Homo Sapiens
gaagcaagatgcctccagtggctgcacccacgatcatggttcctctgctcattgcctgggcggggccttcaacaaccctctcaacctgttcaccgccttcagctgagattcgcccaatgatatgcgggggtggggcatacgctcctaactgagggttggctctggctcgtctgatggcacggatgttcctcccaatcccttgtgtgacttggtaccaattgtcaactaaggtaagaacattgggtgtgttcccacccacaaactccttcatcacctttgctacattggtgccgctttggtccaagttgcgggcttgggctcgtgcccgcaatttgtttactagttctaccacactgcaggtaatcccagccacagcagctgctgctcccagacccatgccagtgtccaagagcacaaaactgattccttctgtgaagggtgccagacccaggc

SEQ ID NO: 119 - DNA, 305 bp, Homo Sapiens
ctcctccaccctcagcatgcgaggctgggagcgggtgcaggtagctcagccgaagcccagaggccaagggacagctctgggccttcccctgccctgcgtggttttgtcacttcctgctcagagaagacagctcatcctctcctcctaccatcgccctcccctgggcctgccaccgaggtaattttgaatgactggaacgttaacccttgacttccgcccgcccctcctccgatcagatacaaagcagaagtgaacagggctggggcaggcgagggcagataaggagccatgcatcagaatcagct

SEQ ID NO: 120 - DNA, 404 bp, Homo Sapiens
cagtagcccctggaaggccatggcgggcaggtaaaccagggcgttgtgggccaggtttagcgtggccagcgcacccagtgccccgaacgtccccggccgcagctcctccagtgcgttcccctccagctccagccgccgcaacgagcccagcccgtccagcgcctcctggggcagctcacgcaggtggttggaggccaggttgagcaggagcaggcggcccaggccacggaaggcgccctcggccaccagctccacctcgcagtggcgcaggtccaggtgtgtgaggtgaggcacgccctggaaggcggctgcggggatcaccttcagcaaattgccctgcaggtccagccgctgggtcagctggggacagcgaggagaaagtggggctgagccaggcagggacc

SEQ ID NO: 121 - DNA, 400 bp, Homo Sapiens
cttggacccaggagcagagcttgtgaagtgttaccttcagcatgctgagttttcttattcttttaaacaacgcatttctgttatcaggcatcatgcattagtaaagagaggagggctgatgtcagggctcggggacgggacatctaggctggggtgtccagatctttctgctgactaccccaccggttctgctgtctcacccacacagagcctgctcagcctgccggtctgggtgctgatggatgaggacgtccggatcttcttttaccagtcgccctatgactcagagcaggtgccccaggcactccgccggctccgcccgcgcacccggaaagtgtaagtgaccagcccctgggcttccacatggccagagccctgggtccctgctggaaaagcatct

SEQ ID NO: 122 - DNA, 495 bp, Homo Sapiens
gaactggaaaagtacctgggtattcaaactcgtgtccttgatgtcacaaagaagaaacaaattgatcagttcgccaatgaagttgagagacttgatgttctctttaatgttgctggttttgtccatcatggaactgtcctggattgtgaggagaaagactgggacttctcgatgaatctcaatgtgcgcagcacgtacctgatgatcaaggcattccttcctaaaatgcttgctcaaaaatctggcaatattatcaccatgttttctgtggtttccagcatcaaaggagttgtgaacagatgtgtgtacagcacaaccaaggcagccgtgattggcctcacaaaatctgtggctgcagatttcatccagcagggcatcaggtgcaactgtgtgtgcccaggaacggttgatacgccatctctacaagaaagaatacaagccagaggaaatcctgaagaggcacggaatgatttcctgaagagacaaaagatggga

SEQ ID NO: 123 - DNA, 452 bp, Homo Sapiens
aaggccctgagctcctgcctctgtacccactccctcctccacaagtcagccccttctcccctcacctgagacgcaaccctgtggccacagcagcagcagcagcaggaaggctggggccatggttccatccagctgggcagtgtcaggcctggagatccaaggtgagggcccacccgacacaggatgtgccacctgggcctgccagggaaggacccggggttctaaaagtgaagctgcccatttagggaagtgaggcagtgtgggacccactgcccccagccaaccgcagggattcattgagcctattatgagggcggtgctggcagctgtttccgcccttttcctcggaacttcaggcaggtgtggctgctccacccagtctggggccccaagccgggaggactcacagtcagagggctccccgccctccccaacctcccccagaaactggt

SEQ ID NO: 124 - DNA, 374 bp, Homo Sapiens
cactcctcaagaacccatgagccctggcaataggcgggggtggggagggtaggtctaaggggtggtagctggcctaggataactcacctgggggcagtatgttcagagagactctgtgcaaaatctggggccccctggccccatccaccatgcagccatactcgccagcatcctcttcctgcagggtaaccatttccacctgcagcaggcccccacccaggtctgtgagaaacgtacgcctgcccgctggagctctgcgatccacagctgaggacaccaggggctggcacccctccggcaagaaccggcaccacaccttctgagctttgacatcctggagcctgtagtggcactgcaccagaatggagcttccc

SEQ ID NO: 125 - DNA, 465 bp, Homo Sapiens
ccccaaaaatgtcatctggaaattaagcacaattttgctaaaatgagcaaggatttcacctaaatgaaattaaagagggttatcttattttttttatttagcacttaaaataatttagagtgtgagaaatcagattgttcagggtcacacgcccccaaggactgctctctaacagccctcctcctgcctctgccccggggttccagtctctctcctccacccctggactcaagtctgcgtggtgttggccacactgactgacagccaggggacatgcactcaccagcagggtgtgtccctccggtcttcacaatgaatgctggcccagtcgccagcagccttcacgccaatgttctcccgtcagtgaggccaggcccccaggtgccactggagtcagaggagggcagctggcgtgcgccaagcagccactaggagccacttcatgccaatgctccacttcctgca

SEQ ID NO: 126 - DNA, 459 bp, Homo Sapiens
ggaggcagagggagagcctttcccagatgccaccaccactgccaagcagctgcattcctcgccgggaaattcctccaggcaagagaacgcagagacgcccgcccgcagtccgggggaggacgcttcaccaggtgctggccacgaacaggaggctttcctgggtgtgaggggtgcgccagggtcgcccacccaggagcggcccgcgggaggactaggcgaggcccctaacggagcccccagtgtgtgtgccgaagaaggctccctggggccccgcaacgcccgcagccagccccccaagggcgcgtctgatttgccaggtgagcctccggccgagggcgcagcgcacacggccagctccgcgcaggcagactgcacagcccgccccaagggtcacgcccaccctgctaaggtgctaactttggacatctacttgagtaagactgagggggcacaagtgga

SEQ ID NO: 127 - DNA, 382 bp, Homo Sapiens
agggcctcaggctgtggtctcccatgaactgggtgtaacatcccagggatcctcttcctcacgtcatccttaagagcaggcacccacttgtctgaagcctgcatgaagccccattcgcctaccccctacctttctccctcctccttgtcctcagccagttcttgtgctcaggacactcaccaaccatgatctccaaggctattagtagcaacagcagaaacaaaagaaggcgcacagggctagaagtcagggatattcttcgcatactgtggagagtaacaggcaggaagctgggcgtgtacacattcaccctcactggtatggtgaagaaatgttatccaacagcgtgggtgtgggcactgcccaaattctttaccctgga

SEQ ID NO: 128 - DNA, 498 bp, Homo Sapiens
ggttggatgtcagccccaggagagagaaacttcttcccagcctgagggaagagagtggtgtgaagctgggggcctgtatgtcctaggcaggaagaaagtggggccaacagatacaggcaggcagcatgaccatggcctaggagttagcccagggttggggggctgccctggcctcagcgcctctccctgagagggttcctatctttggccccccgcccgcagctgaaggagcagagggaacgtgagcggtggcagcggcagcggaaggtcctggctgcaggcagctcgctggaggagggaggagagttcgatgacctggtgtcggccctgcgctctggggaggtcttcgacaaggacttatgcaagctcaagcgcagccgcaagcgatcagggagccaggccctggaagttacccgggagcgggcaataaaccggctaaattattgacctggggaactagccacacaggaggccgggagacagggactggtgagaatg

SEQ ID NO: 129 - DNA, 351 bp, Homo Sapiens
cagaggaggtctttggcactgttagtcttgcctgtgacccttccaccacccctggggagtcagcggcctttctccctcctctcactcctgtgtgcataaaggccatttttattgttctctgtggaaatatctttagaggaccgagggcattctctgagaacaaagcctcttcctggggagtgttggccagggctcttgtcattgcggcttgctgtctgctcagagccttgtgttttgacaagaacaaagtgattccgattggaaccctgtagcttgttgctggctctgcctgttttcctgcagatgtgtagccccattctggcctcctctcctctcaaggaaaggggagtt

SEQ ID NO: 130 - DNA, 487 bp, Homo Sapiens
atggagatgaccctgtccctgccccacccctctccggagctgcggcccgagttggcgcactcgattttcactgcgcggttccaagaggagacagccgccactgtaccgggcctcatagccacttcctagaggtaaagcccgtggcttctgagccgctagtctttttcttggggccgcccggggcacatcgcctgggccggcttagtttcccagtgcagtcgcccaggaagaccctaagcagcgctgaggggcgcagggccctccctccgcgaccctggagtcccttagcagctctggaattaaccaagattctgaagaggctctggggagaaacaaaatccacgcgtagggtagggtttgcatcgggccatgccaagtaaactcttacctcctccagagaactgatttgggatcgaagtaaagttcttgaacactttggaaaacgctgattttcataggttcacaccaactgccttcttccttctga

SEQ ID NO: 131 - DNA, 392 bp, Homo Sapiens
tgttcccaccaggcactgcccaggggctgcccattttccttcagtccccacgggggatgttgtgatttgacaggtgaggagagcaagtctcctagacaggtcgttttcccaaggccgtgcagttcccacaagttcaaatgtgacctgcgtcgggcaactccaaaacactgccgccgtcagctccaggtggccctgcagggaggggtccccggtgtcctctgtgaattggaatcggaggctgactcctcagagtgtgagaagctggcgggcctggcggctggggacgtgctgcggtgtgcgtgtatcgggctgaagacctgccaggttggacgtccctgccgtgagtggtgtcctcagaggccgcggttctctgcagcagccctgggcagtct

SEQ ID NO: 132 - DNA, 475 bp, Homo Sapiens
tttctgaacacctcttctaagattcaaaacagtaaaatgaaacccaatatcattataaagttattctctggcaaataatttaaggaagacaactcccgtatgcatttttttcttaatagttcaggctaggttcctatatacagttctccccaaaatacttgagtgtaattatttagcaggtcatcggttgtaaccctgagaaacaaagcagcacaatgtgatttgtacagagaatgattttacccactacgtctccaactatttatatctgcctcaaatcaaaatgctttggctgaacgcaggcatccgaaggaaggctcatcccagtctagttctgctctcaatgcttgtgacacatagagtatgtgtgcccagggagaggctgcgttcagtgaagtagctgggttctcattctcatagggcgatatctcaataggaccttagccccctggggagccatcccactgtgccactg

SEQ ID NO: 133 - DNA, 373 bp, Homo Sapiens
cctggcatcagttgcctccctggaatatggaacttcgggcgagggaggtggagaactttcttctggggctcgtccctcgttctcctgctcgcttgcagtttgaaggaagggcggtgggggcgggggtccgagtaccccgcggtctgcggcgcgtaggagggtaggtccctggcctgcggccgcctccgaatgaccccgtccctccccgccctggacgacagcactagggtgcagtcgcaggagaggggccgatacccctcaggagccccatcggcgaagcctcagcaagtggcatctcccggggtccagagagtcggcgtgctgtctggtttgggtccagacatcagctcacccaagcttatcttgggctttt

SEQ ID NO: 134 - DNA, 308 bp, Homo Sapiens
gcacctgctgtccagccagaagttattttaagctattctaaaatgagtcatgccgtttagcacttcatccttgaaaatcaagagaatcgtttttcagtcaaattgaaaacagtaaacatttagtggcttaaatccatacatgggttttaaagtcggggagactatcttaggatgaaataaaatctcaagtaaaatgaacttcaaaataattaatttaagataagctgtccataggagttttacttcggttagtctaaatgcaagtggctgtttgtatttgatttattcttcatgagatgccacaatca

SEQ ID NO: 135 - DNA, 324 bp, Homo Sapiens
tctgtctttcaatactacccaagaagaccacgctgtatcattctactctttatatctctttgttgataaatgatcccaccctatctgatttaattttatctccttactgtgtaacattactgacagacagtggatttacgcaggcacacaagagatttatgcatcctttgaatccaaaccttgagttgaggacgatgcttccatcctcaggcccccattcggcctgggagtctgtcttcagtactattgttgacaagacgccagtagcacatctaaaacctgccatttgagactttgacttcatcacactggttctccatttcc

SEQ ID NO: 136 - DNA, 389 bp, Homo Sapiens
ccactttgtcattaaatctctcttttgggtcaaatttttctctcagatttgcagccactgcttctcttgacctccataaagcaggaaatgtccatgtactgccaagttttcagagtcctcgctgcccatagcaatcaaatgagatgattgcctcagtcctaagcattggtctcagagaagggtagagcatactttgaaccggaaaaccaaaccaaacaaaaacaaacagccacgtgaggtatgtgagatgtcagtttctctttggagaaatgtaagatagaaatctgactgtaaagctctatctttgaatgaaggtttctgcgacttgcttttagggtcacactgtcccttccttggactactgggaatcatagccctagcaaactcag

SEQ ID NO: 137 - DNA, 380 bp, Homo Sapiens
catatcccatctcactatttgcccctcacagtcttgtaaatcagtaaatctccacaagacacacaggttgagagcgtgaagccagctagaaaagccacgtggaaatgcacatctattccagagcagccggattcacatttaacatggcaaatcaaaacgatgcaggtacctacctttctcttctggagttttcaggcttctaaaatttaacaccttactgctgatctgcccaaaaccctctcaggtgaggtgaacctcgagggcatcccattcaatcacacagccagaggagggtggggtttcacaagaccagacttcaaatgctggggctcttgcgggttcccaggctgtcgggagcagaggtgaactgccttctgttc

SEQ ID NO: 138 - DNA, 378 bp, Homo Sapiens
atcaaattaccctgaaggccctgccagacacatgcattaatcattggttatcccagctgcacacctgtatggagaggagaacttggcgtcctcaaattgactctggctggcaaagtgggaaagcagaaggacagggtggcaggccaaggggaacccaatccagaagtggccacgtggcacccacggctctgcactggccaggtggaagaaggaggaaccacgtaagattcaggcgagggcgtacaatcatccccagctttccagtcttgcttcttgttttctggagcctatgtagctggacaaacctgctgagctgcaacgtgaagcaactttccccgggagggggaaggcttcagggtgaatccaagccaactccag

SEQ ID NO: 139 - DNA, 469 bp, Homo Sapiens
ttgcattttatcaccctccttccaattatcccagtgcagcagatgcaagcagagtctcatgcaatcatctgagataaggatgaagaactgaaagacaaacaagtgactcactttaatggatttgcttcagacaggagaaacctgtaatttctcttaggcgtgcttcatggacccatagtggagtgaatcacagacttgcacaagccttgaaactgtgggtaactttacagttctcagatcggcttctcgcaacaggcagtcagttctcactgggccccttggactcccatttcaaaaatggagaagacagatcacagccactgaccagggaccgtgggaggtgccacgtgatggtgaggcatcatgctagggagctgagctctgaccttcctgctgggtgattctccacctctgggctgctagatctacttcctggatgccgtgagtagatgtcctacaccagcaccat

SEQ ID NO: 140 - DNA, 231 bp, Homo Sapiens
tcattgtcttgccatggaggaacccaaaggctactactggccatctatccaaccttctgaatacgttcttccttgtccagacaagcctggcttttctgcttctcggatatggtaatattttcactgactcttgccagcaaagctacatgttatcagccttcccagggttatacgtgcagcacggtagttcttaggcattatattgattgcaaagaagggcaggaatctctg

SEQ ID NO: 141 - DNA, 334 bp, Homo Sapiens
aggtatggctcccccaggtgccagggctacttctctctcttctagtggctgctcttcctgctggcacgcagcacctgcctcccagctctaagcctgtggggcagccaggagagtcttgcctctggcctccgttggtcccatacttcctggcgagtggctttgcacggcagcccagccctggggaacttttcaagggagagggcttctttccctccctaactcccctaccctcacccaaccccactccatactggccctttaccatcgccagttgttgccttgccaggtactgtggaacacctacatctttccctatcacagggcttggacacac

SEQ ID NO: 142 - DNA, 500 bp, Homo Sapiens
cattttcccctctgagatctggttaataaattaaatgctgtactttgcatatgaggaactaaagtttacctactggactcagtggttttagtgcaggacactcttgtgcgttgccatagaggtaggcatgcaacccagaaaaaactgaaacaggtaacctgtcatgctgacagttacaagagaaagatcccgtgtcaacggcacgcctccaattgtgcatctcccttacctacagcttgttcaccagagccctgagcaggttgtttaccaggtcgggagtgttgactcagaagacagatgactttcagcacatgcaaaccgagtattgcaaaagctatcttccacccgtgttagtagctcacagttagtctccagcagccctgcgctccagctgcaaacatctcattagactaatgcattcagcacaggcagaaaactcgatttaccatagctacagcaatgaatttccattacgatgacagcttcaaccacatcatgtc

SEQ ID NO: 143 - DNA, 442 bp, Homo Sapiens
agcaacaaaattgaactctcagtctgcccggcattagctatgtgccctccagatgccggaagaggagcgaaggaggatcagaaaccccctcacctcaacgatggttctctcccctgtgcttcaccccacctccccgtccctagccatttctagtctccaatccgggtcttacatttaccctggctccagagcacagaccttcctgcagttgggccggcgcgttgcggcgttgaggagctgcggcgcgcccctctcaccgcgattgttcacttgccaggcgccacgtgtgggcgacgtcactgggctttatgctttcatcgccgctatctgcctacgtgagctgctctcctcccatcgcccccgcctcccctactacggagaaaatcttgcacgttttcccttgtgaaaagcagagttctctttttctcattaccaccagttg

SEQ ID NO: 144 - DNA, 386 bp, Homo Sapiens
ttcagagaaagtgtgggaaaacccatatttctgcattgtcattcgaacacagaaaacacaggaggaaaatgagctgtcactccaattcccatgatgccttgctgcttagcataactctacagtgcggccctgggtccactggtccatattctgacagataattaagaaagcagcagctttttctagacggctcttcctcatgatttgcattttagccagaggcgaccagttataaaaaaaacatgatggaaagatggtaagaagccaattagatggatggatggctgactgacagctctctggtattacgactccagatttcagactacatagcctggcagttttctacaagaaccaacttttttgcaggttggtaaagctgttaa

SEQ ID NO: 145 - DNA, 300 bp, Homo Sapiens
ctgagctgtgaagtgttgaaactgatcaagaaatgaaggcagaatgtccgtcctttgggagaataatcagccagtctatgttgctgccactcttggctgccgattggaatgcagctgttaaggcagctgtttaactgtttgcccaacttgaaaggacactgccaaatggcaaatattttctataacaacattttacttttgctaagaacaataacagtgcattttattgagctccaatggcgtgccaaacacgacagatttattactaggcaggttcacaacctggactgaacatggatg

SEQ ID NO: 146 - DNA, 441 bp, Homo Sapiens
agcattccactatctcctcatccgtgttcttgccttccaggagggttaactgctgagcccaggttttcagaagggcactgaactgttccagggcctgctccagttgagccacttggcctgagaattcctgctccgaaagggccatctggctgaccaggttctccaaacagctctgcgtttggaatacactgtcttcccactgcttccagtcggcacgcagggcctgcatctccgtgtgcatgagctcacacccactggcagttgtgttctgtttcacttcgggagccagcgactccactctgctgagacggcttgcaccaatctctctggaatctatcagctcctgtaatggaatatcaccatggtaactgaagagcctgtgagtcacttggactgcaagttttcaactgtgtacacagggggaccctgtcctgccaggaa

SEQ ID NO: 147 - DNA, 311 bp, Homo Sapiens
aaaagtgctgctcacctctgccagtgggccagcagattctccagcgccgtctgtctctccttcgccctccttaggatgtcctcgtattgctgctgtagagccgcagcctcctgaacacaggaatctctgttcacaaccttcctggcactggctgagaaggcagtgatcgcgctgctcagtgactccagggcctggcagagatcctaagaagagtgcgagaagaatgcagtgaaagcacaggagccaacgaggcctgcatttttctttgacaccgatcatcgcaaaatattttccctcagtcataataaaca

SEQ ID NO: 148 - DNA, 454 bp, Homo Sapiens
ggaaaagggctgctcctgacagaagggacactctaagagcagcccaggaaccggtgcacttgggcggcctcggaagaagccggggctcctggaggcggaggcgaggcctgggacccaataagaagggcgcggctagagaggaggggctggccaaaagcccttgaaataaggcccaggcagaaccgcggttctagtctcccagctccagctcggcctttgggtttgctgtggtgtccttgtctcctgcaggaccggccgcagcatggacgctcccaggcggtttccgacgctcgtgcaactgatgcagccaaaagcaatgccagtggaggtgctcggtcacctccctaagcggttctcctggttccactctgagttcctgaagaatccgaaggtagttcgccttgaggtttggctggtggaaaagatcttcggtgagtggaccaagaaggggcag

SEQ ID NO: 149 - DNA, 498 bp, Homo Sapiens
gaggggtgcagcactgaggtctggggttcgggagggggccctatacgcgggaggaaacggagagagacggtgaggattgccttcggaggtgggtgaggcccagcgtgcgcgcccaggtaagcaggtaagaatgcagcagccgccaggcccaggcgcgggcgcgtcccgtccgggtgactcagcccgtgccaggaagcgggagttggctcagctctccagagctcccggacagcagccggatcccggccggctcctggggcactaggacagacccccgcggctagcagcccggcctggggggcggaacactctcttcttgtcccgccccaccttcctccgggccgcaaccaccccagcccatcgctgggacgtggccgcgggtgccgagagcgctgccggcgccgtgggggccatcccggtcctggccccgacggcgccccaggacctgcgatagccgtaagtagcgactatgggggctaggagagtccaagaagtggg

SEQ ID NO: 150 - DNA, 417 bp, Homo Sapiens
cagctggagaggagacctgatgacctccctggtggagggtggccagggaaggagtggaagagagagctggggagaggaaactgtggccataaagaggaagagagaggcagagctggaggtgacatcaggggagagagaggagtgggttcggcgatggccatgctgggcgaggtgtggagagcacagctgtgctatctatcagctgcctccagctcagacaattcctgtgcccatctcatttttgtctgcccatcgcctctgccgggttggacacccttaccaccacggtcaccgttgccacactgtcggctgctatttcttgcctcatcttccttcctgctcatgatatggcagaaggtggcaagggaagcagctgccctccgccagcagcctccctgccactgaaggctgaagctg

SEQ ID NO: 151 - DNA, 464 bp, Homo Sapiens
ttcttgctctccattcaagcaggccctagggctcatggcaagatgatttccttggggagaaagagcctgagacttagaaatttaatttgtataatgaatcctggctttttccctcctttagggatctgattcttctttctcttcctcctcctcttctgtcacaggactctatgctccactccagcgtagtttggttgactgatgcttcattctctatatgcactgacatgacgtgtgactgttcaggcacagttggagaagttggagaagacagcacctcatcccctctcccagaactaatcattgattggagggccaatgcttcaaccttgatgtgattcagcaggtcatgcgagggctgccttcaacaggagcagtgtctcctcctccttgcgcagttcctgacccagctcggcatgtttcctggtgacactgctgctcgccacatggcccagtgctgcaaa

SEQ ID NO: 152 - DNA, 443 bp, Homo Sapiens
gagttcatcctggatctttcactgagaacaggatgttttgtcaaggatgggcaaagaggggcacagcagaaagacaaaaggatgtgccagctacaaaaaccacgtgggccaaggacagggggctgcaatgcaaagactggaacttgcagcacggcaaactagagcgtggcaagattagcgtttcagactccagacaaggccacttccctctccaggaaagacgatctcctcaccaacacaagcgcttggcgcttcccttttccgtccaggcgtcctggctggaacgaggaaactcaaaagtgctacgaaagaacaaaagtggcccaaattctgaaaattcttaaaattaaaagattgtaactcaaaggaagataaagagcatgacttttaatttctccaagctacttcattcattttcagtgccaaaaacccaatgccagtct

SEQ ID NO: 153 - DNA, 189 bp, Homo Sapiens
ctagtcctcaagatggcatttgctggaggcggtaggcagaggccctaagtgtggattctaacccccgtggggactgaatctctgcggctgttgcttgcccaggcacgtttgcctcccatgaacttccttcatccacagggccccaaacctcatgccggcgggaggaggaaggagactgggcataactca

SEQ ID NO: 154 - DNA, 367 bp, Homo Sapiens
ggagaaagaggaatctgtaaggcctaagcggatggcatggatgcatgtaatgaagaccgggaagcagatcctgggtgggagagctgctctaagcagaaaaacagccaactcaaatctacctctggctgagcctgagcgtcagagcaaggcagggaagagtgcccggaatgctgagccagcccaggctgctgcaggctgcactgcatggaccttagcaccagcaatgtgtgcacagaaaagccggtcctttccgttgtcaccgattgcttaccaaagtgaatctgggtagcgtcgactctgctgttgaaagtatctgattttctgctgcatggattccttccctagggccaactgtgattgcagactt

SEQ ID NO: 155 - DNA, 309 bp, Homo Sapiens
tcccatctccctctcaggagtgtgtctccagccccgcacctgccctctctattctcagtgcatccccgccgcaggcatcaccctctgacttgtcatgccatccgccccctccctcactgtatctacgctttattacctgccttggctcgtacaatgtcagctttgcaaggggttcttccaaggtcttattttcaattgatcaatgccgaggatggggagcaatgcgtgtaccagagggggctgggcacacgcaggcttgttgttggatggaggagaggcagcatcccctgcatgcctgggtggtcccca

SEQ ID NO: 156 - DNA, 379 bp, Homo Sapiens
ggcaaagctgagaccccagatggccctgcgggtgagggcggaagaagggaagagttaggggccgcccccatccatggcctctagctactggtctggaaccctgcgcccactccgtgccagggccgaatccggggatccgagggtcccaggctgtcgcggtgactaatgtgtgaaggccgctgccaaaatcgggcatggcctggctgcaaaggtgcggacggggtttgttctgctccttcctggatttccatcctgactgtcctcacagaggaaaggaagtatttctaagggaagaaaggcaaaaagagctcattctggcttttcttgggggggggccttagcattttaacgagggtgtggccctcatcaccagggcaga

SEQ ID NO: 157 - DNA, 405 bp, Homo Sapiens
ggagcaactctgacctggagagccatgtacacatcctacgtcaaggaggtgatgaaagccccactccttatagcgatgacatctggaagaagacacaattgtcaccgtgagcttttcaattactcctggagactaagtgtgagacgcagtagtgcaggatgattggattacgcaaaacgagacagatgccatctgtgagccacgcgtaagctgctaagtgccaaaatgaacatccttattaaacgatggagttctcataccatttgtagtttggtcagatttgaaagatgagttgattgtttttagatagtgcggcaaataggcagggacttggaatcctctctggctgtatgagtaattactgtctcatacttaaattagaaacatgggttttcagttaggtct

SEQ ID NO: 158 - DNA, 393 bp, Homo Sapiens
ccaccatgcagcacccaggcctggattccagctagcagtatcagccttctctcactttcgggcagcgacaccgctggtgtagaccgtctcaggtgcgtcttcgttcagctctactgtcctcagccccagcttgggctcgccctcagcctgctggagctgttggatgtgttcaggcctccaggcaccctggcctccccccacccgccccgcgaagaccgagggaaagcagacgcgtctccgcggcaacccggagcctgcagcccgcagggaccccaccgccccaggtgcaggcgtgtacatgccagttgcagaaaatatcacaccaaaccagtctgagggagtcaaagcaaactataatatttcaggcgtcagagactctcctattacagaatt

SEQ ID NO: 159 - DNA, 378 bp, Homo Sapiens
tgcaaggcactactatagatctcccatttcttccttttgttcaccagaacgttaacaagagatacaacacctagaaaacagagagcagagacttttctggatcaaacagtaccttttttttctgtttctgtctccttgtgactcaagggagaaatgatcctttctttctaagtgatcttatttctctctgtcaagaatccgtggacatgttatctggttagagctcagcctgcagccaccacgcaggtaactcactcacgttagactataactcacctaactcgtttgtgtcccagccaaatgtgtaccagagtaaaagttcagacctgaccatgggtaagtttaatgattaacataagccactcaggctttttcctc

SEQ ID NO: 160 - DNA, 351 bp, Homo Sapiens
ttttgctctttacagccctcagcttcaaatttccaaaatgttatcaagtattacatttaatcttataacaaacttacatcccaggtaggatgttgcccataggactcatgctgggtgatgcctgggtgatccaaacagggaaacaatattcctttaagccacattagctctcaacggtgtcactggtcacgcgtagagaggcaaattcatgagcagcattggggagttaatgaacggctggccagatggtgcctgtcagaaggtgttgactttttagacaactgggactgtttcctgggagtaaatgagaggtgcagcagggacggattgcatctcaatcacacagaaaca

SEQ ID NO: 161 - DNA, 435 bp, Homo Sapiens
ctggcaccctgatttccagccagagttgatgaggactgcatggcaggcaggctaatccagacaactgtatacttagcgagcacgattatttaggaaaataaggaaaagccgttggatgaccgaaattagactgtcattctcccgggctccacctgcacacagactgcagtcgcaacgattctccacttgatggctggttgtgtcactgctagtcgacagctgtcccgcatccagagaggactgggagtgatttaggtcagggagtctggtttctcctttaaaccgtgcgctaactgaggagtggggatctgcgccagccccgtgaccagccttaaatgtgagctggggagtcacacagcatcagtgcggtgagtcgctcgcacaggccccagccagacaaaccatagcaagcatcctctcctttgtcctagcctt

SEQ ID NO: 162 - DNA, 423 bp, Homo Sapiens
tctagaccaacccttttgcagtgactttactgggaggttgcatcagcatctagacacttccatacattgaggaaaaacagacagccgtgtttaaggacctcagagggcttgctatcacccatttataattttcccagaacttatgagtcccaggtcctcattgcagtggtaagcgctgagtgctcacgggggtgtgtgtgggacaggatgtggtttgagttctgtgatcctcaccccgacctcatgcgtcgggaatccttgcagccctgtgactggcctgtgggggcttgggctaagtccctgccaagataccaaaagactgcagaggtgggcaaagacctcaggcccccagactagcaatctacaaacactagtcatgactacacagttaagggtcgtccatctgcttccccttctcctagc

SEQ ID NO: 163 - DNA, 464 bp, Homo Sapiens
tagcttgccaacagttgcccaggctccccatgggactgcgcttcactgagcacctgaagaaagtattcactggaaatgggctctcctgggagactgtctggatcccgagtgtctggcgttcatgttcccacacctggctgctgcttcttgcccttccttggctgcaggtgtgagtgcttgtttgtttaaacctcgctcagcactgcttggaaaaacaaaacaacatggttacttgtctgggcattgaatgttcttcctgaattttggtcctgcccattggcccagaggcggaatgggtggggcaagtttcggtgtgagtttgggaagtttcgagaagacgctatgggctgggtctgttaggttggggttgctcttggttttaatccttttggaatgtcttgagggtcaggagcgttgccattgatggctatgggagttgtcaggctgtggctctctttctcaca

SEQ ID NO: 164 - DNA, 499 bp, Homo Sapiens
tccttcctctctctatgaccatgccgtgatcgtgtctgcggtcaccactcgacgcatcctcatttctacccgaacccaggagccgaacgctagatcggggaagtgggtgccgtgcgtgtgggcacagaaacaccatgaagattattttcccgattctaagtaatccagtcttcaggcgcaccgttaaactcctgctctgtttactgtggattggatattctcaaggaaccacacatgtattaagatttggtaagattccccatctctcttggttgcctggtatccgctcccaggcagccggatgtaaacaggcggttcgctctgcctggcggtgggctccgtggattctgatctgctcactgctctgtcgtctcctggggcttttaaagaactccttgtgctttcatttcttctcttctttatttttatttttagccgcgggagggtgaagggagggccaatgtgtggtagtggtctctgcattacctccccacagtag

SEQ ID NO: 165 - DNA, 422 bp, Homo Sapiens
tcattatctaaggccagctgcctgacttctcttcagtgctctgtttatagggtttgaacatctataaatggaaacactagctaaccagaaattatcgctagggctctctgatagtgtcctaggctctcacaacttggaatgtcctgcaatatctaacatgtaagcacgtcgaatcattttctagacagaatctgaacctctgtgtctctcagtctttctctctttctcattctctttcaatatggaacttgaaaagcgtgaaaaaagaagcttattaaacaagaatttagaggagaaactgacggtaagacatgagatttagcacacacagatttataatgaaattgacagggtagtagagcaactgtcatagactggaaaagttgtgctagccggcctctgtttccatgttttgctggtca

SEQ ID NO: 166 - DNA, 368 bp, Homo Sapiens
agttcttgagcctcactgcaggctccagtgctagtcccggaggaaatcagaaaagggttgaaaccactgacacagccatctctttagctcctcctaacgcaggtgtacagtttcctgtagtgagcagatcggggcctacagggacactgcatgcttgcactgggctgttactagtttcatggaaatatgtactaattgtgtcactgtgttttcttgtcacactgccccctttctaggccgctctggcaccgtttatttaaactgtgcaaccatctggcccaggtgccgtagagattgatcagtagcacaaggccaccacaagcacaaccgccacccggccatcccagctatttcctccagcattctag

SEQ ID NO: 167 - DNA, 500 bp, Homo Sapiens
cctgtctagtgtccttggcaaccagcaagtgctgagcctcctgttggtgcttctccaacccaccagtgacttggcccgcaaaccacctggaaaaggagtctccagagaccccggcgcacagcaggccaggaggcagctgccccgggattcagagcaacctcggggcaaccctccctcctccaaaggctaattctagaagaggcaggtcctctttccttcgatgtcaatgtccattatgaaacagtaatttttaaatattcaggtgacacggagatgcgcctgctacacgtcagcgtccttcacatgtaacagccgaagctgcaatttgaattttcctgccaacgtgaggaagccgggattcgaaccggggagacaaaaggggtcccgaacatgtccttggatttaatagatggtcggaaatcaggggcagcggagctgttaaatgcgtcacgcacgcttcttcgcagtctcctgagctcgccacttcccccagcttctag

SEQ ID NO: 168 - DNA, 428 bp, Homo Sapiens
aagtgcccctgcagcactgagaatatgacctatgggctggttttcctctttgctcctgcctgggtgttactgatcctgggattctttctgaacaataggtcgtggagactcttcacaggctgctgtgtgaatcccaggaaaatctttcccagaggccacagctgccgtttcttctacgtcctcggccagatcactctgagctcattggtggctccagtgatgtggctttctgtggctctgctcaatggaactttctatgaatgtgccatgagcgggacgagaagttcaggactcctggaactgatttgcaagggtaagcccaaagagtgctgggaagaacttcacaaagtatcttgtggcaaaactagcatgctacctaccgtcaatgaagaactgaaactctcccttcaggcccagtctcaggtaag

SEQ ID NO: 169 - DNA, 443 bp, Homo Sapiens
gggtggctctgctgaccccagagacccagggcgggggcagggagcggggagcgtcaggccaggatccccctgcccgggaaggctggagaaagtgcgagaagatgccagaaggtgcgaacctgagcggttcaggcagagccggcggtcgctcagacacctagggggattacaggacggaaggactcgtgaggggtccccagaactgttgacagaacacctcgacaggctgaggagaatcagactcgtctctcctgtcttgttagcgtcttggaagccctctttctacagatccacaaccttcgccgtgccatccaggatgccggccatgcccggggccctgaggccggagggaaccaaccttgacccagaatgccgaggcccaagggaactgggaggaagcccagagaggagagctcaggcgccacacctgtcagtttctacag

SEQ ID NO: 170 - DNA, 489 bp, Homo Sapiens
gagtctggctggttccagaagcaagccttcctcatcttatgcctgctgtcggctgcctttgcgcccatctgtgtgggcatcgtcttcctgggtttcacacctgaccaccactgccagagtcctggggtggctgagctgagccagcgctgtggctggagccctgcggaggagctgaactatacagtgccaggcctggggcccgcgggcgaggccttccttggccagtgcaggcgctatgaagtggactggaaccagagcgccctcagctgtgtagaccccctggctagcctggccaccaacaggagccacctgccgctgggtccctgccaggatggctgggtgtatgacacgcccggctcttccatcgtcactgaggtaaaaaagcctctgtaacatgggagttcctgggacagggagaaatataaagcaaatcctatgaagttcagttccatatcaggaaagaggtagggggctatgtttattgtgcag

SEQ ID NO: 171 - DNA, 388 bp, Homo Sapiens
tctttacaggacatgagggctgataatcacctcattgcatggtcctggggactgatgaacaaaggctaacatgtggaaaagggcaactaaagaaagaagagccacctccaggttaattagtacaagtctcctcgctggtatgccctaatacactaaaacagcagtaaaaacaatctgcacattggcatcgaaggcacagataaacttgccgaggacccttaccacggcagagggatgctttatatgagtccttagtagattaattaagttcttgctagttccatttggaaatgatgctgtcctcttggggctatgcagagaagttcatgttgatgaaatgagctgtcctagaatggcagttcccgggcagcagagcctgggctcaagg

SEQ ID NO: 172 - DNA, 433 bp, Homo Sapiens
gggaggaggtgttttgcattttacaaaatgaaggctttgcgaccggtttagagctgtgtggtccctagtgggtctccaagctccggggtaccctaggccggtattacatcattaaaaagaagcgcaaatcccatttctgaagcttagccgaaggcaggcgccggcagggagagctaagaggccgcctagagagtttgggccgggagtgggagtgggacaaggcgggagctaacttagctggagtagacgccagaagaagttccgttcagctgaggtgccccgccccaatcccaggctctcggggaccccaagaagggagctacccggtgcttctccgagcggtccttacagctttggagactctgctgctgcccaggggtgtagtcgtcggagccctcgggcctgctggggctcagcaggggtagtgggagcc

SEQ ID NO: 173 - DNA, 281 bp, Homo Sapiens
caggcaacttttgctcatggtgctaagttgcaaactatctgtctctagtctttagcgaatgctattgggaagcatcaggacaaaagtcgtcatccaaaaattccaattctagttttctcttggtctgggcttaaagccagaggcgattctccataggtggcatgccagtgccatctgactgctgacatattctgtgtggtggttgagaaaactggagaagaaagagccagggtagtcaaaggactgctcgttaattttaagatgtgcaggatgaagaggag

SEQ ID NO: 174 - DNA, 313 bp, Homo Sapiens
cagaatccttctcaacactgcatgcctgccataatgtgggtagggagaggctgttggctctgcagtagccacctgatggctgcttaaaggaccgtgaactcagttatcaccagcattttccctactctttcagatctgggtgcagttggctcagtcctccatccccagcctcgggaaagtctctctcccagatttccgctcctcctcaacaagcttgcatgttgtgccaaggagcaatcgcttctgctgctacgaattcacttgcccttgtgaattcacgtgcccttcatccttgcctcatccagaacagaga

SEQ ID NO: 175 - DNA, 339 bp, Homo Sapiens
tttttacagtgctcccaaagcttgctggcacataaacatgaatgaatgaacaatgtagaattcactcaagaaatttcaaggagagagaggaggagatttacatcacacagcaaacaacctaataaatctgttaaacgccatgcatgtgaataggcgttttcctctttttgaccctttctttccacatagaactcagtgctccttcctcgtcctccgttacagtatttatcgccttccttcttccacgccggggagcagtcgaggcttgtgttcttcagcggacttgccaaatcatcccctccagcatgctgctctctcccttccacagatcatctgtta

SEQ ID NO: 176 - DNA, 463 bp, Homo Sapiens
ctcttcccttgggagtggggtcagccaactggcaggcggcaggcggcagggctgagtgggtagggctgacggggagcggaatggaggcacgccccgtggagatggcgttgggcacggttactgctgcttctgcccattcttccatccttccccgttcctaaggtccatacccccgccggaatccagggcactgttccctcctatttggaaggccccagggccctttcatccgcgccgcgcctcgctcccgcccccgtgactcgaggcgcagcgtgcgtggtgatcccggcccatggggacttccccgcttgctcctcgccaagatggcggcctcatcagggaggccccaggggccacggctgggcagagccagcttgagctgctggggagaagggtaccccatagggtccctagggcaggggagcctcagatagatgcaaggtcctggtgccacaccttctca

SEQ ID NO: 177 - DNA, 456 bp, Homo Sapiens
tttaactcctaagtgcatcttccctggctttttccagacggtggaaatagggcggtgactaacttttcagagtggaagacacgcacgaagggcgcacctgcagctctccgggattcaggcgggggtcgctgtgctctcttaaaagtgagcggcggtttcagcctgccaccgcttcgcctcgccagctcggaggaaactctggctggaggcgacctcgggcccagccggacgggccgggccgagcctaggaggggctggcagacgtgtcccagggccagggtggggcgtagggagcgccgtctccaccctcagtacttttggggtgggggacctgagcgtgcggagagcgggaggcagagctgagagcggggttaagcgcgaagctaaggcgccgcatagggttgggtgggaatggacagggtgagctggaagcgaagcaccccagccaggccttag

SEQ ID NO: 178 - DNA, 394 bp, Homo Sapiens
gggggcagcagactgctcagtcccacgcccgctggggccaagcgcggccgcgcggcctcagctccgcgcctggggctctgcgtgccacgctccaggcgacctgagtcccagggcgcctccgccacagccgcgtcccccaggcttccccagaaaccaagggcgagcgactcgcggagcccccacgcgcgctcccccggctacccagctggatggcagcgcgagggcagttctcgcggatttatagtccccagccactcggctgtcagtcctgagagtctgagagtttccacctctcggggttcatgcccagaccaaccaggtcactaggcaggtaaaacctccttctggtaatgagcgaggcgagtgcattgcaaagagattctggtattcaggc

SEQ ID NO: 179 - DNA, 242 bp, Homo Sapiens
ggtggcacagtggtgaactctgcggcggctgcgcgccgctcacgctgttcctccagctgctgttacctctgcgggcctctctcacccaaggggaacggagttgttatttcccgctgtttccatagcaaccgcagcctcgcgcggggagcgagtcagtgaaccaggcctggcttgcgcctggctccttgggatatgctggctgcgtggggcagaggcggaagaacaggggtttggaggaagag

SEQ ID NO: 180 - DNA, 371 bp, Homo Sapiens
tcctaaaccctacaatccaggaaatagtccatcattttataaaattataaaagcgaactatttgagtttctttattatctgcccccttctccccaagctggtcttgtacaaacatgatgcacgtccattgggtgacaagtctgtcgtaagtgaaacgtttacaggcactacaggaatgacctggtgcctcgcccacttcattagaattctaattggggtgtgtaggagaggattctataaatggtaaggcaatccttggcagcctgtctgtcagcactgtccgtgccattcccagaggagcctgagaagaggcagaggaaggcgaaacatggctggtgagtgcatggcatcttctccatcaggtccttgcc

SEQ ID NO: 181 - DNA, 419 bp, Homo Sapiens
agggatggagacttggcccaagctcctcggttcacccggagctgtgacagccactcccagggaacagtcacgctgccctaccaagcccacctccagcggcctggattccccaggcagaggttgtgggattttgttttttctaacatcccagcttattcccaaaagggtttgagccggacaggggctaaacaggccccttcgacttggcgggccggccagacgtgacagcaatgccaaggaggccaagtttctttgtccatttctcacctcccccttttccatccctggacctcctggcgcccccagtacacagaggcccttgagcagcccggctgcaggttccctatctactcagagttctccccctcacgtgcctatccccaaccctgcagtgtctgcggaccaaaggggaagggagc

SEQ ID NO: 182 - DNA, 480 bp, Homo Sapiens
aaagctcagatatttgtgggttgcactgtaaatttctgtacagatgtgtgtgaggttgagtttcagccatacgcctgtaacagcatcaggaaacattttgtcatgctacttccttgggtgatcttctatgaccaaaagaaaaaaaaagtcatatttctgtcttgtgaaattgagctcgaattctgggtagtttagtagtaatcagtatatgcctgaatcacagctgcgcgggatggtttgtattatataccaatggcaactactgctttaaatatggaaattaaatactttaggttcaggctgattccaatctgcgggtaggaaacgtctgatctatcccaagataagtttaaaagtgtgtggagttttctctggggctacaaatcctgttcacattcatatgtatttcttttgagacagtcccttgaggtctcttggcagccaccttcttgaacgtgggaagagattgggatccctagg

SEQ ID NO: 183 - DNA, 464 bp, Homo Sapiens
accagtctttctcttgtacagtttcagtcatcgccctcactgtcccatctcttgcctcctccctttaggatgtctgtgggcactgaagttttctcttcagactggatatgagccagcatcccagcactttgtgagttgagtgtcaggacaaggtgcgacttgattctcccagaaatctttcttgttttagagatagcctcctgggccagggactcttaaggaccaaagttcaattcccaccactccccattacactgggaacttcagaatgtgtgagttccacgtttcccggtgctgacagatcagaggaggaccagacgcgacaacatggctgctgctggaggggctgagaggtgactgattagcttaagcctgcacagcccgtggaggaagcacctcgttcctgccttctcaagtgataaagtctatgctggaatacagagctccctgctctgagcacctaa

SEQ ID NO: 184 - DNA, 482 bp, Homo Sapiens
cccctgttcaaaccctttgggctcaggactgtaggtaggcaaggcagagcattttgaatgtttctctgaggaccaggaacttatttttttgattacacagtgatgtgccccacagatctccctcactgtgaggcaatcacttcatttatccaagttctacaaagcctttattatttcggttagttcatatttttgaagctaagtcatcagtttgatgcgtttgttgtaaaatgtggtttaacagcttgttagcacatttattttttttttaatggaatccaaaggtatttcatgcttgagcagcagtggatttaagagccgatgaaaagccccgcgagctgggcgcagtcagcacaaaacaatgcggggaacattgtggagtcctacgcagagctacccccagcagtggcgtgcgggtttcttgaactttaagttacgttttttgcttttctttttccctgacagtgtctcataaataaccc

SEQ ID NO: 185 - DNA, 345 bp, Homo Sapiens
cagtcaagtaggccatgactaagggagataatgaagcatggaattgtcttttccagagaaaccacaggcatggaataagaattccctgaggaggccttttctgtcctttcttcatcaagctgcgacattattttcatattcagagaacttcagagcaacaccgagtttcgctgagtgggttcagagttccatatggcagctgtctcagttcctggcacgaggccaaaggatgacagttcttatcttctttcatgttcttttgcccaaccttagggaatatttctttaccctgtgattgctcatatctgaaaatcttactcacactctacaatcttccatcagccc

SEQ ID NO: 186 - DNA, 435 bp, Homo Sapiens
gaaggggcaaaataagtcagggagtccagttaacatgtgagatggaaacttaaggatagggacagagcacgcacaaagcccagggacacagctttttgctggacattttgcctgtactaactggtaaattagactgcacaacaggaaagaagcttgtgatagcaaaaggggtcgaaaacgggaaggacactcagagggcaggaactatgacggggctctgcggccttgtgggcagcagggagagtgtatttttggcctgcgggtctcgtgagctggaagaaatcaggaaagggaagctgagcatttaatcctacatagatcacaggctaatcgtgcccatttagtgtttgaaagtgagaagttgtcaaggctttgtgacagccttgaaaccgcaggcattagaggatagaaatcctgagcccagagggaggcagg

SEQ ID NO: 187 - DNA, 450 bp, Homo Sapiens
ccacctgtattgttggcagatgacttataaatgtcgcacagacacgggctgactactggctcatagaagaagcattaaatgaacgacgagacatctgctggtaaatacacagcaaacaaaaaatgcaactcagagccaaacatgtgcacagtgtgggccccatctctgctcataaaccaagcaatgtgttctgctaatcattagcagagttattgattttagatgtgtatcacacagctataattttgtcagagagtagaccacataagttgttctttttctggttgtttcattttgtcttattccaagagtccgtaaattgacgaccgggacaaaaattataattgacatcatctgtgggaaatatttcataaaacaacaggcccagatgtaggattaaagccatgtggtagtaaaataccccactgaaaaggggccaggttccatgat

SEQ ID NO: 188 - DNA, 493 bp, Homo Sapiens
cctcagttaaccctttccctgccccctagtccttgtccacacagaaaatctggttctagagaacagtactcaaacagcctccaactaaaatgcattacgtgtggtaatgcaaaaaattattagaacagtttttttctatttaaaatatgactcctgttcactgctttggtttccctgtctttgtgcttcaggctaaatattactcagatttctgcgaggccaggtgctttctcaccaattatctgaaaggcccagagaatggtacttacatcaaagccagtcctaatgacaaaggacacctggccacggcaaacacaagcatctctcagctcctcgctccatttggcaaaaagctatttccatctcagtcacaacataacaaaggactaattgatgggagcattttttccatctttcaaaaaataaattgagccaaccccacgagctcatctagaggaattaattagggaataggaaatctccaaagccatcc

SEQ ID NO: 189 - DNA, 438 bp, Homo Sapiens
ggaaacaaaaatgtgagcatgaagcttcggtaaaataaactctcttgaaaaacactaatactctacaattatttttccatcaaaataaaatagtgccaagtacatagcttcttccaagtaacaaatctttaaaaccaaagtgaaattttgaaaccactccttcaaatagcatccgtccggtagacagatggcatgttttatttcatttcccgtttctacttggtggagttcatggggtattttgagaatcaatgggtaattaagaattgggtgccaatttaggtatttgatttggaaattgagtctttgaaaaccatcaattccaaatatagcgcaagccctccttattatgctatcccagaaactggtaataagaacactctaaaaatatttagaaatgcaggagccagattttctgggctgcaggtggaggacaca

SEQ ID NO: 190 - DNA, 449 bp, Homo Sapiens
cttccttcagccctgccctgtgtggcgtttgtcttgcaactttcccatgcttgtttcaacaggaaaaaaagcaaagagattgacatatagctaccccgaggctagattgtcaccgaaatagatttctccaaataaaaataagggccgtttttgcttgcaaggccttgcaatgaaacagagttaataaaaactgcatgggaaactcacattgcagctataaaaatattaaaaaatagaattcttagctaaagtcagcagtgattgttggctcgaggtagaaattagggagtaaaacattctgaaacactcattgaaagtgaagagagggaagaattattaccctttatccatttggttaacccttcagaagtaaagctagagtcacacttgcttagcaagtgattaagtactgggtttttaagcgtaggacagaccattttctcctgtgg

SEQ ID NO: 191 - DNA, 482 bp, Homo Sapiens
gggtatgagcaagaatctggggaaagacttggagttaggaggaggtgggtgcttggcaggcggtgagactttaataggcagaggtagaagtgaagggcaaagggaaactttgggccacacggggaaactagatttgtttgcttgtttaacactgtggcctccagtgggacctaaagtcgatgccttaatgtaggacggctatgttagtgctgatcagaataatgtaccccttagggctacattaaaaaactatgctcagtgcctcatttgcaccttcaaaatatgcacatacatgtgtgggccagaaaaggctgcgctcaggacatgcattcttatgtgaaccgtaggtaattgcacaagcaaacaggaagttgcgtaggtatgcaggcagctgcctgttgagaggtgcgtgtgggcatgggcaggcgtgggccttgtctgtttgagtacaattttaaaggcttctcctgatggaagggagg

SEQ ID NO: 192 - DNA, 492 bp, Homo Sapiens
gctccttgaggccccagaatgacaaaatggagaggcagggccaggggaagagggcctggtgagacccgccctggctcccgccggccttctgccaatgcccgcagatggtgggggcccatggccgggacgcccgctcaggccctggcagcctcatgtgccccagcacctccttaaaagctgattatccggcttgtctcctttgtgagccggctcattaccatttcattgtgtggtggcaattcttacccgcaccatgaatattgactttatgcttgcttttctacctgaattacaggcgggcaggccggcggctcgcattgcttgctcagctccagcctccctggcagccacttgaatagtctcaaagaaaagctgtttgcttgagcatttagggataacagagagcggtcacaggccgctacagtgatttattaaaagacaggaaaatgagagaaaagacccttacttcttgcaccagctgcctgctctctt

SEQ ID NO: 193 - DNA, 491 bp, Homo Sapiens
agtgaatggaggggctgccttcagctcacttggcgctgtggtgaactgtctcagggcttggcacattgccaccattccaagacagatgggaaataaacaccattagtatgtcgataagtgtttgttttccttcagcattagggctaagaaaaataaagtggggagggtatcaagccctggagtaagcctttaaaaggtttccccttttgaatctcttacggttgtctatttataacagttacaatcacaacagagaggaaaagacttcaatcacccctgggacacattttgtcaaaattacatttaagcactttttatttgtaagcgagaagcattatcttttattatgcctttaaagcagcgtggggaagttgtgtgcataaaccaaggtgttgctgtggcctgttgtcttttgtgaacttctggaaaggatcaccaagaaggatgctctgataactgtctgccaggcaatttgcataagaggaaagagg

SEQ ID NO: 194 - DNA, 463 bp, Homo Sapiens
tgtaggtaagaagttgttcattattgacagagacaaaacattctaatgagtgatggaatttttactctccatctaaatatcacgttaatatctaacacaaaacattattgtcctgtttcatatagaaactgcaagtttattttgtttgaaacatggggaaataaactcccgttttgaccttctctttgttgttctagctgtgtgtcattgacactggcgtgacttgccatgggaaggtgtaatgaggcaagactgggattgtaacaattattaacctacaaatacgctatggcaaagtcaaggcaagccagagtgacacttctaaatatctcaggaaatagtactcatgtttgaattactcattttattagttcgttttgatgaatatgggagaaattaataactttttaatataaagagtaacctaatgtcattaattgggcatttcacatgggctgataga

SEQ ID NO: 195 - DNA, 485 bp, Homo Sapiens
tttggaagcagtaggggagggggcaggaaggggaggcttttgttcactcatggaaaatggacgtgtgtctcatggtagccgcagtttaagtaaacataaactctgaaccagagatcatacccgccatttcctcagcactagcaataccaaaccaaaatatagttttatttggctaaccccaaagtaggatgtgggtgccagccttgaaaaccacatgatcgggtttccagcagacaccaccagggctatgcttttgtcttaagcaagaaagtcacaaaggcaatactccttgtagtaccatcattatgtttagcaaacagatgcaaccataacaacagttaacttcagagacaacagttcactacagaaaaaggtcaagagggtcttttactcttcatgcgtagaatctgagctatcccatattacaactctattgagagaagaggcattaaaagagagacaatgagaacctagggcataggctc

SEQ ID NO: 196 - DNA, 485 bp, Homo Sapiens
tcatccacctactggaaattctgggctgtcaaacaatatccaagcttattttgcaatcagattaaagctctgggccttgtgggggccggagattggaattctattttaaaaagaaacgtgtaaggcactctgcttcccatcaagaagtgtaatgagtaggtttcacctatgatccccagtcccaaatgattgaactggcattagtgccaaaaaaattgaaaatgtcttaacatgcattaatcgcttaatggatgtgttgtctgcctgaaaagggcggggtggtatttaggttgcttaatgactttacattttcccatggcaaaatacttgtgatttgattatgctgtaattaaagagttacataaacaatatctttggaaaggaacaaacgggcttccttgaaagagggattttggtcagctccagctggtatctcaggccccttcatgaggagaaaactctcacccccaggtaaactcctctct

SEQ ID NO: 197 - DNA, 432 bp, Homo Sapiens
ggaaagggggaagtcctctgcaagcatacgtgacaaaagaaagacaaagttcagtttgtcaaaagggaccagagtcacaaatatgtttacaaaaactctgtcctgttacctatacttgatttacaatgaccacttgggaaatttgcctctttgctggggtagggacctgactgaccatgtaaaggggaaacagatgcactcagcctgcggcctcacacatctgctggatgagcaacgactataatttgccaggaggagacaataaaaaaattcacataaaactttttattgtgtaagtgacactggttattgtagtcggcaatcagaaagttaccccgaggacagaacttttctgcctattaatgtagagaaaatggctagcctgcttcccacgtctcagaatataacactggagatgctaggattcattcc

SEQ ID NO: 198 - DNA, 411 bp, Homo Sapiens
attaggctactcagccagttttctggagccacacatgtgggctggccttcccaagtcttctccgcccaaaaagccagacagagtttgtttttccagcagggcgcatatcgcaggcctgggtgggttgtttgtttttgtgtttgttttgacttttagctatttccaggatgtttctttcatggaggagaacgactcagttctgtctgccatgtgtattaagatgagctacaagagagcattgctttcttgtaatgcaagaaatgcaatgtagtcagaggctctgaaatctggtggggacagcggcagcagagactgtgacagcctcgggacacaggaggccaccttggtcttcagtcttaggtgcctggagctaccagacagccaaagttgcacaaggcacaggcatgacct

SEQ ID NO: 199 - DNA, 457 bp, Homo Sapiens
agttgaggggtggtcagccccggtgagccctggtgtctcatcatggtttccccatggctgtctccacccctcttccagaaaagctattgagaaatggaactctttgacatcacccctagctaaagttgctgaaaacagctcagaggagtgaattccacagagccctatgccccgcctagattcctggggcttcttgtctcatggagtctgcagagccgcgtccagacccctcatcctggaccgctacccggcatcggcctcctccacgtagtcttcttgctcccactgcaatctgactttctgccaaaccatttccctcctggcttcaaacttttgtcgggaaagagatgaaatcagcacttggagagctggaaagggaaaaacagctgcttttcacaaaatgggctagggagggggaagcggagcagcacagctggatcttggtgggaaagccaga

SEQ ID NO: 200 - DNA, 446 bp, Homo Sapiens
tgattggctgtgtgaatgggcacgattagcagcaaagaaagaaatggaagcccgcgcgccggctgggccctggcacatgcgctgcccccacagtgtgtctagactacgtcggggcacgtgcacagccaacagatccgacacaggaaaaagcacttctcagctgtccccaccatcctgctatttgtcattccatccatctgctgtccccacgaaacgctcacccacgtcagctaaaatggtacactgggcttggaatcggctggggaaatgtcaggctgacagaacaggggggacaactgaaatagcaactgtgtggacggtggtggtgacacaaatctgcccctttgcgtagaaggcaggactcccagagctcaggaggcctcttgcggaggaattggtatgtggcgaaggctgcagggagggggccctgggactcaggggcagct

SEQ ID NO: 201 - DNA, 476 bp, Homo Sapiens
agtggcagaggtgggaggtgggctggcgaggtggggcagtctaggaactgcgctggtggggacaggaaattgggctgaagggagatgtaaggccttggtgggaaataaatggcactgtgttgttgacggaaaaagatcttggcaggactgttgttgtgagtgttctgtggcttagaaaggaatttcctacaggctggactaaccattaaaaatgtctctaccttcaggagtccccggcgtgcagtggagcctcgctgggggaaatgacagcttggaccatgggcgcccgcggtctggacaagcgaggaagtttctttaaggtaaaaggaagccttgattgggatctcaactcgtcggcttgctgcctgagcctgggagctgcggtgctccatggagctgctgagggaagtctgctctctgagccagcaccggctaagggagcttgcccgagcccagctgctgattgttaccagggc

SEQ ID NO: 202 - DNA, 463 bp, Homo Sapiens
gaaaacatgagtttagaagggtttctaactcatcagtgggagagatccgtaaagatcagaatgagaattgaatgggctgcctgcttttgatatttacaacggaccaaaagatgacagctcaatccatatggttgtcctcccaactcttcaaactaagatcatcatgctttgttgatttaaagcaggtcacagcctctggatgcgaggcagccttgcagccttcggtgggacgagagcgggctcagaagaggaaaaggtagcgtgggcagaaagcaacatcacaagacggtccctggttttgtcattgggcaatgtttccccgttaaaattacaacacaacatgtgcctccactttttcccccacgcaggcatttctcacttctcaaattgccaggaaacagacttgggtgaaggttggagggaataagaggagagtaaaaatatacatgctgggtggaggaag

SEQ ID NO: 203 - DNA, 483 bp, Homo Sapiens
gccaagagggttcttagaatggattatcttactgttttttttttatctaagaattttatctcctgacacagatggatgcagggatgggagccggggtagcctgggagatggaacctggcggtccaggtgttgaagggtcgagatagacccaggatggccaatgacaggaaacccatctggctgtttaaatacggtgctaggcaactagcagtcacccaggcaaccgatggggctggggaagtccagcaagaggtgacagcgggtcctgatgacaggactgacttgccctcggaggcaggccatggaagcaggcactattcagagacgcaggcaggtggctggccttggggacgtctgtcagctgcagggatgggacgccaggccttgggaagagcaagagcaagacagcattccaggaccagggcaactggagcccgtggatgttgtcaagaaggaggtgggcactggggaaagagatgcagg

SEQ ID NO: 204 - DNA, 493 bp, Homo Sapiens
tgccttatttaacttgaggggcagccggagcactgggagaggcagccctggcctcggaatatggaatccggtggccctgggtgctgcaggaaagggaagtaaatactctgttctaatagaaaacaatcgttttgctttccttcttcagaaggcggccttaggactgcatgtccccaaactggtcacctcgcactttactcacatgaattcattaacagtcattgtctctccattgccattattttactatttcttgaagtgaaccaaattctctctgtggttaataagcactgagccaggccccctaccttccttttcatcttcaaaacacctggggttccctgaatggcatcttccgtctggccaaggaaaataagagatgaaaaatgttgccctactgcagggaaaaacataagcatttcactttactattaccagttaccccaggtctgtgttcactagataactgtccttaggtggctgttaagggtgg

SEQ ID NO: 205 - DNA, 443 bp, Homo Sapiens
tgcagcttctcccatgccagacaggaggcaacacccattggaagctgttggtgccgcagcgtgctggcctgggctgagatggtgtgaaaaccctgcccgtcccgctgtttcctaactctcccaggcagtgacagcctcttggcctgctccactggcaacgcctgccgtggggttccaccaattcatcatatctccaatgtgcagttgctgcaggcagtgcgatctcttggcgcttcgctgggctgccacatttggaattgatttgggactcaaaaaggctgtggatcgaggaaactctaaagcgttgttcccttctatttctggccacctatttctgagctgaggtagtgggatctggccaagttgagccaaagtgaaactgctgaaatcaagaaagatagtagccaacgtgacggcagtgggtggtgagaatcccctcctcc

SEQ ID NO: 206 - DNA, 469 bp, Homo Sapiens
actgaagcttgggtggaacttagctgcataattaagaagctgaatctgttttattttatttttctataacataaagagtgtgaaaaggtcattttaatgttcagagagtggcttctcttggaaaatatccccgaacataccatggagcagtgtcaactgtagtataaaatgtcctagaaatcttgcaatttatgagtttaatggcacacctgaggattacgaggttttttccgtccactcataatagcccggtgactgatttagcagagaggaagcaaaatgaacaatcttgatcaccttttaacatttttcctgtcttgctgacttcagagctttaggggtacagcatttgcaggaattgtatgtctttttggcaatactttaaaatcaaactcaaaagatgaagaagaaaaatggttattagatagttataaatatgtcattatttgcaaatggtattgctttgtgg

SEQ ID NO: 207 - DNA, 442 bp, Homo Sapiens
aaccacagagattgtgaggggagcagctggtttgcaaagttgcttggggtaaacctgtcagagctcatgagtaaacacaatctgaaaacagaggctgctcgtggggaaatcagttgctttttcaacaaaataaaaggaagagttttgctcagggcaatgtgacgatgacgtgcaactgttctgcattaactacaacttttttttttgctttctcattgcccagttcccctttattctacagcaagaaattgaggttgtatattgcacactgggaatatctaaactggaaataattaaaatatatatttcatttatagtgggtcttatgtgaggagaagtaaagattgccacagcttcctgagtatatgagttaatgatgtgttctgcattttcttgattttccacattttaactgcctctgttcctcatttgggggtaggga

SEQ ID NO: 208 - DNA, 396 bp, Homo Sapiens
gtacaatgggatgaaggggcttcccctgttggggaatagatagctgacatgctggatggggccagggttcaaacaaaggcccctgttgagtgggagcaggtacaagacagatggtttgttaaacattgccagcatgcttgcgcagtgccgtgcggcggtcagagcctggataatggtcaccagggcattgtgtagcagcgcattggctaatttcagcccagctaaagctattgcttatctttgttggttttgcaaagattaaggcagtttctctgctttgaatgcaccacagctgcccagcaaagcattcctgaagttttgtctgaattcccactgctaagaggggccaagcaaaaggtggctcgtgcaaggacttgttttaagctcatatgtgaa

SEQ ID NO: 209 - DNA, 417 bp, Homo Sapiens
ggaagttcctcattgctgagagcagcagttaaaaaagctgttagccacgtggctgggctcctatttctgcagaggcaggctgagttacagcttggtggtgtggatccaggtaggaattggtcaacattctgaatcctgagctgccatctgcctcgtagcctgctgggatgctcagtttagacaacatataaagtttcctggatacgggacaaacccaggcctatggaaagagcaggaaggttaaagtgtgtggtactttgggcaatgacgaaggcgtaaccagggagctgacatgtttgctccaaagccaagaattccaggacaatttgttatccagctgaagccagtgtagttgctacaaaaaagcctggggacaaaagcatgctttttacttgtttccctgtcttcttgcacacc

SEQ ID NO: 210 - DNA, 449 bp, Homo Sapiens
cttcacccccaacacattcttccagagctaggtgagcctggaagcctaggctcctggaaggcagagctacacagggcaagaggcctaaggagccgtgaactctggctggagaaaccttccctctggccttgttaaatccaacaggcataattgcatcctgctgaccttaattcccctggcgggtttaattggtcttggcattgccccacttcctgtcctgcccctgtagaggcaaagagggtgtctgcacagctggtgcagggcggggaagccccttcttgagggtgggcaggggctctggcagcccctaggtgggtggaggaagtttccccgtgccccacccctgtgcctccaagggagtgctgagaagcttggggactcccagggagcagctggctggagcaggcagtcccgtagattcggaaccaggccagactctcatcccagtg

SEQ ID NO: 211 - DNA, 340 bp, Homo Sapiens
gagggccaaggccaggctgcctccaacctcaccgtttcctgcctccgctctccccatctctcagtagcagagctgcctaaatttggctccaggagggaatgggggaggcagcggcaggcgggtgccgtcagaggccagggcgtcgctcccgtctagccggctggcatttttgctgtctggaggagggcaggggggcccggcagccctctcccggaaagggagatgttcgtaccttctgacatacactgagtaatgtgcaaacgacatgcaaaccgagcttcaaatcagcatctcagccagggaacagcttgagagctgcttttgggatgagagcagaagg

SEQ ID NO: 212 - DNA, 438 bp, Homo Sapiens
ggtagtgtggacatgagccaagctccagccaccttggatggtggtgggggtggcggggctgatgggccgcctgaagccggctgtcaggagctcgtctggccacagccgccagcaggagagaccagctggcggtgcagggtccatcggcccgggcctggaatctgagctgccctcagaggcccagcttctctctgggcccccacaaactggcctttgttcctgggccggccaagacccagcagcttgggctttctgtctgcccgcggcacccgcgctgagctggcggggtaaatgggccagcctcccctctgtccatgcccaggacgtcgctttaggactaaatggagatgtaattttctatacaaatccatgacaatttagatggagtgattgtaattggcttttcaatgggggttttgtccagagctggtggctaga

SEQ ID NO: 213 - DNA, 364 bp, Homo Sapiens
tggggtgagtgaggcattacctcctcagccagaaagcgcagttttgccaggagcttcttggccagtgccaccttcttttgcacattgcgccgtctcaggccgcgtagaagtcgcagtccttgcttagccaaaaggttctgggagggcaaaaagacagcatgagcggaaggccccagctaggcgcccctgagtcccttcccgaggccgtaccaggctgtgcaccaggagtttccctcggcatcgatccagggcattgggccgggtcatcgtcctgcgctcggcaccgtggcaaaactgtctgcagtgagcagggatgtgcacagcagacaggaatcaaaggaaaggagaaggacagtgaccttgg

SEQ ID NO: 214 - DNA, 386 bp, Homo Sapiens
aggcttccatcatcttccaggctgctctctgctcagagattaatttgtttactcccttgcctggagatgaaccgagggaactaatcgtccatcagcgcaggctcccccaacctcgcaccgccccgccccaaatgtccattttctggcaaaatatgtccttgccgctgacaaggctgcttggaaaatgctaattttatcctcgaattaaaatttgttcccttaccctcgttttaataaaaatgaagcatccggaaacattgccacggtgcagaagagaaagatctgacataatttttaaaatgccttcaatcacgctgacttctgaacggtctgtcctctaaccctgaccccctccccatctcccaaccccctgaggcagcatttac

SEQ ID NO: 215 - DNA, 460 bp, Homo Sapiens
ttaaagggggagaaatggggacacctcgcgctccctgcctcctgttataatgagtgaaatacaccaggctgtaaaaggaaatgctgtctgagacgcagctccgatgttttattgccaagttttattcactgatgtaaacgtaatcgctggaaaccggagctcttattaacacacatattttcacacatccggggcccctcctgctcccccctctccctctgggcttgttcacccacctcctagggtcagccctgctgctttctgggcatgtctatgccaagcctggagttccgcaccggtttcataccctcccatggcagataagactttaatagaattccattgctcctcagagctcagtaatgcattctggaaattaggcggctacatactaaagccattgttcccccttataaatgggctctctcaaagccagtgaccatgggggctctgataagct

SEQ ID NO: 216 - DNA, 441 bp, Homo Sapiens
gccaatttcttcctgatgctgcatctctttttaaaaaccagagcccaggcaggcaatgcccacagtatttcactttaataatattggaaaccggtacagtcagggccaccacagtggtggggcgggagcctcgatggcgattaggggagctgtaagtctttcgctttatccaaatcttgggcagtaatttagaaaatttaattaaagggggagaaatggggacacctcgcgctccctgcctcctgttataatgagtgaaatacaccaggctgtaaaaggaaatgctgtctgagacgcagctccgatgttttattgccaagttttattcactgatgtaaacgtaatcgctggaaaccggagctcttattaacacacatattttcacacatccggggcccctcctgctcccccctctccctctgggcttgttcacccacctcc

SEQ ID NO: 217 - DNA, 473 bp, Homo Sapiens
aatgttgaagctggggacattccccaagctaatctctgtgcctgtggtgtggccacggctctggccattatctctggccacagtgccccggagatgctgatgctgacctggaccagaggtgccagcctgggcactgccagtccccacagccattgactagagccccagggcacaggcagctagcaacttatctgggtgccccagggactgctattggcaaagtgatggccccacagggaccaaatgtgaagctaaagcaggatacgcaggtcggagataaggccaagaacagattccctttagcgctcaagtgctgtttgtcagaaattgacagccccacggccctggccggtgacaggcacagggtgataacaataccatatgatcagcatcattggaggacaggctgtcactggctcccagagataaggaaacaatgggcgacccctctgcctagggaaaggcctgcatgg

SEQ ID NO: 218 - DNA, 500 bp, Homo Sapiens
tgaaagggaggcacagtcaatgatctcgcacgtattccagaaactgacttccttagaccttaacagaagctactcaagtgcacagatgtttgctggttttacatggaggccttgctggctatgaaaaaacattcccctctaattttttgctcaatttgttttaagttggtaatgaaatctgtgaatctgtgttccctttctacaggaaaaatagaattttgatctcttttaaaaatcagaacgcaacaggataatggagaaatcagtctcaatagcacatttcttgttcgtttcagagcggtgatgtaaacacgatgatgctatgcttttggggtctttgaggtttctgccaaaagcatagcagcttaggtggattcgtgcctaccgcatgcttctttggtggatttctgtcgacaaattgtatgtctgctcttctgaaatagcatcatgaagttgttaatgtctttgcataaagaccaccccattctgtttgccctggg

SEQ ID NO: 219 - DNA, 333 bp, Homo Sapiens
ggagaaatgagaaggaatacagcaaccgaataagacgatgttcgtttatgacatccatgatgtctttcaaggcttgagatacactgtcttttgtctaattagtcattgtgaccatatctccatggagaccattatgtttgtactcacaatagacacgtgtgcatccattaaaggaacacagttgccaaacgtacgctctgggcccagggtggagtggctttttacagcacagtcatcggagctgctgcaaaaagtgtcagaaaacaagcaaggagctgtccttattcatgaagagaggctctctctggtatcaggccctgggtctaggggagt

SEQ ID NO: 220 - DNA, 492 bp, Homo Sapiens
cagtcctgccaggctttccaggacggcccccaccctgagccacatccccaggaacactctgccactccctatccccctcctgggctcataccatgaaagccccatgcagagcctgctactctagagggatatatattatctaaatttgataagacaactcaatttcactccgtgtctgttaccggcgataaaaccaggagacttttatgacccagcatcctcagcaagattgtcaggaacttattatacaaggtctaactggatttctctctgcagatggctgggagccatgggctggaacgcaattcggcaacacatttggggaaataaatgcaaaatgcttgttccagagacttagataaggcagcaggcctccaagctccccaagaatcggatctgcttttcctgggccctgaagggcgatttggggaggatttacgctgtcggaggaggagggaatggcgggctctttctcccctcatcccttgactc

SEQ ID NO: 221 - DNA, 301 bp, Homo Sapiens
ctcagccctggaaacaatagcaggcaagacgtggcctgagcctgggcttatccagctgggcctggccccgctccgagggtctgtcgcttgctgtgatcacagcaggatcagtgccccagatcttgcttaaagcctggcggccaccgcctgcctcgcagctcatctcccgcagctccccgaggtcccagcgattatgccactgaaaattccgctttcatcttgtcaacctcgcagtaaattacaggcctggggaggcgtgggcctcctccttaaacaagattcaattccacttagctgcccc

SEQ ID NO: 222 - DNA, 351 bp, Homo Sapiens
tttctcccacccctactggagctcaaactataaatagctccagttggaatctgactgcagattcctccagcaaagtcagcatccccaggacctctcatcctggatggggaccgggagtgcttcctcattaatcacagctctttaattaacagctctgagcctggaacaaaaggtgcttaccgggagaacgccagcgggccctgaactctggccgcctgtttttatttggaggacctggcgccttggggagcaggcatggcatggctcagtgctgagcctggcaggggatggggtttggagggcgagcagctggcaggccggctgcctgtctccaccttggacatctccaca

SEQ ID NO: 223 - DNA, 440 bp, Homo Sapiens
cagtgccagctgaggaggccccctcctgcctctgcttgtttcccttgattgttatgtaatgttcggcagcaggaggtaaattcctctccaatttccaggcccgttacagcgcatgaaccccaccgtggggagccacagtgattgagctcagcagccaggtcccatgctgagtgtcataaatcaggcctattaccagcttctcctggcagatgccatagccaagaacctgcccactgcttgcgagacccagccgcctctgcatactgttaaaccagggctgacagatccaccggggatttaggggatcttcatgacactctggctgggtgttgccaggaatcttattctgagagagcaggaggtgacacagcccttggcaaggcatctcagacctgagatctcacagcctgatgtacggggagcagaatcagggcatgatc

SEQ ID NO: 224 - DNA, 476 bp, Homo Sapiens
ggggaagaggcacttggatcaaccattggttgctctcaaatgtctaaagttggcatttatatacttgacttctctcacagtttctctccttcagatttaacgtctaggtttctctgattttaaaactgggttatttgaatgtcaaactttcgataaccctttaatagaggtgtccattaacctgtgctaaattagagcccagcgtccctggaaatacatgtgacacccacatgaataccaaatgccttcattaggcacagcacttacatgatgaataccaaatgcagagcccaacgcagggacacagatttcgcttcgaggacttgccaacacatctttgcgtttcctcagcggtaccggtcagccctgtttgctgtttatttccaggtgatgagatgtggcaattgtggcattggctgaaataaataaatggcatcctaatcaccaagttcagagatggagcagcaaaggaggct

SEQ ID NO: 225 - DNA, 497 bp, Homo Sapiens
atttcctgggtggccaatccctctctctcatatcctagtgccattttaagggaaaagaaatgtaggacatggaataaacagagggaaacctgcttgatttgttgttaatgtgtcagtgttttgttttgtgggtttaacttgtagaaggcaggtctttgtcttgttactctctggcatttaacagggcctgccttcagtgactcagccgggtttccttagacagaaaacagccacttagtgccttttacaccaccaagaaaatgagattattccttgaggagatcagcagctctcggctgctgtcgaaagggcgctttgcctgtttgtttggctgaaaggcaccacgcagcccaggcttgtttaaaattagcttcctcataaatcacttgcacaatgaagtgtctgcctctgccctctgacatatttgtgtctctgtttatttttaatgatgacatggctttttctgtttccatttggctctttactctccacactcc

SEQ ID NO: 226 - DNA, 396 bp, Homo Sapiens
atctgcacccaagcaagactgtagcagttcttaaccaatcaacatgtctattagcatgaagcaattgtgtcttgcctgtgatcggcacctcatttttattcatcaaatatttattgggtaccagtgatgtgccaagccctgtgctggaactcgagatgacacagatgactgacgtggtccccgcccttgggaagcatgcagtccaggaaagtcatagaatgcagctcccaagaagaagccactggagcaagcagatgaaggttgggaaatcatgcaagcctagggcagaccagccaaactgcaatgggaatgcagctagctactcactctgaggccctaaagcggaataaaagggactgcaacagcttagatttcccctttccctcctcagggaca

SEQ ID NO: 227 - DNA, 391 bp, Homo Sapiens
aacagctttgctcttatgggcctgtttgtcatagatcagttagtgggtagattgcttcggctggaaatggagatttagacaatgccagagtggataatggtgcccgaacgctgtcaggcgctaatcaggactcggcaatgactctgctgtgcagattgaagtgcgagcatttggagttattactcaaggcttgtctctgcaattagatgattgcataaccttaatatgatcaatcttgccggatgtgaattgtgcagctgtaaccacaaaataaggtggcatttctgttttcttgttgaacacaaacattatatatgcgcaagtcataattttataacggtcgcttttggcaagaaagagctttgtcagtcagaagatgcagttgagggga

SEQ ID NO: 228 - DNA, 470 bp, Homo Sapiens
gcaaaggcctggtggggtggggcaggggccacaagagaccctccatggaacccccacctggaatagccagaccgagtactaacacacactgaacagctaaatcatacattattgatttgtcaaacgtatttgcatataaataagcatgatcattcatggaggcccgagcagtggcacctcccctcagtgccatgattacagatggatggccctagttagacacgaaccagggacgctgctacccctgccgcaaagtcagcggctgatttaaaactacatttattggagcatgtaagtgtgacagcctagtggtgagtttgggataattagtctaaaagacaagataaacgactcctaaaactggtattgtgacgaagatcccaccctacccccccgccacagccagctcagccctgatgccaaaaatacagccgaagataattaactaggaaatgttaacaggcaggatt

SEQ ID NO: 229 - DNA, 493 bp, Homo Sapiens
gcaactttgataccatctttccaaggcagcaacagaagggcccttttcattcattttctatgtgtctttgatactattttgcgcttctggatttttccactgtatgtctcttagaaacaaattaagctcgaataagttgttccagctaatgaagtgcgcttttggctccttctccgtggttcagaattatccggcaaaataccaattgttttaggatgcattttctcttagttttgaaatattgcaatactaagttaccacaaataaagagcattgagataacaacacacaagaacgtgtataaatggaaactactgtaatccttttttaaattaaggacgtgtggacgcctcatgaataaacatttaggatatctggataaatatatactatgtgttcacatagataaaaacagaaaggagcattccttcctacctcactcccccaccccaagtcacataagtttctcgcagggcacaagcccagggcaatc

SEQ ID NO: 230 - DNA, 385 bp, Homo Sapiens
ggagacagtgaagttgcctgtgcgggccgggggagtctgtctctgtctctgccccagcccacctctggcctggcctgagtaccttgagaagtgggcccaggagaggcccctggatccctgggttcctggacagccagggtgagggcgctttgccacattcttaggagagagcacatccaaaacaatttctttttctaaaaactcagtgctaacggattccagatgtccgtttgttatataatggggtttgttttaatagcgtcaacttccagatgtgcagcctggaatcaagaagcccattggccccctgaggacactgtgagccaagctgagagctgcccgggggagagacatggacgtgcagaaccagggatgggagaggagc

SEQ ID NO: 231 - DNA, 440 bp, Homo Sapiens
gaaaagaagatcctgagtggccaagcgaacggagcagcctccacccgcgtcttctgccgctcagcccggctccctggtactcctggctcccaacgggcttcttcccaaggcccagcgcacccgggagttttccagccccggggaccctgcagcgccttggatagatctccgtgaaatcaggtgtcgagctatggtgcatttattttcgggcctgtcgcccctaccatccttgtagcatcctcaaggacagggcccagtgtttggcagagattcaactaattgttacactctcgaattcattcgttagcaggtaatctttgagtgcccactaaattccagacattgatataaaacgggatattgcggtcaacaagacaaagcccttgctttcatggaataggcgaaagactaaatacaaggggtaggtagtgataaatgct

SEQ ID NO: 232 - DNA, 422 bp, Homo Sapiens
ctgcactagaaggaatcagtggctcattgtcactggcaaagccgaggcagtgggaggaccattttttctctgggttcagcaaccctcctagtggttagcagacagcagcataatggccagccagtgtgaaactgtgcaaattgcctcataaataactcgtaatgcacaggcaacagggagaggccatagctcatggataaatgactccctgccatttcggggtattaaaccagggataatccggacctcaccatggggattcattaactactatgggtttcccgcacgcaagcctgctgggactcaggcctgcttggtgcttcttgtggcatcatgatgggggcaaaacacttccaagcagggccatgagaaagagaatgtaagtacctttaacaaaccagccaggggtgaaccctgtagga

SEQ ID NO: 233 - DNA, 186 bp, Homo Sapiens
tccccagccttggactgggccaatgaaagcccgaaaaagaaaaaaaaaaaaaattaaatctcaatgtagccggagtgcaaaggccgctcggctttgtttcccggcgggggaatgcgctgtgttggaggcgcgaacaggagccgcagacggtgagcctcaccgctgcaaatgccagggcagtgaagc

SEQ ID NO: 234 - DNA, 420 bp, Homo Sapiens
cagattctttggcagcccttttgtgcagaacagccatccggttctatctcccttgcaaggccggagttgctgttttattcccttgactcatatataacaataaaaaaaatcattcttgctatgtgtttctttatctccatcaagtggttgaaactcaatctgattgtccgagcacttctggctggatttgggttggagtcgatgggattttatgagggttgtaaaagtcaagcttttaacatgtctcaaacaaattggcgtgtaaaggagaaacgttagaagaaggaacatggctgcagacgggaggcttgggaatgctagccgtagtactggggcacaggtggctttaataatgcacacaagtttggctgtaagttgcttctacaagagcagaagaggctgcagaaccactctcaggag

SEQ ID NO: 235 - DNA, 437 bp, Homo Sapiens
cagtctggtctcccacctctgctggtgttctgcgctcctggccttggagcaggtccgagctggaatgccctgcaagaaagggggctcctcagagtccctcagagtggccctggctctgggcagccaggggtgtggggctttggggaggggggtcccggctgactgatgagaactccaaatgctccccagccccggctgctaatcacttccagattggccgggtcagggccagggccgccgccgcctggctccataaacagcccgtcgctccagatggcggctggctccagcctggcgagcaggttcatgggggactggggggtggcagcaggtggaggacccccacctcactagccgcctcagctgccacacctccacaccgccctgagttggggaccctgggccagaaggggtggcagaaactgaacccattgctc

SEQ ID NO: 236 - DNA, 383 bp, Homo Sapiens
ctcccttcctcaccctggcctcacttctccagaaccagcttgtttttgttttctgtttttacggctccataaatgagtcacgggtctgatttgatttaatttcgttgtaattgttatcttttcaagcttgtttttttccactcggttactcacgagaccacaaaaacctaaacaggacggggccttccccagcccggcctcctggtcccccgggactccgggccagggtcagcagctcctggagactgaggtggggtctgtggagcttctgtggggagggacttggtgtccccagcaggactgggtatcccgagtcccgggctgcagctctgttgctggacagccttgagagaattgttcgagctttctgatttccccagcat

SEQ ID NO: 237 - DNA, 495 bp, Homo Sapiens
tttaacaagcctgattctcagaacagaacctgcagagaaaaagaaagcaagcaaggaaaaaaaaaaaaaaacccctctctactggaaaaaacatacacatacacagattaaaataatatttggcacttacgtcgcacttttaaaattcttcaaacgctttataaacactagctaattaattaagccgcctaaatctggctgcagtcggtggagagagctcgagaggagctaaaaaaaaaatgggggagccagcgctacacaactccagattttattgtcgcctgcctggggtgtgattacaggcctccggctgcaccacaagaatagccctgctccaacatgctgcacgcctgactccgcagcctctcctgcgcctcctgctccctcaccaactgctgactcacagccccttgtggtgttattgataaggataataataactgcaagccaggctgagtcccgggctccgggcctgcaccctcccctggatatgcc

SEQ ID NO: 238 - DNA, 491 bp, Homo Sapiens
ccagacccttgagcccaccgaccacactgtttcaggttcttcctcaagttcttcctcaaatgcaaccagaactgcctgaagaatgcggggaatcccagagacatgcgccgcttccaggtgggtctggagagagggtttccccttgcaaccccaccctttcctgatggaggggaggggagggggaagggaaggctgtgaccctgccaccctgggaaaggcctccaaggcagatctctgcccagccctgtgcctccccagcctggttggtgcctgctgggggtggggcagctccttctcaacttgtgctggctgccaagggaggcttcattagagtcccacttaagaagatgctaattgtgacatttttacatgattaacgacccaggcaatttgcatagcgtgaagcggagagcagctgcccttagcacatccccaagctgcacacccctctcagtgcagggcgggggaagaaggcagccccagttttctcc

SEQ ID NO: 239 - DNA, 395 bp, Homo Sapiens
gcagagtgaacagcttcagaaatggaccattctgtctcatcctgtctttacatatgtgggacccagcatgaggctattcagaaacaacagaatcaggtcgaggccagtcaatacagtcggtagctgttattgaatgcccactgggtggctgcaggctcctggctgaccacgtttctaagagctggttaatggagtcctcgttacagtcttggttaagctagcacatttaacagcccgcagtgcaaatgaaaaatacataggtctgactagggagcattttccctttctgtctttttccgtaaagagaggaaagtgattgctctggaagtttctgacattaatagccatgttggcatgtggctgtaagacaacctgagttaagatggtgatatgcc

SEQ ID NO: 240 - DNA, 469 bp, Homo Sapiens
ggaggaaggccatgttaaatggctgtgatccactgcctatagggaagagtacgcaacacacacccaggagggcttaggtagccggaactgtggcggctccatacccccaaagtgaattttaaacttgacttatttatgccgttctcatagcaacaggaaaactgttccgacctatagccacggaagactctgtaaaagaaactgtaggaggaaaaaaagataatgccaggaaaaaaaaaaatttaatgaagtaccattctttcacttattcagtcaactgagaataacagtttgtgcatttggcaatcaaatgggaagtggcatttcgtgttgcaacatgaacctgctcacattaagtgatttatttttttgtttagacacactgtactgagaactttcttcaagtagaaagctattaaaaatgtgagaacaagcagtcctcactaacctgaagcatttggggacttag

SEQ ID NO: 241 - DNA, 485 bp, Homo Sapiens
gaaagtcaccctcttgaccatgtgtccagactccacaaaaccacagcccgggcccattggctgggcaacatcatttgaagtgagcagaataattcaaacctccccattcgtaacacaaaaggaaggggttatttgtctcagggatgggcacgccctggtgcaatttggcagagcatctcagcaactctatcagatgtcaggttagggcaaaagtggaaatgcgtctgcccagtacatcttgggttgattacttggagtgcatgtttctgattcatttgcacataactcatccagggggtgttgcaagagctatgcgatggccaaaggaacccaatgcgtcttttattatgttttttaaacaagtctctctacgttgattgtctcttggaaccaagaagcttcattcttccagccccgtgacagacttcaaaatgagactttcataaatctgagaacaagttctagctttggctccaggactatct

SEQ ID NO: 242 - DNA, 500 bp, Homo Sapiens
ctgagaaggcaatgggagagccaagttcaggacactgttgtccagtctggtcccacatgaatttaatatttcacacttgtggaattttacgaggggccaagtcaggctgcacggtgaatcctggcttagccgtgagaaccctgggagaaaatgaagcacaacagaaattcccatagaaagctgcgggggtatcgcagtcagagcagagagcccggaatccgtcggcctgaattaggacttagctaagtctatttcatcaaaactcatgaagctaacagccccctttacttggcttctgaaggaacactcccattgtgtaatcacttccgtggaaactgcaatactgtgtctgctattatacagtattaatactaaatggccaggtgacaaaagccaaggacatcaagctaaaagctcatgctgcattcttattgcacactacaggctacaaattgagagtgtgccctccactactttaaagttcctggggctggatcttt

SEQ ID NO: 243 - DNA, 419 bp, Homo Sapiens
tctaagagcatggattgttctgtatcttccaggagcactattgcaaagtcgattcattacttttttcatttgttccgcatcaccgtgctggggctcattaacgccctgtcatcgggtgctctgtgcgtaagtagaagtgtgttaagaatcaatcgctctgacctttattccctgttggtgttttgtcattcgtgggctgcttggcttgacatatgaattactctccagctgcctggtgctggggaggcacagtcaccagcccccaaatatttcagacatatgccaattgcaatttcaacacacattttttttctaccgtcaccctggaactgttccattggcaatgcatgaaatatgaacaagaggaaataattgacaaggcaccactgttgactaaggggctaacctttgaggaagat

SEQ ID NO: 244 - DNA, 353 bp, Homo Sapiens
ctggcaaccttaggagtatggaagaaagatttcaaacaagtttctgactatgtatctttttctaaatttttttgaatgctgaagaaatgttaaatttcattaagttttacagccagatttaatatagacataaatccctttaatgttcgtttcagtcaaaagtgagcggaacattatcgttaaaccagtgcatgtgggagaattacttgaggaaaatcaaaataggcacagttgggaacattaagccgtggccatattagacgcaagtaggcgcaatagcaaaattctttaggctctaatggactgggctattttgcttctcagtttccatacagatgagctttgttctgggg

SEQ ID NO: 245 - DNA, 486 bp, Homo Sapiens
ccaagcaggtcacaacaaggtggcaattgaccttgctccccgaggatgtctgttcgggttctgctagaagccaagggctccctgatgtggggtttcggtttcacactgtggcactctgaacaattctttatgggctggcaaaaggcgtttcacacttcagataggccccaggaggatgatttgctttcttcaaggagaactgagaattctcagatgattggaaggttctgtactctcattttagcacctccgatagattctcccacatgtggcaaacacagtcatagctggaggtccattgtcggttgttaacaggcagtgaactgttgctgaatcagacagtccacgtatagggcatttccatcatcacagaaagttctgttggtcagagcatctaaagcatattcggcctctccccctagccaccctgtttatctcttgcttgcattcctccttggtatttgtgctgctgccaccccagttcca

SEQ ID NO: 246 - DNA, 457 bp, Homo Sapiens
actggaaagggagtcaggtctgagccacctctttttgcagccagtgtgcagtggaagtggctcgtgggtgttccatatttggattggagagcaaagcataatcccagcgctaagggaagcctcttatgcttctggaatagtgccccatacttccctgaaaaggtaataaaatatgtgcattcgctgattaggaacaaatgtcaaagcgtccaccatgatggaagtgtccgatttccatggctctgataagtcgccacaggatctcatgaatctttaatggctggcctatatttaggggctttcagtttctgagggtggtaaaaggtccacagagatgctattctcctagcacactggcttctgccaagaccggtgtctatttaaagcacctctcgtctttcgaatgtacagagattctgctgacaacaagaaactttcttgggcctgaaattagatg

SEQ ID NO: 247 - DNA, 431 bp, Homo Sapiens
tccctcctgtcacatgaatagagcagcagctgctgactcaagagcgccgggaaaagggtgattgtctttcacttggcatagacacccctgaggacaagactactgagttaataatcgatttcactcccctgcaggctctcccgcagctcattcgtgagggcaggaggaagggcgggtgctctggactcatttacagtccctgtttccttaaataattgtgagtaaggaggacagaaggcggcaaacggagtcagtgagacagctcaaatgccgcctgggtgttgcatcacttagacataaaatatcaaccctaaatgccaggctgttctgtgtctgtggatgccccgaaaccctctttccaccctgtgctgacctagcccgaatactgactcagcctttaatccgtgttctctcttcttctgcagcccctg

SEQ ID NO: 248 - DNA, 402 bp, Homo Sapiens
tgatgggaatataacaggttgtagaattggagaacgttaaatctttgttcctaatggcaaaacatgtttttctcattttcatcagaatgtgtgatccatgccatttgaaatcaaattccaaacacaatgagccattagtgtaatagctcattactaacagcggtcttataaataatacattcttatcatacacatgcagctcgctgtgaagccagcaaaaggtatttcaggccatcgaagttttgttgcgccagcgcggctgtagattagaaggacatctccatgtgaaccaagatggatgccaattttccctgccgagagtcaggctggccgtctctttctgcacatatggtagatggattggttaatcagcgtctgctgagtcttgggcctgaaattaca

SEQ ID NO: 249 - DNA, 471 bp, Homo Sapiens
gtaactttcagctccttcaggagaacaacttgaaatgaaaatgaagattatacatactatcaagctgaaaaacacaatgtcattcctcttgagggatggcttaatatgctaatgtttaatttaagaactttaaaaacgcccttctattagtaattctaaaacaaaaacaagtcgctacataaagcatggctaaaataccactaaaggtatgacaaggatcgaaactgcagccaatttagtacacagcacacagatcattggattgttccagctcttcccatgatcaataccaattgacatggctgaattgattctgcagcaaggtgctccaattgttgaaactcatcacgtgggccgtgctccagagtcccggcctcttcgtggacatgcctgcaattctgcaggattgaccccattagcacagtcagaggcttggcaagtgcccgacaccaggcaaggctggattccata

SEQ ID NO: 250 - DNA, 499 bp, Homo Sapiens
gataagtgaaaaaggaaggaaggaagaaaaaaaaacatgaaccatgcttcttccaggttaatgtttaagcctgctttaatcacgtcctttgatacactttaaggtccatatcagtcaaggcaaacattctaagggaccgagcagatggatgctgcagtttagaaagtgtgtggtaaactcaggatccaagagtggaacaaaagatccacctttttcataattaagcctctgattaatgccctaggctcctcagcacacacctgtaattactcacagaggtactcattgtgctgggacttgtctcggaatatcaggcatcaagctatccggcagcagatggaagcacatttctgttgacatatgttgcaatgaaaggattcgtgcaaacctggctagcaaggtagcagaatgccatgcatttgaagattaataatgcaaacaaccatgatgttaactttgttatgcttgtgttaattccatctgttgagatgtggaacta

SEQ ID NO: 251 - DNA, 400 bp, Homo Sapiens
ggctccctcaccccctggacctcagccaatcacttcaacggaacctgctactatgagcaagaaggttggaaagagagggcaaaataacagatggctagcctaccctaccctgccacccacgtaagacagcgccctgaggagacacagcgcctgtgtgaagtcgccaaagacagcactgggggagggtaaatgggggggttaaagagggaactatatgaccagtcagccaaattatggccatatgcctgcttccgttgcttctccacactgaagtggaacaactcgaagactgtatctttgtgataacattttaaaattaggaataaccacgtggtactcaaagaagagccgctgcatattctcaatagtgggacatccacaaaatgccccactcatttct

SEQ ID NO: 252 - DNA, 490 bp, Homo Sapiens
ggaagaggatgggagttaccacactgactctcaaaaggggacaagagacccacattcatactcccaagcttaccacagattaccaaccacgatgcaacctgctacaacagggggattccctttgaagagatggtgccaaaatttgatcatgaggcttttccatgtgaagagagaaaagggggtgtctggggattatccacgagaatctggggagggctccaactgcacaaactagctgtgggccacagaatgcttgctcagctcattagcacctgctgcttacagtgaccattcatccaacagactggccgtgaacaagatgatgggatcagcgggttcatgccccagagagctttgctcatcattaacatgagctacgtcctgttcaggaaccattcctcttgttgaagaaacactgcgatgtaatatgataaacacgtccccatcacgagtgtagatttgtctagaaagatctgcattaaggtggctg

SEQ ID NO: 253 - DNA, 475 bp, Homo Sapiens
tggggtaatccacaggagagtgaaggcgttctagtccccaaggacttttgagaggtcatgcagtccatgcctccgtctcccaacacccaacagaggggaatcatattctctttacccctccctagacatgaagagattctccgcttctcccagaccctctgcttctcacaatccctggctgtggggaacttctcttaaggcacagattggatccctcttgctgcagtctctgacttggtttctcctatcctgtcctctgtggctagagaaagccctcttctgggtgatcacagcggttccttaggatctccccttcaacattccttcatcgttagttggttcttcccagaaggtaagcccaatcccttctactgcagtccctagcatcctctccgttgtcgcatcctacgcctccaaggcagaaatgcacccccttcctcaccaaataattaacagagacaagggagaagaaggg

SEQ ID NO: 254 - DNA, 498 bp, Homo Sapiens
cccccaagtctggggtgaaagagaagcgtaagaaggcagcatcgttccagacggtgtcccagctgcacaaggtaaggccccatctgggagacagaccctccctcttggcagcctccagccccgtccttcaccccctgccctgtcccctgtgccttgggcgggcggctgttaagacttgcagtgatgtttaactcctctccacgtgaacatcacagcaagtctgtgctgcttcccgtccctacgctgcctgggcagggtttgtggggaaggggtgggagccctggggctctgggagggacggggatttggcagggaagtgaagactttggtggtggtgatgggagacagcgaagggtctcccatcaccagaatgagagtgaaagagcaaaagtgcagggcacttagggccctgctcccgtctcggtcctgaccactgcggcatccaattctggttctctgccccctttgtgcctttccctcactcttccccactgccag

SEQ ID NO: 255 - DNA, 282 bp, Homo Sapiens
ggggaaggaaagagtgtcaaggaaaggcctgagaaaatgacatttatgaaatgctcgggaaccatttgggggctgcaatgatgaccccctcccccacgcccaatacacgggataaactcgaggcccacagaggctaaaacaaacacgacagggtcccccagacgtgtagacgtggcgcaaagaagggaggatccagaaactgggcccagggttcgtacacgccatcagtgtccacagcagcccagccccgctcggcccctgacaagggacatcaagccagct

SEQ ID NO: 256 - DNA, 452 bp, Homo Sapiens
ttgcttcctactgtaggtccctccaggtacacagaggagttcgacaaatcccacaaacctttgtactggcacactggggatacagagatcggtaccataacttccctgtcctcaagctgctcacaggcttctacgagagtctgattcatgcccagagaaccactgaagccaatggttattttaggcagggagataaaagccacagagggcccagttggcgaggggagtccggcaggagctgcctaagcagaaggctgtgtttacatacacagacgacttctctgcccagcctggcctagtgtggggagatgggaacattcaggcgtcactgcctggctgccttgtgaagttgcggattaaccagtgatgcagcggctggtctagccgtctggtccctgcagatggatggatgaagagaggactgaaaagacagcagagcagtgccagcttct

SEQ ID NO: 257 - DNA, 498 bp, Homo Sapiens
ggcagttgccctcctctcactgcgaacatggaaaggcactggccacgaggggccaatggggctgttgtgtgcacaaggtctgccccagggagggcaaaagacactgtcctgggatttaggaagctgcctctgaaccggttctcccacgacatcatcctccaggctgtgggaccgttaggctgggcggaagtggactccagccaaggggatgttcccagatgtcatgctttcaaactggacccgcccagaaaggcaggcagagacaggcctgcgcccgggaaagccctgggtaacgactcaggatggcattcaggcctttcctgggcaggggatggccacaggtttccctggcggcggtgtctatcaatcccgtcccaagaaggagagcctgggcgtggaggttctgggcagctgaaggcagagatccatcccttccctggctacccacccccacctcagcaacgcctcccagaacgctccaaagctttctcaagtccc

SEQ ID NO: 258 - DNA, 500 bp, Homo Sapiens
gagcttacaccctcttcttattttgctgcagcttacaggtagccctgcccaatccccaacgtacgctcttatggttcccaggcaaaccacaggagatggcatcggtcctctcaggagtgacctagcaatgctcaggtcctaaggcagacctgtccatgttgccaggctgggctagcttggaggctgccttggcatgagcacgcaggcagacagatgctgacgccgcttcaaagaaccgcccctccaggtgctgagggcggcttttctgatgctcatcctgtgtcattgtttattttcataaggcgcccagctgctgcggtgatgatatttatatcaataagtgctctattcatctgccggtttcagggaatgcttgccagctgcgtatggcagccaacctcagggtacttctgagcctgatgtttttgcatttagagaatcagttctcaaactctgtaccaacatctgggcctgaaagattcttcattcacccaggaccc

SEQ ID NO: 259 - DNA, 477 bp, Homo Sapiens
ccttccagccaggcatcaaagcgctgcgaggacaaggatgccaggagccatccatgagacctgggcagcagcggccctgagcttccaaggctctccttcaacatgtagatggtgaagtgaccccttcctgtaattctgccacatcctcaggcatcaatctccagaacaattctgtctttcttttccctgctgtgagcacttgtaacagtttgactccctagaaattcctacagagagtaaaagtgtttcaaatagctggagatggagctgtgcgcatgtactgtctgctctagatagaaatcaaacgttttgagaaaaaccaaacgttactaagacgtgaagtgagccttgatatgattaaggtgagtgtaacctagcctccaacactttacaccacacgtctcaccccacctgatcacccttttaactgcattttctattcactgaccctccaggtctgtgggaatgcctccaccc

SEQ ID NO: 260 - DNA, 439 bp, Homo Sapiens
gctggtatgaaccatgaagctgctctacattaatcatctccatcgcccccacttcctgctgcccttctcgacataggccctgggtcttttgctgggaaaaggcaggtcgaactggagctggctggggagctcattagcacctcgccagagccgagggctgcctgccttccaggaggcattttgaactctcccttcagttacttccttgcaatcaatatgctgcttttgcagttgctccatccactgcccttgcagccatcggaggctacaggcttctaagaagaactgttggggtttatcaacatacacatcttcacttcacaggaagcagcattccatggtttgcacattggtcctctgggctcataacacagcagggtccagatctggggagaagcaggcacgagggatgtactgggagtagggaggaaggccttgg

SEQ ID NO: 261 - DNA, 500 bp, Homo Sapiens
catttccatccatatctctcagcgtacattttttctctcttgtctattcttttaacctttttgcaagcatcatcttgttctgtctgtcggctgtcagcttttctctccgagcttctgcggagttgccagattcttgactatttccccaccctcagctcataactgtttttccctggagctcagcgactgctaagtggtctttgtgaaatcctattaggataatctccctgtctgtgtctcctctcagctgggctgcctctagaaacctcagctgtcttcctactcacaatcggcaaatcataggctggctcctgagtcatccaacatcgtacttattcacaaacatgcttagatgagctctgaacctgtcgaatcttgtagcccacaagcaagagttaaattcactggagattcaactcatatgtcttctcctgcagaaggtgtctcctgtttatgcgggacccctattccctctacaatcccaggaatgacacctgccc

SEQ ID NO: 262 - DNA, 473 bp, Homo Sapiens
tctgatctgccccagtgggaccctcctgcgtctctgctctagttgtagaggacccatcaggcacttagagagaaatgagtggtgttgtgaacattcgactgtgtccatgtggaatccacacacacagtttgcctgaaaatgactgataggatggaaactgacaagtcatcatccgcttcgggcaccagcgatgactggttaacatgaatattgtgttgatttccgctagatagaagaagatgtcacttgtcgttaatggggtgtcacacgtacacttgcctaaaggaaaatgctcttttggtgattgttctcaattttcacctcattttatagccataaaaaagaaaagattcagcagaaaggatgaatccacctaggggtaggatggaaaggcattcttctcatttatttccttctttctttaccagaacaaccaaaacccagtgaaaatgctggtgcaagtcagaagaggg

SEQ ID NO: 263 - DNA, 408 bp, Homo Sapiens
ctctccccactgggcttctggggagaggcaggtggaacctgaccctcatgcaccctcttccacccccacagagggagaatgctggattcccggaagggagcggggtcaggccacaaggaaggcagtggccaggaatcactctctcccggggagtggggagaatgctgaacgcttggcacccgtgggggtggaaagccagagaggttaagtgctgctcagagatgacttcatgactcgggaatcaggagctgccgggctgctggtgctggaattcaagcccccgcacatagcccgtgcctgtggctttggtttggcagagcaggaggaaggctcctcatggctgcccaagtgcctatacctaagggcagggtccctgtgctcctacctccatctcctgtggcaaatccc

SEQ ID NO: 264 - DNA, 498 bp, Homo Sapiens
aagcctccctctgtcccagcccagtaaccaagctgggcattgctccgattaccggtggagacagccaggagggggctggctccctcagggcctcagagacagaggtgcattgaagttggagcttgtaatctaggcagcagatccgaaatccctgctggatccgagggctagggaggctctcgggatgtaaacaaacctcctgtgttctcagagcagagtagagagcccacgctgcagccttatctcagctgattagatcagccctgggtgctggcttcctgcctcttcccagcctccctcaccgacccccaaggaagccatcctccagaccaggtcagtctgtcccacagacggctccggcagggcttctccaaggcaaggagtatccccactctgggtagccgggccagccatgtgccacatctgcccccacgcccagaggctagagtgacaccgccagtccccgcaggcctggccactgactgctgggcttcacca

SEQ ID NO: 265 - DNA, 452 bp, Homo Sapiens
aaatgctgggaggttgctttgagggtgggtgtcgtgagaaggttcggggagaggtgggccagggttgccaatgggggcagggccgcggaaggagctgtttgtgtggggccttggcgacaaccgcggggcccagcggttcctgtgggtgctgacaggagcctggcggtgagtgatggaggaggcggttgtaaaataggttaccgtcgggcgcccggggttcactctgcggatggtgctgttgctaagctacctttagaattcgacaaggacggatgctccgagcggctccctggggtggggggaaccaggaagcagtgaattaactgaaaccgtggtgaagtcctttcttcctgaagagtgagagagcgtggtatgagagtgtgtgtttgcattcatatgtgcccacacaagcactcgtacatacgagggactcagctggaaaggggacaggt

SEQ ID NO: 266 - DNA, 489 bp, Homo Sapiens
cccactgcacttcacctgtgtcaaggccacgggaacccttccaccgtctctgccagcagatgccattcagcacccaccccaagatactcatactttgacccggaagagaccagaagcaccctgcagttcgtgtggacaagtctcccctctgacttacagtcccctcaccctcgtacctaggagagggatggcagcgctgagggtcgtgggattctcttccctggaggctcccccatcctcgtggcctctgcgcggtccagctcccctccgagctggctcaaggggtaacttgatccaggtcagctggtggagtatgaggtagcgtctagctgagcgtcacggtattttattaagtccgaaatgtgatcgctactgttgtcacactttagcgcccccaacaatccccttacaaatgagaaaaacagagcctccccaaatgcctttcctctgacatcaaggaaagcgcatggaaccctgcccagaggcctg

SEQ ID NO: 267 - DNA, 458 bp, Homo Sapiens
ccatatccttcctgcaccctgcttcgtggcccagcaggtcggccacttcccctgcaggcagctctacggtggaggctccacgcggctgcttccccatttgtctgagttaagtgctcctggggaacgattcggagcctgatgggaggaggagacccttctgttttctctcccagccccaaatctaactgaaattgccttgtaataattgcatttgtggtctgtgaaagctgtgtctcgtggcgaccagggactgagattagctggtgaaaaacctggcacaggggcacacacggcatcactggggatactaagcaagccacggacaatgggggagacagagggctcctgcaaccagaaaccactgggaacctcggccacctctccctgctgcagacatgtccccgccatgccgggccggcgtaggaacacgctgttcctcccagcatcagttctccctt

SEQ ID NO: 268 - DNA, 422 bp, Homo Sapiens
gtgcaaaagctggcaccaacagcagcaactcacaaatctttggagaggcccggcattccccactcagtgactgctgagtttgactgatggggccatgtcggcaaattagccaccattcagcagagacaccctttagagatgctaattgcccagtgctcatgcgtccccacccctccctggcacaggcggctggctgtcgatcccctgccattattgtctgataacagtgcttgatttgtctacacagaccagggcccctgcatgcatgctgttagcatctaactaccagccagcacggcgcatgaagcacggttcattaatgctcttgaggggagcaaacaggtgctggcagaaatctattcccgtggacaaatctgtggacacgtgcaccctcatacgtgcccacttagcccccaagtata

SEQ ID NO: 269 - DNA, 465 bp, Homo Sapiens
cagacttcaggcccttgctggagttttctgcggaagccattttggtggtgagttagcaaccaggaggaatggggcagcggccagcgctgagaggaaagccacgtgcaaacactccctcctctctctctctctcgctctctctctctcactcaaccccaagtgcttcctgaggcggccatcttgatctcgtccttccctcgagatggtttttattccgcagaggagccaggagtggaccacaaggtggcactctcgggcaccgatgcagggagccgttcagcggggacgctagactatatttaactttcctcagctctgcaccgtcccctgtgcaaacatggagacagccaggaaatggcttcaggcctgcgaggcctaggaggagcctcttgcccaggccacagcccgtggtggagttgggcatcgagttccttcctgaatccttctgttctctctgcttttacc

SEQ ID NO: 270 - DNA, 474 bp, Homo Sapiens
cagtgggaaagagggaattccaccacccacgcgtcctttctaaaaaatcaatttgtcctctggacaggtgatgggagcctctgccatcagaccgttccaagaaaatcgtccagcaaaacaaaacaaaaaattctcttcaaacaatttaagtttcaaagctgagtaatctgatgcaggccagtttccaacctacgcccccgcaggacacacagagccagggagctagttggccaagcctgggggcctgaattaagaaggatttaccagccgaaaaattccaaaactctgtgtcatgtgaaggaaccttccaaaacattggatcccacccaggcgcagcgagtcgctcaaagccatggcaacccctttcccgctgccacatcacttttatttttgtgtccttagattttttcctgttttgcaatgttttgctgggacccccgactccgcctgaggccctgtggccaagggccaggg

SEQ ID NO: 271 - DNA, 463 bp, Homo Sapiens
caataaacaagcctgctgccttgttcagaaagggacccgggacccccaatcccaccagagccctaaaagcattagttcaaagttaaagttagatacacgcaaagctgcagcccccgggggaactcagagctcaaaaacaatactctctttgactcaaaaaccacaagggaacacccacggcatacttcttgattaaaaaaggaaagtgaaaaataaggttttctttttttccttcttaatcatcataaaactaacttgtgcctattccatcaagtcacgacttctgttggcctcaagcgagcccaattcatgttggccacagacacgaggggccgggaagcttgggcatgtcctagtgaactgaaccggtcctttctgaatggttgtcatttccttcctctgcttcctttagcacaggaaagccaccaaggagccgcctacgccagcacatccatcacccaga

SEQ ID NO: 272 - DNA, 493 bp, Homo Sapiens
ggcagccccaagcatcagcgagggctggaagccttcactgtgaagccctttatagaaagccgcggttggcagcccccgctcctgcatgggaacaaattaacattggcattccaaacacaggaaaggaaggaaattggaaacacagtttatacttggccagccctttgaaatactgtaccatgctaccgacatcaattaatgaaaagcagggttgtgtgagaggctctggtttggaaatgcattaacacacgttcaacatgtttgcacaggaaccggattatatgcaccctggctccaaaacaataaagcaattaccctaaagctggtgctctcggagttgtcattaattcaatccactccacgcggatcagcacaggctttgcgcggctccccacaatgccttccgacacaaatgttgaaaaggcggtattgcacatgcttgcctgagtttcgcataagtaagtgtcaaacttcatgcactctaatatccccc

SEQ ID NO: 273 - DNA, 396 bp, Homo Sapiens
tataaaagcaagaaaagccagtgtgggctaggaggaggccggggagtctgggccgaaaacagtttatgagcaagtgttttgaaatcccgctttaaataagccggtaaatgaattcaaccttgtcagatctctctcccctcacgcagaccaaatattccgctggcgtgctgtctagacacagataacaaaggactttttacagcgcacagagacgcgctgacaaagtagccatttaaagatgcagtattgctttctcggcctaaaacgatttgtcagatggacttaaatgaaaatgctaagttatcggtctggtttggggtctgctggtggactggctggggggagggggctggctgctccagagaactagaaaccatcatctgtgattgggctgcc

SEQ ID NO: 274 - DNA, 500 bp, Homo Sapiens
gaaccagctgcagctgggattctctgcagccttccccgcagcaagctggggtagccatgagccctgcctgtccaacgtggggtcaggcgggcatgcctgctgtgtctggcagccttgacacccccagattctgctggaagatgctcgtggcctgaaagctcattttgtagtcgctctaccctgggatgcagcttctgcactggcaggattaacgcaaacagaatctgcttggctcattcctcgccgggcctcaacaggcctgcaacgccactgtctgccagggagagccactcggtgatactgttaattaaaaccatgactctgggggcaagaaaaaattttaaaacgctgaagtcatcttccctaatagaaatcttattttgaaggtgctcacggaggtcaggctgaccagaaaaacccacaagccataaataagctcaaatagttttatttaatttacttaactcggtgcctggagtcctcatggggagaggtgcctg

SEQ ID NO: 275 - DNA, 495 bp, Homo Sapiens
gcccagctctatgaaggctctgcacaagctagtcccctctctccgctatttgatggaataatagatccataggagaattcatttgcaactctaagccccgagttaaagacgtctcaagggatgaacgtgggtgatttgtggaacactgcgatgcatttatgagatagattgcacgttcaccgcggcgctcaaagaaaccagatcgggttgcattagaggcggtgctgtaatccggctgtcctctgggaaagaatgcaagcttccagtgtgcgaagtatgaggggctgcagaggaaattgctttggtggctctggtcctgggagcaagtacctgcttctcgttcatttaagcacattagcgagcttcataaacacttaagtggctcacgagatgcttcacttccaggcctcgccccacctcctccgctgtcacacagaggccaccagaaaccacggtcttctgggtttgacagccaggcagacaggaccaggccag

SEQ ID NO: 276 - DNA, 500 bp, Homo Sapiens
ggccaacaaagcttggctggccctcgcgggctgtgtaggagcccaccctagggaggtacccagagacatccctggtttggctctgccgggaaagtgggccgagcagggagagggggaccagagaggaagagatggacagagttttccggacggtgggctgggtccgaggcccgcggaccgtccgaggggggcctctgggttcgaggccgcccgcaccgaccagtgctgtggctcgggcagttcaccgccctctcgggcctcagtttcccgccctggcagacctcgaggcggcctcggagatcccgggcctggcgaatactgggcggggaggggcgttaactccagcctcccgggcggggtctcccggctcccgcggccacgttgcagcccaggcggaggcgcgggatctcgagctgggatcgccctcttgggcttcggtgcgatcggcggcgggaggtgagagtgggcccggcgggctccgggaggaggtggccccaggg

SEQ ID NO: 277 - DNA, 433 bp, Homo Sapiens
aggtgcctcctctggacctgggctggacggacactggtttctaccgcggcgtgagccgggtcacgctcttcacccacccgcccaaggacgagaaggcgccgcacctcaagcaggtggtcaggcagatgatccaacaggcccagaaggtaggcccccgccttcgcccccacaccgctgggacctcggccccagtcccctggaccgggccccacctcccaggcagggcccggggcaggccgccctgagcaccctctggaaaatgggccccaacccgcccctacttcctggggctgcagtgaggcctgtagagcgaatggctgggaacgtgtttggcaaattacaaggtgctggacagatgtcagccgtcggtattccagcgttcagaggcactggctctgctctgtacttctgaaacttccctgtccagccttcc

SEQ ID NO: 278 - DNA, 339 bp, Homo Sapiens
gcagcagagagctgctgaaccctgaacgcgaggcagggaagaaagttgaagcatctgctatctataaatcaaaatgaatttactcttcctctaaggacagccgctgtaataggccgcagccaacaggtcccatggtgtgatttctgcgcaggaagccactgctcacaccgggtgtggaagcatttgtaacccccaggggacctgctgctccacagaacccgacggaaagctcgaggaaggccgagcttcgggggtcacaggccggatgccggagctgctccatgggtggtgcccgagggagccctgggaggagccgtcagcccaggcagtgggtggaga

SEQ ID NO: 279 - DNA, 444 bp, Homo Sapiens
tgcagcctgaggaattctgatcctttggtgatttccagaagcctctggacgcagctgtccgtgaggcggatctgcccgtcgccggcctcggggctggacgacacgcccggagtcccagggaggccgcgaggagcctgcccctcggccaggaagtgaccgctgtctgcgtcgcggcccttaaggacaacccctgggcggcaaccatcttcctccacccaggagatcaatttctttgttgaggttccacctaaggctgtagcactcactcactgaggttcctaagaaacctgcctgtcctaggaaacctcctactgagacctgccccgcactgccacctggtggtaagatataaaaacacaccctccacggtgggatcagattgcgcgcctgctccgcccccaccccgccctctccccggtggtggggtagagggatggtggaaag

SEQ ID NO: 280 - DNA, 414 bp, Homo Sapiens
aggtgcacagggtgagacactcaggaaccctgctgctcaggagaattttaggccaatgacctgccggcccctgattagcccctgatgttgctctgtgtcaggcagcgcgccaggcagatgaccccctctttgaccccaggagaggctggagtaagcgtgtctccagccaggacgtgcaaatggcatgcagtggaggaagccagggagcatgaattgctgggacccagctgtctgttctggaagagggcatttttcccccctgcccatgttaactttatccttagcttgtacccagaactccaccgctgtctatcggttgggcagacagaggctgccttgcctggctgccaacacgaaatggcattttgctcgaggtgttcctcctccctcgcctttccctgcctctaaattcag

SEQ ID NO: 281 - DNA, 440 bp, Homo Sapiens
aggaaaaaggtgggtcagtccaggatgccaagcaaagggagagttgagacccacaaactggaataacttgaataacgagtggatcagctgaggtcaggagttcaagactaacctggccaacatggtgaaaccccatttactgaaaatacaaaaaattagccaggcatggtggtgtgcatctgtagtcccagctactcgggaggctgaggcacgagaatcgcttgaacctgggaggtggaggttgcagtgaggcaagatcataccactacactccagcctgggcgacagaaattctgtcaaaaaaaaaaaagaagaagaagaaagaaaagaaaagaggagaatttcctgatgaagcataagtgtctggtccgaatgataacagcattctgactttcttgtttacacatctatcccttatgaatttgttcagtgtgtattga

SEQ ID NO: 282 - DNA, 382 bp, Homo Sapiens
tgagtggctgtggatgctcaaggacttacgatttctgactttataaagtttagggtgaaaacaaaaaacaaaataaggagaccattgttttaaagtggccgttgtagctaattatctcaagaaagcaaacaggctggtactgaaagttacacaggcgggcggctccctgggagggttgcccagctctccttttctgagacctgagcagggagcagccagaggagcttgaagggatggtgttcagggcatgggaacaggctgcacacatcttcacggagtacggtgcttgtccagtttgagaagggaaagaaacgggagcagagggctgatgagaaggcagcagatggatagtgcgggattgaaaaggggatccatttgaaga

SEQ ID NO: 283 - DNA, 303 bp, Homo Sapiens
gataaatatgctggttgggtagacaggcagtccttatgcttttggctgacgtagatgttacgtactatttcatgtgttatcacactctccagtaaacacgtaacataagagaataattaaccactatcaagcgttctcatcttgagacaggaagatgtagaggaaagaccttgatgtgtgtgtcagttacaaggatgtacaccagtgactgacatgacttggtgcaaatcttgggtagagacctatacttaagctcctcacccccacctgccgaggcgtaagggctcagagggggttccatgg

SEQ ID NO: 284 - DNA, 496 bp, Homo Sapiens
gggcccagagctggcaggtgccctggcagggacaggtctggtgcccgcgcctgctcgctggaccgcccgccccgcgctctggcggctcctcccgggcgatgcctccgctctgggccctgctggccctcggctgcctgcggttcggctcgggtaggcggtgaagggcaggagggggctgagcccagaaagagcgggcagctctgccctggggcgcccgccgcctggaccctgattcctggcgctggggacccagatattactgttatgaataatagtgatagccaacgtttacgggcctcctctgttgggaatccgagggctcacagatggctgcagccctgcgatgtgtgttgcaagagaccaacatgcaggggggctgcggtaggacagagaagggactagccccagccccatggtgacgcctggacgggggcagatagagagatatttcggccgaggaagcagcatgggcaagttcatggaggggagacaatat

SEQ ID NO: 285 - DNA, 499 bp, Homo Sapiens
actgcaaggcttggggtgacagtttcctggtcattcttcccagtttttttgtgtctttatagctagagatgactaaagcccacctccaagaaaacagcaagtcacgtacaactgaagcccatgggggcaggatgctgttctctccaccggggcaatccaagcacctgagtgtctgacaccacccatcacccaggggatccgagctgaattctaaagactggaaccaaagatgacagagtgcgtggctggagagagggggaagtccacagagtttaggtaaatttctgaaccacatccccaccacgcccacaatgtactgcattgaagtacaccggaagctaaagaccaaaaaggaatcagattttcagctctgccacctaaagcagaaactgagggccttattcaccgcacagactttagcccaagtgccatgcctccagtttcacagtttcaccagcagctcaagcaaaatggcctggacactaaagatggcctctgg

SEQ ID NO: 286 - DNA, 499 bp, Homo Sapiens
tggcatgcttgaaaagtactgtgacggctgaattttgtgggcttggggagattgcagattctctgatttcaaggggaatgatgtgatcctagagttgcaaagaacaagtgacagtggaggcgcttatgctttgtgactgcactagagacaaggaagacacaactagaataatggggagcaggaatggagcggccaacagaatatgtgactgttagggatctttgatgaaggctgattctcagggagtgaactagatcagtgaccaactatttgtctttatataactgggtaatgtggatggattctaataaagggactacttacagcacagcaggaaagtcacaaagaaaccagacagaagagtgtaagtagtaaggggccaagcagtcacctgactagagacagtgccagcttgccaagaaggcaccagacagaagctgtgatcttcagcaaagggacacagtctgcctgtgctgaccctgcaggggcagaggtgggg

SEQ ID NO: 287 - DNA, 279 bp, Homo Sapiens
aagtctcactggacacaggcaggcaaaccctcaccgggcacttgattcttgcaccaggttttagcgtggacgttgctaagccagcatgtggcttcgcacatgtggagtcttacagttactctgaagcaagccctgggaccccgaatctgaccccgaagttcttgctgggctgactccctactcggtgttgacttgaccttacacgggagtcagtgtagtcatgggctcggaaagcactcagataaaaggtgctccacccagtgatgaagaatgtgttga

SEQ ID NO: 288 - DNA, 443 bp, Homo Sapiens
ggcccagggtagctgaaatggacctttaatctggagtcagagtccccaccatctccacagtacccatgagggctaacgtttcacttctctagcatagaacatggactcctagccttcaaccacgagactgggttcagggcggtcaccctgaagctttccataacttcccctctatggccttgggcagggacttactcttggcttttttgaaaccacaatataaattaagtagggaacatcgaagctttcagataccagagattttaggttgactgacaggctccagaaagtgagggaaggagagaggactggagctgggatcccacctcagccccagccctacagacagcagccatgtagagggtgtctgcagagccacatcccgggtttgtggttgtggggtaagaaagacagatgtctggctgcctggttggggactacag

SEQ ID NO: 289 - DNA, 480 bp, Homo Sapiens
gtctgcctggagtggctcatacccccttccgttgacctcagttgatgtttatcttcctggtgatttgtgaggcgtttctagaatttatgaggtcaggggtcaagtgagaggttgtaggtcacaagtccatcaagaggccaaggcagatgaaagggaagcgcctctgtctgccaacccaccagctctgtgacctgccttccacctccacccacaggaagctcaggcaggagtgaagccggctcggggagcggcagtgaaggctgcagacggcgaacacgcacagggcaacctccttcccccgggacacaccggcctcttgttccaagggaggactggctcaatcctgaccccgtccactttaaatacgggtatgcagcaacacagaatagatttaagaacacaaacaccctgctagttgtaataaagacaaaaacgtctaaagttaaaaatcaaacaaacaaatggaaatgaggaagcctg

SEQ ID NO: 290 - DNA, 487 bp, Homo Sapiens
cccaggcaggggtcagcatggccggggtccctctgtctgagcccaggattcgtgcaacaccaggaagacaacagttgaaggttccttagtgagctaagggaagtatacacaaacttactacataaacattagaaagtgctgtccgtaaaaaacacgtcttcacagagccaacaagcagagaaatagctgcccagtgttaggaagtgcatcatgatccagaggttcagcccgtgtgcagcgcacagacctgaggccccagagagaccgaggacgcagaccagtggcacgacggaaacgcagaacgtttatgagaaaactttcctactaattgagataaagctgtaaagaggcagatagccccactgggtgtgtacgtttgaaacttgtgccccctgggctagggcattcggggtgtggccctcagtcccctgtagctgctgcctggaaaccgctgccacccacccacctcctccctctgctcttccac

SEQ ID NO: 291 - DNA, 429 bp, Homo Sapiens
tgggactcttgagatgagatcacagctgcagagcacacagcacagggaggagctcatcagcatcttcccacctgtggtgccctggcccagcctccttccggttggggttggacccgccctggcagccaggttttgcgtcacctgccccacccgccctgtaacctacttgcccaactgctatcccggtggccgtgaggccagttgacagaatggagaggggtaagcattttccgcctggagaggatgggcgtgtggccatctgactgcttctgcaagcctggtggttgtgtgcaggctgccctggtggtcttagccccttggggcaggcggggtcctgtgcaggatgcagagactgggcgtggcttcctgcagatgttcagatgcttctgggctgtggcctctgagacccagggcaaggctgctgactgg

SEQ ID NO: 292 - DNA, 267 bp, Homo Sapiens
tctcagaaggaaggcaacaaggaacggttccgcagtctgtctcgggcgctgtgcccagcgcacattccaggcctcatcactgaacagctgagcctgagaccccacttctcaccagccaaccccgacgagtggactcagatgacaacatgccacttacaagggacacagctaggtgttgtgttggcttcagttaacgatcctgctagcagcccctaggaagcagcctatccccaaaagcacgaggcctgggatggcctcacagagcag

SEQ ID NO: 293 - DNA, 426 bp, Homo Sapiens
tatcccagccacttctgaccacaaggctgttctcagaaggaaggcagtagagaatggttctacactgtccgattcgggcgctgtacccagcgctcactctgagcctcatcaacgaacagctgggcctgaaaccacttctcccccaggtttgcacagcaactcaagccaccgcaaagctcacctttgtagcctttgcccttggtcaccccgatgacgtcgatcatctcatcctgcccaaacacttggttcacaggtacctgctgctcaagcctctcgcgggcccagtccagcttctcggccacagtgcctccgttcacctggatctccatcaggtgggccttcttctggcgcagaggaagcaggcgcatctaggagaaggtagacacagctcagctccagctgccagcgctcctcccacagcagagg

SEQ ID NO: 294 - DNA, 306 bp, Homo Sapiens
ctccagtgcagagttccttggggacattatggccactcctgtccagatgagagggagccggctgcctgtgacagcgtcgcaaaatgccgccagggctttccctccctcctcctttctctcttcctcgtccctctctggttggtggtttcctgcaggctcccgtccctgctggtgctggccacaatgtccccactcccagggtttcggcgtcccagccccctgcgcccaccgcgcctgcccgccagaatccctgtgcccttggtgcgtgtggcctgccgagcctcgagcccctgttctcctcagccc

SEQ ID NO: 295 - DNA, 473 bp, Homo Sapiens
gggcagcctggatggtgttctgaccccaatccccccagggggctcctagtcaagggtcttccctgcatggaacccccaaagccagtaagaaatagaagcttcctgaacattgctaacgtcctgaatatccagcatccacgaaacccaagcgaactagttaaaaataaaaacgtggtgatgatcatttgctgtgggtttaatccaatttgaggatttacttaaaataaaaccttggggaatgaaaacagaagtcagtagcacacctccagggctagtagggagcacatttgcccagcacctgagtccttgccaggtgccagaccctgttcctgacagctgtgctgggcgtgcgcacacaagccccgggcggaggccagggctgcacttagcgcatatgagatgctacgtgggactggaaatgcctcctgcgctcccttgagttacatgaaactactgagaagttcttgatctgg

SEQ ID NO: 296 - DNA, 498 bp, Homo Sapiens
acatggtttgtctggtaactgcccgtggagaacccgtcaccatatatatgcagagtagaaggtgtgattaatgcgctcttaaatattattagcattgttgccgtgattttgaggagtttcccaacactaacgagggactgatttttccagccctacacaaacagggaatctaagaagtgggtatatggggccagggtatttaaaactctaaggagttccagaaaatgcacaatttttgtctcagattcattttctcactggttggcgttgtaacacatctagccgttgagggaatttctgccagctgccgcggccactttctctttcctgaacggcacccaagaccaccctcctaaattccgcaggcaaatctctcactgcccactggagaatgagccatcccacagggggacgcccactcctctccacttcatgcaacgtgtcatccccctcccctcacaggttcccgatgcttcctgtgcaggaggagaagcatct

SEQ ID NO: 297 - DNA, 460 bp, Homo Sapiens
agagcaatttggggtgagcccacaaggtggcggccagccactcacccctctacaccccgtggccatccccaggtgagctgagcgaagtccctggctccgtcacaccttttaaggcaaaggcagctcccgccaccacctccctgttcccacttgctcagaaattcccagcaggtattttttctttttttcaggaggaatggaatgggacttcttgttctgtcaccgcaggattccggcgaggcctgtctaggggttctggtgagagaaaagcgtgacaggaagcgcatgccagcaggcacttggagatgtacccttggtgacatgcacaggcacggcagccgccccacccaccacaggcctccgctcgggacagcggggcacacgcacaatacagacgaggcccagagatgcagagacccccaacaaaccttctccatgctagggagacaggagatccagc

SEQ ID NO: 298 - DNA, 300 bp, Homo Sapiens
ggtggagcccatgtgcagtgaaggctcagcctgcgtcagggacgctgggatggagtgaggcggcaagctcaggtgcttcccacgctctgaagcttcctgtctgagcccggaagtgaggtatgtggttggtgcctcctgcaggctttcctgactcctgccagacagggcccagccaagaaacaagaccaggaaaccaggcgtctacacagagattttgttattatttgaggcccatcatctcctcggtgcccactaaatattagtcagtgtggttcccatggtttgtctcaaggaatagag

SEQ ID NO: 299 - DNA, 300 bp, Homo Sapiens
aggaaggcagtagagaatggttctacactgtccgattcgggcgctgtacccagcgctcactctgagcctcatcaacgaacagctgggcctgaaaccacttctcccccaggtttgcacagcaactcaagccaccgcaaagctcacctttgtagcctttgcccttggtcaccccgatgacgtcgatcatctcatcctgcccaaacacttggttcacaggtacctgctgctcaagcctctcgcgggcccagtccagcttctcggccacagtgcctccgttcacctggatctccatcaggtggg

SEQ ID NO: 300 - DNA, 487 bp, Homo Sapiens
ctgtcagagaacaaagagtgggcttgtcacactgttttctcccaagagggtccatctgcctccgctcctttggtacacgctaggggacacacactgtccagcatattcttgcagagtcatatcttaccccacatcttatcacaaccctgctgaatgtcaggcactatcaagaaaatgttcactcatcttcttcccgttatgcccaatgtgtgaactgataacacatctaaattcaaagaaaatcaacagacatcacctcaatcaacctgaaaagtctggtgactcattcccacccttctcacggggctcctgctgggctgcctggttctccggaaccagcctccaggcctcctgcagccggggtgcagctcagtgttcgagccccctctctgctgcccatcagatgagtgttgactttctttggcacaggcatttgagttgcatttgaattgcagaacatgctgcccccattctgtgctgactgtga

SEQ ID NO: 301 - DNA, 435 bp, Homo Sapiens
tgagaagagcagagggtggcttcccaggcggctgcgtagcacagagcagaaggccacgttggtgttaacctccccagaggggtctggggagcttccaggtttgtctgcacaaggagagaagcagcagcaggcgtggcgggctctcaacctctgggaaggggaagggggctatgaagcaggggcaactcacctgcacacatgtactgctcaaatttgtatcccatgtacataagctcccggaggagcggtggccgagcaagcctctgggcccgagcgttcggtgtctccacttcactcaggtatagtgttccctggaaccgggaggctgccagctgccagccctcctgccgctcatacggtgtcgtcagcagttttgtcaggtgcccccgccacgtcactatggcctctgccagccagcctggacccctgagaggc

SEQ ID NO: 302 - DNA, 476 bp, Homo Sapiens
ctctgaatttgggctattcaggtagtgtgctcaaagttgaaaccgcatacagcacaactcaagtttgcatcagactgggaagcgaacttaagccagcggtgcgtggcccaggagtgggaaaggaaatggatgcctgaagtggaagaggtggtgcagagggggcaccgcccatgctgccctgcttccaactgctgcgcatagggggcggcaggggcggtgatctctacaccttccacccccccgccggggctggctgcacctatcgcttgggccacagggccgacctgtgtgatgtggccctgcggccccagcaggagcctggcctcatctctgggatccacgccgaactgcatgccgagccccggggtgatgactggagggtcagcctggaagaccacagcagccaaggtgagcattaagcagggcagctttgcccctgggtggttgaagcgccaggctggaatgagtaaggtctc

SEQ ID NO: 303 - DNA, 460 bp, Homo Sapiens
tgcttctgcagctgaagctggagctgccgttcgaccgggtggtcaccatcggcaccgtgctggtgcccatcctgctggtcaccctggtcttcaccaagaacttcgcaggtgaggccggcggccggggcgcggggcgcgggcagagggggcgtccgcaggtgtccgggagctggcgcttcccgcgtccccggcggctccgtccagccgcgcccaccgtggcctggctgcgtccgcggcgtcccaggcaccttccacagccgcccccatcctagcaggtgtcgctggtcgcacagacccctcgtctctattttattgttgttcttccttccattcgtccgcccatggccgcgggtgggactaggcctgtctggacccaggggtcccaaatgtcatgagacacggggtctggtttggagaatgtcacaagcagcgcctgaggggatgcagggtggccaggtgg

SEQ ID NO: 304 - DNA, 474 bp, Homo Sapiens
ccctgtacctgggaaagaggcacgtagcaataattcctctctcctgaagtcagtcaggacatttttgctggagtcgacgtctgtgtggacagggccagcacgtgagttgggctgaatttgccagttgatttatgtttaagtgtgaacaccccaacccccgacacgaaagctcatccttctccctatttttagggtggattagtggcacctgcctcatctcctctcaccctcctaggaagcacaagtggcggtgtcatgtgcacgctgagttgtagcttttgtcgttccaccgagctttcattggattgccaaggaaagggtcttaggagaccgaggtgtggtgggcgagtttgcccgctggccgtgaaccttgggtttggtgtgagtgggccagggagggaggccttgatttcttactcaggcaggctcgggagggcttggattgggacagcagggtggaatgacagctaatga

SEQ ID NO: 305 - DNA, 293 bp, Homo Sapiens
aggcctccccctgtgacagaccgggcggggccaggaggaggggcagggcgggcatcccggtccgaagacccaggaactgctctggcctggcctggggtctacacctgacgcctggcgagggttggcttcgggtctggtcccaccgggcctgggagggacgggcggctggaaataaatggcccctctcagttccaggcaggacgctttaagggacgaaagttcagcaaaccccaaggcccatctccttgacaaccaccaataagagctccttttttcttctcctgctctccagg

SEQ ID NO: 306 - DNA, 265 bp, Homo Sapiens
tggagcccaccctcccttgcccgcaccgcgggacctcacagccggtggggcgggggagtcccacgagggctgctagggaggggttgctgattgccccaccgcccctgattcccccagccaagcctctcaatgtccctcgggctgcagatggtgggcgttgctgcctcctctcaccgcccgccctggaggcagcgctgggacaaccctgtcccccacgccctctactgccgccaacgcccccattcatcccactgtggactgacct

SEQ ID NO: 307 - DNA, 401 bp, Homo Sapiens
gtccctgagacagacagaaatgtggccttccctagagagagagacagacgtttttcccgcccccctgcaatccattgggaggaaagggatggagggtcggggcggggaagaggcgcggccccctctttacctagagggtgtgcacagagacacaggcacgtagaagtctgtgaaccgcagccctcccgccgccagctggtccaggttgggagtggtagagctggggtgcccatagcagcccaggtccccatagccgaggtcgtcggcaaagatcagcacgatgttgggcggacgggcaacggccaggccagcagccagggccaggaggagggaccgcggtgcccccatggacatgggaccgaggggtctgtcccaagagagggagggctacttggctccag

SEQ ID NO: 308 - DNA, 493 bp, Homo Sapiens; identical to SEQ ID NO: 17

SEQ ID NO: 309 - DNA, 499 bp, Homo Sapiens
acctgcaagtgtcacatcccactgggtgaaactctaagatcccttttaggggatcccattcgctccctcccttccgccaccatgcagcgccgagaaacagagctctgaacgaaccctcagatgtccgtgcgctggggcctttccaggacggcggcgcccagtcgtttctgggtcagggcgacgcctggaactgggcagggtccctggcaccgggatcccgaaaagcagacctgcttctccctgtccagccggttccccttccccttgcagtcggccccctgcatccgcgtcctccctgccagtcgagggtccccagctccaactccaccctcccagctgtgcgttcatagcgaccgccctccctgtagggacgcacggatctggtggtggagtcttggccggcaggactggacaggaaccgaaggggcgaggcgggtccgggggtggtgcgctccaattgggtgctgtccccagggggtggggcctgatcccctatttc

SEQ ID NO: 310 - DNA, 299 bp, Homo Sapiens
gctctgcagaggtgcaggggcacctcattcagaaggggccatttattggccctctgtggctaaaaccagctccaagcaggactttttatggctggagtcgcctccaaaggggcgtcggcctccactcaggtgtgactctgagcgttgcctagctgaaaaggcgtgatgatagggagcacacgtgaggccattcgggaagaatattttgccaagtgcagaggccgtaaaaacgtggaacatggctctgttttttatgctctattgaaaatgatcatcagaagcagaaactgggcttgtgt

SEQ ID NO: 311 - DNA, 270 bp, Homo Sapiens
tttttggttcctccctgccatgcaatcgtaccgggagggtggagtgttggtgttctcagcccatttaatttggatggagctgcgggctcatcagtttggggactggcttcatcgcttgttctgtccagcagtcgcgtcttctcggactccttgttccagcttgaattcctcttttgccctggctccactctaagacgaagactgtgtaattcagaaaatgcagcgcaagtaattatgtccagtgtgatgctaaacatttcccaaaggcag

SEQ ID NO: 312 - DNA, 471 bp, Homo Sapiens
ggagctctgtgcagcacctgggccccttctgtgtgtgtgtgcaccgggcacggaggcatccccccttcctgtcggagcccagcttgtgcggacgtagtgcacacccggtacaggaagcagagtcggagatgttggcattgccagctgtgccgcccctagggcgctttattttaacctcccagagtggatcatcctttattgcaagtagaaataaagcttggttaaaggcttatcgtacaaaccagcagaaaacgctcgcagttgctgacctgggaagtggctcctgaatgtttacaaaacctggctctgagcagcagcgaagtcagcacatgcccgagcggcccccagcaggcgcgcagaagccgcgccgccctcgggaagcagggtcagaggccaaggactgtgaaaagcttccacccccagcatcaatcatgccaggcagactgtctgggggatgctcattttgaaagt

SEQ ID NO: 313 - DNA, 343 bp, Homo Sapiens
cccaccatcaccttgtactcccctgcttccaccctcgccccctactcagcagagagagtgagtccattacaaacataagtcatcccagctgcctccttgagaacctcctatggccacctgttcttcgtcaaataaaatccacagtcccgaccgcggcctagggaccccatgtaacgagcctcagcctgcgcttccgccactcggccctcttctcgttctaaagcaccagggcctccatctgaaactcaccggtgccgcgagtccctagcaggccactccgggtccccctcttcaccttcagcctggttaggcatcccctgctctggcagccttctccagagcc

SEQ ID NO: 314 - DNA, 399 bp, Homo Sapiens
cagaagtgggtctggcccatcttgaagactctcttctgctgtggcatttcctggtgctggaggaatgagtgtcagctggtgctctctgtctggtctgaaaggttgatatgaattgtgcacttgattttggcagttgactgtgctgattctccagccctaattataatgagcatgagcatgaatgtcttgaaatatagacgcatacgagctgccaaatacggtgagtcatcatattcccaactttcaggcaagcttaggtgccaggggaagcgacctatacatcaaagagatgaagtcctggtttctgcgggcgggggcggggagagggctggggagctgttggctctggggtgggagcgcatattcctgtctgtcagatcagaggatgcctgagaggtg

SEQ ID NO: 315 - DNA, 431 bp, Homo Sapiens; identical to SEQ ID NO: 10

SEQ ID NO: 316 - DNA, 497 bp, Homo Sapiens
gactgggcatgggaggaggctcctggggagtcagtgccctccagagcccaggctcgtgggtgagctgagcagagggagccgctgccggatcccttcggtgcccgccccgtgcctgactccgagggaccccactggctgctgcccttgcagctgcgaccatggacaggtcccagccttagactggctgctctttaaagtgaggggaggggtcttgtctggtaaagtcagaaggacaattaagctgcaaagctttctgtgcttccctgggaaaaagagtgggtctttcacccacgtgccaggccacgcacatggtactactggaggtccccacacgcagacttgagccagtgccactcagggtgtctccgtgatcaaggactcacacacaaccacacacagaacccagaggcaaattgaaaccaaaaacgggccaattatccaaacattcaggcaaaaccattatgctcataaatgagtcaccaggccaatgtggggtc

SEQ ID NO: 317 - DNA, 272 bp, Homo Sapiens
aacagaggtggctgcttgctctttaagccagcttggccttgcctggcatgcacaggccccggggaccgacatgctgctctgactgagaccgtcctgactttgtcaaattctacgtctggcctgggccacagaagcacaagtcccctgggtggtaccactggctgctttctggactggaacataaagtcctcctcaagatgacctgtggtctgcctcttggcaaccaacaagcccgcagtgtcatacgacccatgagacatggactgaaggcc

SEQ ID NO: 318 - DNA, 313 bp, Homo Sapiens
agagttgctctctctgtcccacctggggctccagggcgctgcagtccgtcaccagagggaccagatgctcgtggccctccaagggcttagtgtggagctactcacccccatcagcacagagaagacccacgtcttgtggctgaagcaggggggcagtctcttcgacagctgcaggtcgctcggcttcgcgtctggggcatagctggcggggtcttgccggccccgctccagcgtgggcatccggtcataggccagctcctctctgaatggctcctgggtcatggcacttggggacaccacagctgtgctgaat

SEQ ID NO: 319 - DNA, 492 bp, Homo Sapiens
tcaaggaccccaaccctggggggccccgccctcccacctgcctataccaggcattgcccaccttactgggcgggcgctgcccgatgccctcccccaggactctctctgccagacccagcagcagcagcccctggaggggaacgccgctttacttctcactgtcctcaggcctgcggctcacagtggggccacgccctctgagcttggctcccacagccgctctggcccgcccagctcctccacttgccggagcaggagcagcacaaacgctggagttgcccagccctgggcagacctcggccctgcacacgcgctgcctgtccacgcggagtccccggcctctctgggtgacaaatggggctctccctggtcctccaagatgaagttgaagattgtggccctccttgggcctgccgggggtatgtgggcctggcagctgcctctgcataccctaagggccggtttaggggaggcctagaggaaagaggaggt

SEQ ID NO: 320 - DNA, 410 bp, Homo Sapiens
agagtatgaatctggcaggggctcctggaatcgcatgtgttgcctgcttgcgtttttaagtgttgtccctggagtgaatcagagcctgcaggcggaccgcaccacaggctgtggtggaaccacctccaggcctatggcagctggacccacagacagttgagaggacaattgctccctttcagtggcgagccctggcctcacctcctaagagctgggtcgattttagagcagggctttggaaagggtttgtctttgggaagagtttgcgaatgtctggagactgggcaggcaagagtcttttcaaagctggtcagtcttggaaaaatggcaccgggctcctgggctacctggaaattaccatctgtctttactctgcaaagcagggacaggagggaaatgtcaagcaaaaa

SEQ ID NO: 321 - DNA, 327 bp, Homo Sapiens
cctcctagggtctccagtgcagagttccttggggacattatggccactcctgtccagatgagagggagccggctgcctgtgacagcgtcgcaaaatgccgccagggctttccctccctcctcctttctctcttcctcgtccctctctggttggtggtttcctgcaggctcccgtccctgctggtgctggccacaatgtccccactcccagggtttcggcgtcccagccccctgcgcccaccgcgcctgcccgccagaatccctgtgcccttggtgcgtgtggcctgccgagcctcgagcccctgttctcctcagccctctttcctcc

SEQ ID NO: 322 - DNA, 426 bp, Homo Sapiens
ggagataaactcacagtggcccagacccacatgacccagtggatgggcaccgtgaggaggtccttccaggaagccctcaatttggtgaccaccacggtgggccacgaacggacgagtgcagagtcggccagccggacccccttcaagcgtacttcctccttccgacacctggcttcccggagtcgggaatccttccgccgcttctctgctcgcagccaacagagattttcttcactgaggaaaaggcatacagattcggaaccgccagatattgtaagcttattatgttttaaaaaatattaaaacaacactgaaagctcctcccctccagtcctcccagggagggggtcccagacatcaaaccggggaagttacttcttccagaatagttgtcagtcaaagcccaggcacttcctgtcccctgta

SEQ ID NO: 323 - DNA, 397 bp, Homo Sapiens
gggccctaggacctgccaggtccacggaagtggtccttgtaactctctccctggtggcagcctctggtgcattccggcaggggcagcccctcctcatcacagggaccctgtgtgccaggccccagctgcgttgccgctgaattatggatttaatagcagagaagccttgcaggccgcctgtgctggctcgggaaaccggggcccagccggggcctgtcacggtcctggtgccgccctgcttcctgtcggcgccacggagcaagcggagagatttatcttcccggctttaagaggtactaacggaggaggctgagaggcaggagctgaataattgatggccttctctggctcaggatctgctgaaaatgacacggtgcaaggcagaggggctgagagt

SEQ ID NO: 324 - DNA, 354 bp, Homo Sapiens
gtgtctcactctctgacctttgccaagtcgtcttcagcagcagctggaactctttgaagtggctgccacagatgttggcaaagcccggcctgggatgcctccaccctgcaccaggcacggggctgcctctgctgcatattcacctggaaatcatccacatgccaagcaccgcagaggcaaggggagtctgccattggactgcgttcaacacggctgcagggatacagacaagcacattccctggcagaggcacgggcccggctggctggagctgcagcagctgtgtgtggtcacagagcttccaaatgagggagatggatggcctcgcttcacagtgtgcccagagcatgtcca

SEQ ID NO: 325 - DNA, 382 bp, Homo Sapiens
cctctgcagagggtggggaagaaaaggatgcctggggcagtccagccccacggtgtggtggggtcaggggctgtgtccaccatggacttgactcctcccctccttgtgatcctgtctcactgtacgtgtcgggacgggcctcaaagaccagcctacatcagaaactttgactgaggcccctgagaaatgttaccctgaactctgccttagtatctggatgtgtcttttcacctgatagagttataaagattttcccagttaaaaacaaaagcaaagctctgccagactcgtgttcgtggctccaaatctgcttcagccactgagcaggagctgagagggaagagagagagaagaacacaagatccatatggggaaggatttc

SEQ ID NO: 326 - DNA, 369 bp, Homo Sapiens
cagagacaggtccctgggaattagctgcgccgggcgggatgaaagccgctctgatgttctggagcgagagagtagagagaaggaggaagacagacactacctgccagtcgcagggtcccgggcagcagcagcacgccaaggaggagccagggggctgcggggagcccaggagggcgtgggaggcctggcagggcccgccacctcacaggctggttctccatctgggggcctgcttgtctgcggcgactctttagttcacaggaggggacggccggcgctgacagcttcccctttgctttccccacgaagctcctccctggcagcccctgaccttccgctcagaagcaaagctggaacagcccagcaggg

SEQ ID NO: 327 - DNA, 425 bp, Homo Sapiens
ccagaatgaggtaggaggtggaggggctgccctgggcgtctgggggctgccagggactgagccctgagccagcctgagactcaggaaaccccgtcaggagggagaagggagaagcagactctggacaccagaaagccaggggaagggtcacaaaaggagtggatgtgacggaagggcgggctcctgggtctcttcagaacatatcccctgtgcccagggggatcagaggggcagagtccactgcgtgaaagccccactgctatgaccaggtagccgggacgtggggtggatgccagaaaagactccacggaataagagagagcccaggacagcaggcaggctctccgatccccccaggcccttgccccatacacgggctccagaacacacatttggctggaacagcctgagggaccaaaaggccc

SEQ ID NO: 328 - DNA, 425 bp, Homo Sapiens; identical to SEQ ID NO: 327

SEQ ID NO: 329 - DNA, 473 bp, Homo Sapiens
gggattgttatcacatgggctgtggggaggcagagctcccctgtgtccccgagagcacccctccccggggccccaccagcccccaactcgcctctcgaattcccacctctccccttgctctgcgcctttggaaacccagacagcggccccactcccgtgattcatccagcaggaatgtgggagttctcgaattgctccagctaaagccttttaattccccttcggtgatgaatgggtgaggccctcaaatgaaatgtggaggctcccagtcccagcccgcggccctccccctcctcggcgtaattatttctgtgcagaacatgtcaagtgccctgcttcccgggaacttgtttcgcatgcaaacatttggtgattaagcgaggcttacttaattaagcactttgtaatgactcttaaaccaaagaacagtggattaggagtccagttcgtgctggtgatgggaaaggcagctt

SEQ ID NO: 330 - DNA, 439 bp, Homo Sapiens
tgtggtgtgaaccaagacatggtgccccctgcccctgtctttcttctgcagggagaggggctattttggtcctgagtacttttaaccccatgtgaaccacgcggacgggtggacagttggagggccagtagcagcagcaggagcctctgcccacttgggggccccgagtgctggcatgatctgactccatggtgtgggcggggtccgggcccacttggaggagcaggatatgtcgtcggaccacagttgggggtgccagactcaggccacgccatatttggtgtcagagcccaagacccaggaatagaaactgtgtatggggccaagttggccgcagcccaatatccaggtgacctcaggcccaaagcatgctcctggcccccgagacgggcctcgcagttgcagcctatgtcctggaccttgtcagctgggcttggca

SEQ ID NO: 331 - DNA, 188 bp, Homo Sapiens
gggtggttgtgatgtgtttctttaagaatggatcctgcaggttcttcttcctcccggtctccggtgccggaaggaggacaccgcgagtgttgcttgtttgcttacagagagtgtgcagcagcagcagcagcagcccggggccagctttgggaggactaaggatatttcagggttttaagccaggggat

SEQ ID NO: 332 - DNA, 449 bp, Homo Sapiens
tcctaggctgagtggttcacaggccagctggccgggggttggggagccacacagggtgaacgggcagcagccggctccatgccccactgccctggctgatgagtccttcggtggcctcagtgtgcacgtctgtctgtccgtctgtgcttgtggctatgagcgtgtgcctccacccaccccacgacccgtgactactgtgcaagctggccaggaggtaggtggagggcaaggccaccagacctggcttcgcgctgtccactgcctctctcctcccctccctgccgcagacacgcaggacccgctcgccctcctgcttacccgtccccacggtgactgagctgcgagagcctgcgctgggctcactccctggcctccgcccctgagctgtcccgtgtcagtccctggcccggagccaggctctctgtgctacttacatctccctcccttgg

SEQ ID NO: 333 - DNA, 488 bp, Homo Sapiens
gactggtgcaggtggccagcagcttaatttgtactgagcgcttactgggtccccacagcgatcctgaactgtgttcctgcccacagtgactcggccggtccgggcatggcagacccagtggcgggcatcgcgggctcggcggccaagagcgtgcggccatttcgctccagtgaggcctacgtggaggccatgaaggaggacctggccgagtggctcaatgccttgtacggcctgggtctcccgggtggtggcgatggcttcctgacagggctggccacgggcacgaccctgtgccaacatgccaacgccgtgaccgaggctgcccgtgcattggcagccgcccgcccggcccgaggtgtggccttccaggcgcacagtgtagtgcctggctccttcatggcgcgcgacaacgtggccaccttcatcggctggtgccgcgtggagctgggtgtgccggaggtgctcatgtttgagactgaggacctggt

SEQ ID NO: 334 - DNA, 355 bp, Homo Sapiens
ccccagggccttcttctcaacccacccccggcccctccaaggctcccactcacgcggacgagccctccagcttgccgtagagccagccgttctgggcctcgggcaccaacacctccaccacgtccccagcggagaagcgcagcagcgtgtggttggcgccctccgagtgggagaccagggcgcggactctcctggcgcccccgccgccgcccgggcgctcgccaaaggagttggagcgcgagctttgggcgctgccgctgtagagcgaggctgtgggcgggagagcgcggcggcacgtgggcaggaagttcttcctggcgtctgccctcgatccctcctgctgcagccccacccc

SEQ ID NO: 335 - DNA, 385 bp, Homo Sapiens
accagtgactacagggcaatttgcagtacctgctgggggctcagcaggtaagatgtcccctgcctgctgctgtctgtcatggctgtctggtggccatggccgggggcgggcttgtcatgctgggaactgctcagaggctgcggccagcctgaggcccctcgccctggcgagccagcccccgagtgcagactgtcgccgatgattcttgcctcctggggcatccgtgcggccatgtgggttgggcaggactggcattctcccctccccaccgttgccatggccaggggcgggcccacctcccgaggctgtgcggagaggaccccaggctgctgcatgtgagcagagcagccggtgtctggcccggacccctctgccatctggggcc

SEQ ID NO: 336 - DNA, 452 bp, Homo Sapiens
gtggagtcttggggtcaccagagaagacacagtccagagaatctgagcaagaaacttcacagtctgagttcagtagctactaagcggagggaaagccccgcttctccgtgaaattaaacgaaggcagctgagcattgtgaccattgcaccactcctgacgcccctgctggctcctaactcagttataaatcccacgggcgggggacggcacaacgccccacctgcctggccacgcgattcggcagcacttggattttgcccagccagctggcaggaaaatcacatttcttatgattgatggagtgcgtgtctgtggggaccaagaggcgggggctgtgtggggctgagccactgccgccagggccttcaatactgctgttcagcggtggcctgggggctgcctcggggccctcacccaccaaacccaaggggtttctgagaggggaggctgt

SEQ ID NO: 337 - DNA, 482 bp, Homo Sapiens; identical to SEQ ID NO: 100

SEQ ID NO: 338 - DNA, 499 bp, Homo Sapiens
caaggccatgattgagaagctggagaaggagggcgcggccgggtgagctgcagaagtgggctgggcagtggggggcggggcgtgataggcagtggggggcggggcttgatagttggcccggcagaggcgggaagaccgcgcggctagatctgtggtgcaaaggcccgaaggtcatggaaggcggggcctgggatccactgggtgggcccaccgaggcatgccccttatagtcgtgtgacctggtcctgacaccgcccctacagcagccctggcggaccccgcgcagccgtgcagcgatccaccagcttcggggtccccaacgccaacagcatcaagcagatgctgctggactggtgtcgagccaagactcgcggctacgaggtgagccccgggaggccagggggcctggaggcctccccagaccccagctcaacacctccttcttagcagagctcctattacccagtacacttcctgccactgtgtggcctcacaggga

SEQ ID NO: 339 - DNA, 397 bp, Homo Sapiens
acatgctggtggcagccctggcatgccaccggggggcacggcgccccatgccaggcggcactcgctgccgagtcctactgctcagtctcacctttggcacgtccatggcctgcggcaacgtgggcctaagggctgtgcccctggacctggcacaactggttactaccaccacacctctgttcaccctggccctgtcggcgctgctgctgggccgccgccaccacccacttcagttggccgccatgggtccgctctgcctgggggccgcctgcagcctggctggagagttccggacaccccctaccggctgtggcttcctgctcgcagccacctgcctccgcggactcaagtcggttcagcaaagtaagtgcctgggtggccaattgagaaggtgggg

SEQ ID NO: 340 - DNA, 353 bp, Homo Sapiens
agaacagtgaatgtggaccactctgcctcacccaccccacccagcactcacggtcggcataggctgggttgttgtagaagatgcagccagtggcccggttgtagccacgcagcacgatgaagtggccctggtagtcaggagtgcggcagaagcagtggtggccactgggggtgaagcagcagtacttgacagggctggagcacaggtcacagtgcagcacccccgagttcaccagcacgatggccacatggccctgagccaggtgcgcctggatgtccttcacactcactgtgctgtgggcgggaggggggtcagctggtgctgctgggcccccattccccatccctcaaatg

SEQ ID NO: 341 - DNA, 483 bp, Homo Sapiens
ttcagagacatccccttgggaagacagctggaaggcagggctgagccggggtcatttgtgacccagcggtgaggtgatgaggtactgacgaaagtactgtatttcccccttttgagaaacgctttggcatcagatgagtcttgggggagggaggagaggaatttggcagggatctggttataagccatctggagggtggcgtgaggaccggaaaagccgctgcccgttctgtttggtctcatcccctgaatgaggtcactgaatgtgcacgggaggctcagcgctgccccactccagcctgatggagaaatcctacccgaaatcccaaagcagggcagggacattcccaccagatacttttgcagcctttgtcctgtgggacgaagcaagggatgatgacacactcgcctgcccacccggaagtgagtctcaggtcattgcatcagaagggtgacaacctaacacaagtcattgctaagcaac

SEQ ID NO: 342 - DNA, 498 bp, Homo Sapiens
accaatcttcctaactcatttactttgcagatgaactatggcgcgtactaagcagacggctcgtaaatccacaggcggtaaagcaccgcgcaaacagctggccactaaggcagctcgcaagagcgctccggccacgggcggcgtgaagaagccccatcgctaccgccctggcaccgtggctctgcgcgagatccgtcgctaccagaagtctaccgagcttctaatccggaagctgccgtttcagcgcctggtgcgagaaatagctcaggacttcaagaccgacctgcgcttccagagttccgcggtgatggcgctgcaggaggcctgcgaggcctacttggtggggcttttcgaggacaccaacctgtgcgctattcatgccaaacgcgtgaccatcatgcctaaagacatccagcttgcccgccgcattcgtggggagagggcgtgaattgttttgagtacaaaccttaaatccaaaggctcttctcagagccaacc

SEQ ID NO: 343 - DNA, 433 bp, Homo Sapiens
ggatgcaatctggagagcaggagaaagcaatttccactaaacctataaatcctcctacgtcagatgtcagggattttctgaactgaggttgaattcctgtgtcccagtggaacaattattttagccggtctaaattagttcatcgtcaaatgcagtaaaaatgttggtaaaagtcttattttctggtgcgtcgaataaaaggaagtaaaaatggaccaaagcaatttccaagaggagtaaggccagaggtgcggaactgctttctatgttcacgttaatgagctcctccctggatctattttaagcttacggccattattatttgctttagctgagggctggatttggacagcttcctgcccccacttcctgtggctgaatccctgaaaccccagggctcggtacctgcgtgggctgtctatatggctgagat

SEQ ID NO: 344 - DNA, 461 bp, Homo Sapiens
tcccagcctgcctatggttaggagccgtttaaaaagttgcactcattctagttacaccctgccacacctccaagcctgtggatgatttcgtctgagttcccagcagtcttaaagctttgccaacagcagacggaggtatcacgctgagctctgtggagagaaagctttgcactgtgcaagtgacccatttggcaccagagagggggaggggaagagaaatcctgatgggctccagggactcctcatccatctacttctccccgggatcctctcctggagggctcttgcaaacacagttgccccgccacggtggaggatcatcaacagaaacccacgaaacaaggccatgccccgtggcactctgagtcagtcccgtagcgtgatttaccagctctctgaaaaaagaaatctgctaggacctgggctggaaccgtaagatgtaaagatgtcaagttgaaaaa

SEQ ID NO: 345 - DNA, 440 bp, Homo Sapiens
catttacaacttttcactagcaaagacctgactactaaacaaaggcagcttgaccagaccacggttttatgatgggcttgagaggggctttgtttcacattctggttgtattttcagtggggctcattcttaactgtttcatgatttggggagacacattgctgattttattgttcagagcctttcttctcctttttcttgtggaatgagtgatgttccacacggaagattaagatatataataacaaaacagaaactctcacgtttagctgtagttagatttatggttaagtttatggagattacttagggctgggaacacacgtccaagaacgtctctgcagttacaactgtgcatggagtgagatgctgttacagactatggacagtaaatacctctgaggttgtgtgtcacttcctgtaggcccatgagtctttct

SEQ ID NO: 346 - DNA, 334 bp, Homo Sapiens
accatctgcctctccaaaatgccttaattgtattggcaaaaggagcacttcttattttttaaagcctactgtaactggattgttagagcagtaccattaaaaggataatgacggtgttaccctcaaatagattttcttaaaataattgcttttccttactgagtgctggcacggcactcgtgaaattctgatggggtcagcgggttctttgatgttgcccaccagaagattgtctctttccgatccactctctctccttttgttttttcctcatctacactcacgttggttttatttagctactgcaacttgtctttgcacctgaatcaagcca

SEQ ID NO: 347 - DNA, 308 bp, Homo Sapiens
gagttcttccctaaccctgagaatctgtggttctaaaagcgtggatggcccagtaggggtaaaatcctagctttgttttacagttcttgccgtcatgaggcgagttgcttctctttgagggtaccagagggctccatccagtcaggcactgtttcccaagcatgtgtttcatgtgctggggcaggctcaccactggatcccatccatgtcttggcagccagtgggcccagtggaatactcgtgattgggaacacggtgatactgcattgacttggatttccactctcctttctcacagctgcatacag

SEQ ID NO: 348 - DNA, 496 bp, Homo Sapiens
gtgtgtgggaagaggctgggtgttcctcagatcattgtaccatgcttcctcacacctgtccaagcttctgtgcgaatactgaaataaagtgtcatgaattttgcttctggcatttgtcggccacagctgtggcttcgggttgcacatttgttgtggtttcagagtctctgagaagccattggttgggagggcgctaagaatggttggtgcacgtggtaattgagtgcttaaggggaggaggatgattcttagtgcactcattgctctccagtctttatctcaatcctgttataatttagagagacgttttcctggtgtgtccacagagagatggatgcgtgcttaggaatgcataatttagtgagcagtttgaacatctagatgttgggaatattgttgagtatttatttttaaagttcaagttctccatgtctagtcagtgttagcctgtaagaaagaactagttgttcttaatggatcatgttagctggacttg

SEQ ID NO: 349 - DNA, 472 bp, Homo Sapiens
aatctaatcctcttcctattgccatgctggaaaatatatcctggaaattctcattctttacgtaacatgtaaatctctttaccaagacaagtgttgtctggacgcgtactgtccagagccttgtaatttgctttattattttattaaccattttagctgctctttccaaatctaagttctgtccctctccgtctttcttcgttctctgtcacgcggatgttaagtccctctaaacattttactaaatctaacgatagattgccaccagctgagagcgtttctcggcgaagagccggagcgacgcgctgtcctgggtgcagagcgcgtgctcaacaaatatgggtgatgaagggtcacgtagcctcatagcacgcggttctattttatttatttggcacacgcaggctaacgaggctgagagagctgtgggtggtatgcctagtgaaggatcaggacatctgcccaaggctcc

SEQ ID NO: 350 - DNA, 241 bp, Homo Sapiens
cctctcttgtcaatacttgtcccagagtgcacacataggtctttgccagagacattcgcctgctgggctcttacgcaaatggcagattgaagggtagcgtgattgttctagttcctaatgccgtatcacatactctgagtccttggttctctattagacctcaaggaatgacttcatgtcttgtggtttggggtcctacgtatttagttctgcttgcttttcctgttctctccctccagtc

SEQ ID NO: 351 - DNA, 395 bp, Homo Sapiens
tcacatgatttactctcagcaaaaaaactgtttacttaagcataggaaagccaaccttcgtactaaaagagaactgagaaatttaaacagcccatgatcttcattgctttggcctctgctgcaaagcgtcactgtgaaaaattggtcctgatcccagcaatcaatgctttcccactgcacagagatggcctggcgtcattgtgccattgtggctgctaagggcagggttccttagcaatgcataatggccagaacaagtcctccccaaccctgcactaagggcaggcccccagtcccaaatcatttccccatcttattccagtttctcttcgggagctgtggtttctttctgtggttgaacgtggttcagcttttcctgaaccctgtcctccccc

SEQ ID NO: 352 - DNA, 258 bp, Homo Sapiens
atttttaacacccatgcacatttatgggaattcattagagggggaagcctggatttaaaatttccctccatgaaacagttaaagatcaagaggtgaatcgtgtgggatatgaagcatgtcatggctgagctgctgacgaggcctcggctgtgctttgcatcatgtaagggctcagcaccctgagaaggtgcctggtaaatgccactggctgatcggacggcagttctcggaaggcctgctgatcagaaacagagcctt

SEQ ID NO: 353 - DNA, 498 bp, Homo Sapiens
ctctggcccaccttttatttttatttacagtcccaacggaagggcccaggtccccaagtgggcctgcgtatctccagaacaccatctaagtcacctcaaggtatgaagcctcccttgggtgtacctgccaacgagccaatcgttggtttcgctggaaggctccaccttgatcatggctcgctggtggccattaataaaacactttggatttcacaagtttcacgtttgaatttcacaagacttgtatctcaccaatcagccacacgcgggttgacactgaaaggcacatgctgacacctgtccgcccaggggaaatctaccatctctctattttagttagggggcggcgtgtaggccgcggaattctctaacgagcgcgtttctcttcaccccctgggcccgcgtggacccccgtccacccccacacgccctggggggggggccgggcccacacgccctggaagcccctagaggtgactctccctgggacccctgtac

SEQ ID NO: 354 - DNA, 380 bp, Homo Sapiens
ccctgacagtggccctgtctcctaggaccccctcctttctcatagaatccagtacactggagagatggtagagatggtacctgatctgctgctgatgtgatcgctccttccaaaatgtccagattccgattcattaatgccaaagcctcctcacgagacactggtgttagggtggcattgggcaatatcgctgcatgctcataaacagctgcagtgaaagtgtcctggcagctggctcttgagacatagaaaagcaaaattgccacgtaagctggcaactgagtagtcatgctgaagtccaatgagtgctgaaaaacagagcatgtcctggtatttatagaaagaagacacgtggtgtccagaacttagtaccttaaact

SEQ ID NO: 355 - DNA, 405 bp, Homo Sapiens
gcactgcctgaatgttaggcaggactccgccctgggcaatggtcacgccgcccaaaagcttattgagttcctcatcattgcggatcgctagctgcaggtggcggggaataatgcgagtttttttgttatcgcgagacgcattgcctgccagctcaaggatttctgctgtgagatactctaacactgccgccaaatacactggtgcgcctgcccctatccgctctgcatagtttcccttacgaagcagacgatggatccggcctacgggaaactgcaaacccgctctagaagagcgagacttagacttggcgcgtgcttttcctccctgcttccctcgtccagacatctcctcgcatcaaattgcagcaacacgagaaccacatttctagggctgctactgggcct

SEQ ID NO: 356 - DNA, 500 bp, Homo Sapiens
gatttatctgtgttggtggaaatggtaatgcaggcattgtttgagggagctccagaaaccattgttctggggtagaactcgcaactactttgtgtggttcctcaaaacgtccctcactctccgcctccgaataaaatgtttttataaggaaatactagggagaacccgggcccaccgactgtatgttccaggtatcctttctggggtaggtaagtagggggctgtgttccctcccgcgctggttgcgcggcctcttaccgggacctcctcgatggcgtgaggtaaggagtggatcgagaggtctccgagtcctgagctgagcgcgtgtgggccgtgcaggaggtcctcgtgccgcctgtagtccctgcgaggatccaggcccgacagctggtgaggcagcccccggtgcgtgtgcaggagcccagactcctggctctgcctctggccgggccagcctgggtgctgcggctgcggctgggcgtgcagggggttcaggctgt

SEQ ID NO: 357 - DNA, 475 bp, Homo Sapiens
ctctgattctagaaggcttggagaaagcgtgagaagggagatcagatcagaatagattgatggaagggaaaggcggtgagggtgaagcaagagaaactcggctccagtgaaaaggacccatcattgcattccagaacgtaatttgcatttcatatgtaaatgaggaggcttcctagaggctggactgggctgggcttagctgagcctttgcaaacagcagggattcaaccctggggaactgcagaccaaagtgagagagggacgcaccgcatctccaggcacatccaaaaaggatggacgagacaccgaagcagaggatacaggaggattaaaggattcaggaaagcaagcagccctccggagaagctgtcgaaattcaagactggcaagagaagcaaattcaacctctcacaccgatcatttctcattccctgaaaagaagagattgtttccccagggaagtgaaaataatgaa

SEQ ID NO: 358 - DNA, 426 bp, Homo Sapiens
tctccattacttcacagattcagacattcctgattttttaatgtcaaagttcacatatttgtattaatatttatataaattaactcaccctatgcacacatttatattaattttactaccacccaattcacatttatatcaactgcctggccccataagcatttagttcgtgactctgaatatgcccaggcattaactatggttctctctaggtcatgagtcgtttttaattttttctttttcctggtctgccctgtctaattttgctaaaataaacaaacatggcttttgtaataatggagaaagacgccattttaattaaaaagtaataacaatgtggcctgtggccctctgggctgtttgggccacgctccactggcccccactgagcctggcttttctgggctgctgctcttcctgcctccc

SEQ ID NO: 359 - DNA, 422 bp, Homo Sapiens
gatatccactctcagggcaagtggctaatttccttcctaagctcgaataataaatgcctaatcatctttttatttttcctaaacagtaatgtgctctgcatccagtctgtgtctgtctgccggtgcagagctgacattacctgatcctatttcacagagaccctgtgtttgctagatgtccaaataagtggttgattcagggcaaaaatattagtcaagccatttgtttcactcagttaaagaatcagtgcaggtaaagtaggcgagtcagtagcccagcgtaggcaaagctgcgtgtcctcgaatgatctttccagccgtcattcctgggagggctgggcttttggggcactcctaaaggaactgccttgggctcaaggcaacattctctctcagcagcttctccttccccatttccagtg

SEQ ID NO: 360 - DNA, 365 bp, Homo Sapiens
ttttacaggtgcatgagagaaaactgcagttccaagtattagagtaccattaaatataatacactccgtatgcaggggcagttatttaatattaaaccaataaaacattaccagtgccggtgagagttttggttgttgacagcaggctaggtgtcccacagccatgccgtctttctgtttgcaggccaattttacacagctgctttcttctggaaatcatgcctcatttgaagccttcgcaagtatgacaaatagcctctctaagccttagcgacggtggagaaacttgaaaatatttaggagcatttattaactagaatatgaaagaagatttagttcaactgcagcttttgactgtgtggagg

SEQ ID NO: 361 - DNA, 356 bp, Homo Sapiens
gggaagtcacttaatgtagatgctcaaggaatcccacgtccaaatacggtcattgctgaatttgatgggagaaaaaaaggactgtatttttgctggctaatgcggcatttctggatgttcattaagctgttaaaaaatgtgaaatgatgactcactgtgaagccttcccaacccccttccctgctccaatttgcctgcggcttgaaggaatgtatactgacttgagttaaagaagaaacttgtggtttccattatagtctgtaaacatcgattgctgaaagcctcaagtgtgctatcatctcctgccacacacatgctttatatacagttcatcttggaaaacagattgggagagc

SEQ ID NO: 362 - DNA, 474 bp, Homo Sapiens
tgatgcctttggggcaggcttactttagaagttttaagaaatctcaaaatgagttctatgatgtttgccgtgcttggacacaaaatgagaaacagaaaatctgccttctcaccctatgggtggagtgttgctcctctatattttaattctttttaataagaaaagggcgtcttgaatgtggtgggaaagggcagaccacatggtgggaagtcatgtaacacaagatacactttattgcatggcgtgtttctgtaccacagatgtgcacacagatgtgatcatcaacagagataactagtttacaagccctccctggaaactcctcatcgtttttagtagaaaagtgattttcagccaaggcctgagctgaagctcagcccatgattaaagcatttccaactgttccacactgaaaagaaagaaaagagaaatgaccagcagtggttttccagccaaggtgtgagaccagaggtc

SEQ ID NO: 363 - DNA, 412 bp, Homo Sapiens
aaccactccatgacacatttttttctctccagatgtaaaaactgaggagtcagttgtcagttgaatactctagtattattttctcagcaattattttaaggaatgcatttgaataaaatgcagttttggcatcattttaaaaaatggatgatgatttatgcttttcttgcggggacaagatggctgtgggcatgagtcatgactgtacgctgggaagattccgatgggaaccttgcttttgctggttgagccataacttacacggacttgagactgtgcgtggcttttattaacatgttcattttgcttgttaaggctcgagcttcatctttttcttcccgactaaagccctgtttgtatttcacacacacctgattcaaaatctgtgcttggaacccagagtggcttggga

SEQ ID NO: 364 - DNA, 464 bp, Homo Sapiens
cttgggaggatggatataagtgcaacttaaactctggagccctttacaactgcaaggcagcattattcactcaaacataaaaataggtcattaagcatcatcaaagggaaaagtaaatgttcagggatcatctctgctgcactgttgctggggaaagaggctctttgtccctttaagagctttcagacacatctctagtcacatcctaaaagccttcctagttgtgtagcttaggtgcatccggtagcacagccgtgttctgatcttcctggcagatgtcataatttactgtcacccccatgcaggaatgcagggcgaggggcccccatgccggctctgtgatccattgcctgacaagtcctgagtgtcaacctcaggcaggcccagcggaggtggaacaccatttacctgatagtgcctgtgataaagtgggcaattagacgcacttggaaaagcctggctgg

SEQ ID NO: 365 - DNA, 429 bp, Homo Sapiens
aggaaaatgggtagatggcataagaggacattgaatgtactgaaggcagcccaaatattccatgcattagtcacttcggatatccagtggagtgaatgcggcattcattaatgcccaatgtcggcccgggcaaagtccagacagtctgctggcagcaagaaagctaaaggcaagaaggcctgtgtcgattgtcgtctgtacttacgaggctgagaaacagtagctatgaatcagcctgtctgagactctgctgtcattatttgcagcagtaaggaagataatattttaaaaagctttcaggaataaaatgagtcttaaccactagaggaagaatcacagtctgcagctacattgcctagaggcttaatgatgattcattgcaaattagaccaattaagaataccccccatattgtagtcttgagtggct

SEQ ID NO: 366 - DNA, 431 bp, Homo Sapiens
ctcaaaacccaccatctaggcctctgtaggcaatattctgaattcaaaatgactttcagccaagtcgtgtttgcacctgggaactgtgagaagtattgaaagcttcataaaggagaggaaacctgaccacgacaggaagtgacttacagcccctgaggctcagatgtattgacataaggtagtgaagtaggaaagaattacggttttcaaaaagaagtaggatcttggtttctcttttatcccagtgtgatgtgtgtgtcctagaacaaaatcctctaaccacagtgcaaaagtgacattcatgcaacaggagtggtctaaatcccttgcctttgtgggtctgatacagaggaaagtcagaatttcctctatgacttgttcatcgtgtgtcagtgttgtggtttccaagtgctgtgcaaacctgattttcc

SEQ ID NO: 367 - DNA, 460 bp, Homo Sapiens
gtcttcaggacttccagacatggaactggggctttatttttggctctgggcatctatgctgcttcctgttatgttgccagattcatacgtaagctaaggcagccctagaggaatatttccctccctttattcttattccttagtacagttctggatccacagccaatcaagcgtatcatagaagagccagcaactctgacgtgcaaaacgcccatgtcctgccacccccaacatgctggtatttttgacagtcctcaattagagcagtacggttaacttcagcctgtcatttgtgtgggttaagctgtttgaaaaatccttgagggatcagccagtggtgggaggatgattttcctataaacaaatgatggaacctcgatgtctggaagatactagctgtggtttggttcctggggccttttgaggggacagaaatgtcagctcccttcttccttggctc

SEQ ID NO: 368 - DNA, 489 bp, Homo Sapiens
gtttggggaagatgatttgaatgtcttccaaaaccttcgagaagcattaagctcaagctcagccctttatctttgacaaataccacactgtgtatctgcttgttatttcgtggtcctgttgctcctgtcagcttgttaaatggaactctggtttcagtcagatgaaaatgtggtaatctctgtgctttgcttgcctcggcgtccgaggagcggctgtgcccgactgtgtgaggccgcccagtgccaagggtaactactggcacctgcactgacagcaagcagtctgcagcaacagattgaaaatgttcttttcagatctttagattggaacttcagctttacttttaaaagtttcatgtccacagcacggttgacaaaataaattactaaaccaattgctttgggagcttccaagctgtgacattaaggtagctgcgagtcatcattcttgatgaaggagcagcttcagaaattgtgtgcatctgatgg

SEQ ID NO: 369 - DNA, 500 bp, Homo Sapiens
agtatggccagaggaattgaagaatgtaccatgaaaacatgatatcagaactcagagatgtttatttatgagtttggcaaggttttaaaaatttttttatgatgcgtttgagttcttctgcatacaaggcaaaattccatcaacccggccagcctataaaatccctcacaaatcgttttatgatgtgtttgaaatacctcaggctgagttatttgttgacaatttgtcctttatttttgacacctcggctgaggattatcttccccaaaatagaattgctaacttcttggagacctgtgaccactgtgtgctagcaatgtcagtctaccaggcacataaatattcatttattggtgttaagcaggtagcaacagaattctggaccttagttgctggagaagaaacaaagacttttagaactagaatcacaaattgtttattttatggttgaggaaattgaggccgaaggtcacccagccaacttgatgtggagctggaat

SEQ ID NO: 370 - DNA, 460 bp, Homo Sapiens
tgtggaagggattccaggcctctgtgattatcaccatgtctccttgagctgcgcctctggaaaaaaatgtgaaggaggtagccctctggaatgaataaatcctgccgcctgcctgtaattatttattaaaatagattaaagaaataggctaaaaaggaacccgccacccatgttagagatagcataataagagtacatagaaagggaaaattaacaccagggaggaaggaatgttagatatgtgctttcaagaatacggccatgtctgcattgttggcttacacgcagacacacgctcgggtttttcatttggcagggtgggctgtgctgatgaaaacgtgggttactaatactgatgtgtatgtctctaattaacattagaattgagtggtaaacataactaggagagcattcaagagagaaatgggctaaaagagaagccaatgtgtagagaggaggg

SEQ ID NO: 371 - DNA, 463 bp, Homo Sapiens
tgataagggtgcctttgtgcccggctttaacctctattagtgaggattatgaggacgtagccacattggcattttctaagtgtcaccgtgacagcacttgctgcacaaatgcctagctgtcaccgtgagttttatcactcagtttttccctccgaatgtagactaataagcccagaaattacaattgcctccctgccgaatctgtgataggcggaaataatgatatcagtgccctgctaatcttcttgcctctgcgcttggcactgtcctattgagtcacctgtcacactccgctttgatgaggcgaattcaatctccctgctgtaatgacaatggggccattttaatgtttggaaatgattatgtggaagcttcaccgtgctctgtcttggcaagcaaaccaaggcactgtgcacgccaggagagcgggctctggctgtcaggcaggcagtggagatgctga

SEQ ID NO: 372 - DNA, 499 bp, Homo Sapiens
tttggcccaaggaagcaaacaaggctttggggcacttctccatggccgccttgggacccttcagaagtgataagccgccaatctggaagctgcttgggtgataatgattctcgaatgggcttttatgtggacgagcaacatgacctaaggcaccagggataccagaaaggacactttttatgcagcttgaaatgtgagtagagagcaaaacagatttcaaaagacgagcaccgccgctctctcgacattataaagtgtcttctgagtgacaacagtgcatccttgtgcatgaattgcacttaagctttgtatttttggaaaataacaatctgtgttttctggttactatagacccagtatgggcctagaggttttatgtgtgcaggacctcattcgtgtaaccctttcagtgattgggagaggcaggagtggttcttgcccccattttacaggggaggagacggagatccctaagctagtgaaggatccagctgggact

SEQ ID NO: 373 - DNA, 323 bp, Homo Sapiens
ggcactgggaggatcagagacctcatcccagctctgtttactttgggaacaatcgttggtgtatgaataataatgcctccctctgaccatgactaattgaattgcagcctgcgggcagtggggaggggctttgccgggccagtccatcacggcgtttctcaagtagccaccgacagtgatggatgcagcggcgcttcccagagtgcatcctcgaacacctaagagcaggggtatgaacctgcattccgagtttctattagccggggcctggcagagaggacgggaatggcggcagttaaagatgagttggttgattaaaagga

SEQ ID NO: 374 - DNA, 466 bp, Homo Sapiens
cttccaggccccatggcacagggagccgagctgggtccatgccagcaggcttatgacgtcattgttgtagcttgcttatttggtcaggatcactaaaataattccctttgagaagaataaatttgctcttgcagaaagttaaagacctgagaggttttaattagtttaccctgccctcgcctttggtcgccaaacgttattgcagagttcaaagaacatgatgttgtgtgtctccctttcccatttttgcgtgggggccttttccccctttttagcacctcctgtgaatagttgaaaatgagtggcaaaatgacattcgacttagaaagtaagagcaccaggaagcaaaactggaggcaaacacagcagctaatttcaccaggcatagctggtgctgtccgcggttgtccctgacagcgcggccgacacagaaccacctgtgtttgctcactagctttccccaatc

SEQ ID NO: 375 - DNA, 473 bp, Homo Sapiens
cccccaacctttacagcttaagcgttttatccagtttaaacgttagggatttaaattgctattttagtggaagaggcttgattaaaacctgtgtcctcatcaaattattggacagtggttcttgggctctgtttacattagtgtcaaccttaatttaaattccgcataactatatttgcttcgctaaatgcattcaccaggaacacaccacaaattactttgcattatgagccgagtctctttgtctattgcaaagtgttttgaaattagcaccataagtaactagctgtaagtgtcactccatctccttaatgcctcattaatcaaactccatggcagctgatgtgatgtccaagcccctaacatataagatcagtatcatttactccttgcatttgaccacggtctttaaacttgatttgttatttgtgcatttgccctcgctggagctctgctcctccctcagtggcctc

SEQ ID NO: 376 - DNA, 437 bp, Homo Sapiens
tctgcctggctgccctgtgctcacagggccagcatgtgattatttgggatctggtgtgggttttctcttggttgttttatttttcacttaccagctgcgtgttaatagaaagtcccctgactgaaggatttgcccgggatttctgtaataaaaatagaaggatttgtcacaaacgctggaaggaccctctgcaaaagtggtatttttcacgtgatcatgagccccagaacatattgtcatcccgggctgcaagcctggcctcctcactgagtggcagtgacagatgtcccctgttaatgtccagtgattgaatgtcactgcagaggcccgtcctcacccacacaacctgttcctttctttctgcagccactgtgtcacgcttgtcacaaaatccacattttctgcacattgttggccttctccagcagtgagccctt

SEQ ID NO: 377 - DNA, 215 bp, Homo Sapiens
tacaagggttgggggtgtggggacagccagagccaaaggtctctcccccacagctccggcagtcccagcccagaggcgccggcctggcggctggaagattgcactgtgggcacatctggggagcagctgccgagccagggccagagtgggtcacgtggcacagggcaggaccgtcctggagcctacaaggccaagactcctaggaggggcagtgg

SEQ ID NO: 378 - DNA, 431 bp, Homo Sapiens
ggcaggctgggaagctgtcctgtgtaagaggacagaacatgcattctctgctcctcgagccatttcctgggatcgggtgatgggagtgacttctagtgcagataaagtcgaattactcttatcttctaggtctatactccacacttggtcttgcttctactgtttggtatgtctgtggtttccccctactgcttctgcctttatgtgatggtgcttccaagtctgctcccgggacgtttcctgttcttggaacagctgcaccagcctggggtaccctcctgctacttgatcctatagggaggtgtccagtggctgtgggcaattttcagatgaccttgttcgtctgacgtcattagatcgctatttttggctttgctgtttatgctgcagaagttgggctggaatgggagaggaggaatgaaggaggggct

SEQ ID NO: 379 - DNA, 460 bp, Homo Sapiens
cctcatgtccccagcagggccggagcttgggggcggtgggcagtgtgcctgggctgctgggggggcccaactccctcccgagcagagccacggcggcatgacggatgtgcccgccaccgcggggagcccagggtatagcagttgcctggaaacaggctgctctcgcggcccacactcagacctttgtcaccatctcaaggacctttttttccctcttcctcctttcacgatggagccagaccctgcacgcaggtgagaaaccgcagccaaccccaccagcagccccctgtcaccagggaccatgggggcccttggggcctggttgcgggtggggaggtaggtgggtgccgggaggatgaggggaacctgcagcgggaagtcagcgctccacgggcggcccagccgaggcttggaaaaatcccgacgctggaatgcttctctcactggctttattttcccc

SEQ ID NO: 380 - DNA, 408 bp, Homo Sapiens
ccttgggagtggaggccccggcctctccagcagcccccagctgtgtgctccctacaggtggtgagtggctgcctgcgcggcacagtgagtgtgtgggaggtcgtgacgggcaggaagacgatggagtttgctgtgtctgggggccagcacgtggagatgaccgccatggccctggatgagtcagagcggtgcctgctcacaggtttgcgggatggcacaatgaagatgtggaactacaacattggcaaatgcctgttgacctttcccagtccggaacagctggaggtcagtcttgcttgtcaattacagccagggacggcctcttgggaagcaaagcacagctcctttgaccctgggatgcactattttttgtacctctctgaaagggtgttcatcatagtcaggtgg

SEQ ID NO: 381 - DNA, 461 bp, Homo Sapiens
agagggtaggaactgggcacagaaaaagccggaagggcaggttgggccatgagtgggggagctgggtgtgcagtgaggggtgggggtgggaggggaccgggggatcagttagtcaccaagtggtcctggtgacagggctggagatggcagctggcggcggatgtagcctcgggctggaaaatcaataggtgatcagcggtccaggggcaagctgttcatcaggtgcggcagaggggcaggggcaggggcgggggggctgggaggaaatatcactgacccccggcaggattgatcaaacagccagacacccaaggccaaactcactaataaagtgagacattcagctcagcccggcggctgctgctgaaggtcttaaaaaaaccgcttactggggagttcttgataaactgtctttgtttcttgaggcaagtgggagggaggacagactgtggggaggcctg

SEQ ID NO: 382 - DNA, 417 bp, Homo Sapiens
tcttcctccctgctctgcagggaggtgaggtgtctatatttagatcattacaaggagctgctgagagaatgtcctcaggctatgaattcagccttacacgcaaattcactgcagatccaggagaaggccaggaataaacgggtgggagaaggtccttgactccaaacagaaactgagctgatcaaacacagcctgagcacacgcagaggctgcaggagggaaacgagattaatctcaaaccctgtgtactcagaagctttccccagaacccaggtcccactggcaggaaattgtcacttcgtgcatttgtttatttttcccatgtcttctgccaggctccgtgtttcactgagtccttatcttctctgtgcatgtccacaggctgctgggttggaaatagcccaaagccattcagac

SEQ ID NO: 383 - DNA, 486 bp, Homo Sapiens
gggacagatggtgggagacaaggaaacccccatgttttcctccatctgttacatttaattgacttcccgcagaaagaaaaaaaaataaaccagttgcaaggatgaaattgctaattaaaaggccctctgattagatagacaaatatttaccaattatgcctgaccctgcctgtccccttttacgtctgcgaactcccccatcagcactgtggccacatcatacccagctggtggctcttccaccaatcactctcttggggctcagactggctgcgggtgaaatagggtagaagaaaggtgaatactgcaaacagccgttcaacaaacgcgatgcctgttgcatggtcaggcttagtgctgggcccctggaagccatagcagaatttccatggacagcctttcaagttgtgtgctgcacaaaggtgcacctgcaggagagtgggggctccccctgtcaacctgggacccctggcaccaggcaagggg

SEQ ID NO: 384 - DNA, 463 bp, Homo Sapiens
ggaatgcaggggagttagagtccagttaggaaggagagaggaaatatgatctctttgttgcatgtgggcaccgtaactccagccaggcaaagtgctggtctgttgtagctcatttttatgtttttatttagaagcttcaataccagagctgatggcagaaaatgtgcagtaaaatgcggggaggccgctgggtaatggcccctgtaaagtgttaattgcctattgagactgcagactttgtccatgctccaggatctgaactattgacaggttctaatttatttcgggcccacaaagcgggctcctcctctaaacaggcttccaatcagtcacgcttccctgggcctgccaagaagctccagtcgataagtatgtttgctgccttaaccctttgaagctggtcgtgtggtctgattctggcttgccttaaggaaacttccatgcacaatggtcttggatgaaa

SEQ ID NO: 385 - DNA, 461 bp, Homo Sapiens
gagtgggtgtgagggtcctacatctgattatgtgtttaggtttctgtaagtctagaacttgaccatgcagagacaatgaattttcttgcactcctctgacccctacctgtgctcccactcatcttccttagggctccccttgcctggggagctaccctcctcaccagcctgtagccagcccccatttggacctttacttctgtgtgtcttccggaggacacagatggcaggagcacggaatcggaagcacttggcaatgaagcagcaattcattccgcaatcccttcgtattcatcgcaacaatgcctgctctgatgggctccgcgcgctgaatgcagctttcaatgtgcaatccagcgggaattgtggtgctttgtggtcctcatcacgtccacttattgtcaagtgttgctgagaattctcccactcgggatgagggaaccacttgttttagcaactga

SEQ ID NO: 386 - DNA, 495 bp, Homo Sapiens
tttccttacaatctctatgccaaggtcatggagttttagccattgctaggcagaggtggagctatacatgactgcgcccccacataatcacattcctttcatttaagaatattcatcccatatggagaaatagaccatgtttattaatcactccagaaagtatgtaatttcattagatcaagctctgtctctgggcattgactaatagagggaacggctccccagcgacccagaacccctacgacacggtctgtggagaccatactttggggccagctgctcaaatgcactgctggaattccaggcagaaatgtgtaatggcatgccaagggctgctgagctgtcatagtccaagcagggttatttgtggcttccaaagagaggctgtaaccttttatggtatccacaaatctcagccttcaagagtcagggagaaaatgcaaccatgctgtttgaccgagctaactctttccccaccttgcccctctcccactc

SEQ ID NO: 387 - DNA, 425 bp, Homo Sapiens
aacctggggacatctgctcttcagggcagcactccgttgcctcccaatacccagtagctgtgattgttagatgatgatgatgattattaatagagttattgcttttggggcaacactagcagtgcagcagcgagcaggctagcagggcccagggcagcttgctcggccacatctgccctggagctgctgtctgctgtgcaccaggaacccgccgaagcctgagagctgtcagcacagattccaccagggagccagcaacgcccctcacttcctcaggcctctctgaaatccagccaaggaacaggcgctgagctcacagtcagatagctcccggagcctccggccctgggcacggtgccctagctggtggagatggaaacagcaaggcccttctgactcaaagactcctcattgcccctgacacc

SEQ ID NO: 388 - DNA, 488 bp, Homo Sapiens
ggggccatggatgcatggccacgcagggtgagcaattgtgatgagagaacagaaaggaaatccaaataagagaactcaaagcagagatgagctaaaaatcagcaacacgaaccatcacaagtgggtagttacgctcggcaggagatccaggcaaagcgagggcaaacttcttagccttttcctgtggaaaatttataaagctcagattggagaaaacgtactgatagttttgaagctggcattttaagttggaatgtcttctcaaagtagcacataacggcacaattcaataactctgaccattgtggaaaaatgccatgtgccaacagcgattttccataattttgttcagaaaatctgaaagaaatgcaaaaaatggatttgcagccctggcagcaggcagagaaacagtagcagagggctgcaggccagtaattgatgtttcaaatatcactgagtgctttgcctgtaatttcaggggagaatga

SEQ ID NO: 389 - DNA, 378 bp, Homo Sapiens
cagacctccattatcccaggtccccaaagatgtcttcagtctcaaacaaccaacagagtggccccattcctatccactgtgcatcctggccaagtgcacagtaagtggacctcttggccgggcattctgccaatgctggagctgttaggaaataagaatgtgtgtatttattgaagaaaataaaaatgttcatgcgacgttgcacagagacgatttatgagattttatgaatgtgtcaccaaaagacccactcagtcactgccaatgttaggtctgcaaacacctgggggctcaggcaacaaagctccctgatggagtcagtgggcaggacgtgcttgtggaggggagtatgagccctgtgctgcaggtgcctgcacc

SEQ ID NO: 390 - DNA, 432 bp, Homo Sapiens
gggctgggccaggacagagaggggagaggcaacctggaagctgcaggtcacaagtctcctctcctgccactttgtgccccctccccagtcctgtcctcagccaagcacaggagcagtcgctcaagtttacgatgtgctgcgtgcaggttgcagacctaccatcatccataataggttgttgtttttactttccatttatagaggtggctgagttaccacctatggtcaccgcagccgttaaactgctccgggggctgagatttacatagcagccatgtgagctgccacaaacttggggttgggaggaggatgttttcaatcgaattagagctgatgattgatagacagggacagcagagaccagcctcatcaactccaaaaagcccaggaagccctcacccagaatgcactccctggagataacagtggtgg

SEQ ID NO: 391 - DNA, 475 bp, Homo Sapiens
agcccttcttttgcttcactcagccttgaggtcagcggcccgttctgccctgtgcctgggaggaatgttcgtggtggccccagcctggatccgagaagaaaggcagccttgtgggcgaaaggtgagcggctgggtgggcgcgggcgtgtttatccagggccggcgtgtggctcggggtggcgccgctgtcagccgcgccggctgccccaggcctgtgctggcctccagatgtgagctggctccagccggccgggcccccccaccccacgcacagaggggctttatcaaaagcggctgtgaggaggcccaggaggccgcctggctccagcctgctggctctgagccccgggcctgcagaagccaggccagtcgcacttgtgctcttgtgccctggtcttcgtgtgctccacggcccagctcctctgttctcctcgagtcccctgggggcccaggcgagggacagcccctttgccag

SEQ ID NO: 392 - DNA, 456 bp, Homo Sapiens
ttggctctcattccctagccattggttctccccttcctgtaattcaggcctgcaatataatttcttagtcccccaaggaaaacagaactaaagacttctaacagaagatctcagtctactaacatagctaatagctattaaagctactcaggcatcggcttaataaaaaactaaagggctgcagcaagtgatcagattttcaccactcatctttgtgagatgggtctcagagggccccgtccctgctgacaccaaccattcttaccggtagcctgccaacacacaagcagttcacagtagaacactgcagactgcagggcattttcaggctacatagcctcaagttcctagaacaggaactgaggcttggaagaaggtcagtgcagcgcactcagcgaatggataaactgaatcatcatttcacaaggctgcaagcccatgtactaatggaatcaa

SEQ ID NO: 393 - DNA, 488 bp, Homo Sapiens
ggtgttcattgagcttggaaattatggaaagtcattgtcagaagggaggcagctgctccagaggcggagtggaagtcaggactggagaaggttgtcctactgtgggctccagcgtgcctcttgctgctagctggtcaagagtctcgcagcagccactttatacctcactagctccaccatcgcaattatttctgtcaaaacgaaacacaaaagaatggcatgtctatgaatattcttcacagaaaatatattcgtttgactattttccataaaatgtgaagtcaatttctttttctatttttaatcatgaaagtgaagcccggaagcctcaatttctttgtaatggaaagatctgagtttgtggccttgtttccattttccacttctcctttgctaagtcaggaacatgatactcacataatatcccccgggcagtggctctgttcaggaattgcatggctgtttgactgcagagggagggcaaaggc

SEQ ID NO: 394 - DNA, 471 bp, Homo Sapiens
caaccctgtccctttaacactgctgtgagctgactccatttgtctgagataaaacttccctcttgatccagtagcgttcacggctgagttggccacgagacagaggaccctgtgttcctaattatttctggatgaaaagtcctgcaggcgagtggagattcggggcaaagacggccaggtggagccgtcaccagcgagcagtggattgtagaaatggagagataattaaattaaaagtgccaggtgcaggcattgaaaaataaccctgggtgttaattatgcagttcagtgttagcagaggaaatgccaccggcctgtccatcacgtggcagttgaaaagcttgggaaagacacattcatggtttctagagaatttgccagggctgcctacttgggattctggtgaagcagagattatttattagttggagtgtgtacatttcccccattttccactcagccaagttgggc

SEQ ID NO: 395 - DNA, 495 bp, Homo Sapiens
ccatcacttcatacaagttccttgtcataactgtaccctggcttaccttgacatctggtgtttactccaagctgaggttttagggaagggtagttggaggccagcggcggctcctagtgacagatgggcagagcgtctgctttggcatcatccagggtgtgggcagcagtggtccgagtaggcaccactgacctgcaggcagggaaagcctgccaggtcagccatgcgcttggcatcaggaggagaggatcagagccagcagtggtcacaatgagggcaaaaccctcacagtggaatattgtcacccaaaagggatgggtggctgtagggctttttggatggaagcataaatgagaaaatacacacgtttctgtaaatggacctgtttgggaagacaaggccacagtacacatagttttctagcaatctaaaccttatgtgtcatgatgtagatatttacaggacaagcaagaacaacaaaaccttcagttttgt

SEQ ID NO: 396 - DNA, 364 bp, Homo Sapiens
ttcccctctagagccaaggtcagttgtgcccatatggatatggtagcaaagattggaactgaaagcatgtcagcttttttaacatctccgccaacagccctctcaattcccctgtggcacgtgtcaataacacagcccgtacttgttttagaaacaagcgctccataagcactcctgtttgatttgctttggctggtacaggatccagatgctcttagaatagcacaacagactctccaaatcagcctattcccattccgagccactcacagctctgatctgctgctggctggggttcatccccgagtcttccctacctatcatgtgaatcacgttcagacttttgctagtttgtcctttccct

SEQ ID NO: 397 - DNA, 472 bp, Homo Sapiens
tcaaggaggcatggtggccaaccttcccctgaatgggattggtttctatatagtcattccttccggctcatgactttcttctccatttgctgcccacggacgccgaaaataacttgttttctggcaagcttgggatgagattccttatgatttaatcagatccataatgaagctctcccagctttcaggagaaaacatcctgaactgcagggctggttaagggcagggccctggtgaagaggaggagccccctgcctgagcagcacatttggagccaggagagctgcaacagggccatgccacccacccagtggggtgcccccattgtggctgagactcctggcagtgctccaaggtgtgtaccatgtaagctgtgccttcccactccctgcagcccagactaaaggcctcaaagataataggcaggacatcgcatctgtaaataccagctgcttggtccaggaagagacag

SEQ ID NO: 398 - DNA, 397 bp, Homo Sapiens
ttcttttctttttccctgtctctgtgataaacgctctattaggccagcacgcctgacaaagccttatctgaaaatatgttcgagatccgtgctcctgccgggtttcagggatcagccggcaatccatttcatggataacatcatcctttaccaggggaaacattaaaaattaacccagaggacttcatatttttctgctaggagcaaagctgctatggttaccagataatgcactgactgggctggaatacagataaggacgacttttttttgtttttaatatcagaaaggcaaaggccccagtgatggctcacaggagaaatgccctgtggacaaagagaatacaatcagcatcagagcttggcagaaggcatttgactccaggcagtatctaacc

SEQ ID NO: 399 - DNA, 466 bp, Homo Sapiens
agcagatggcatctgtctgtcacagggtactgagcggtgcactgtctcatgcattatgcatcaagagtggcctagcaccctggcccggctgtgtgggacaagtcttgcaaaagaaacatctgatgaactgatcgggatgtcaaaatgtcattaaggataaattaatggatgtgttactttggctgtaagaggcagtgccagcaagacaacagacagccggtgggctgttctccagcccaagacagacggcgtttgcaatggagattcatggtctttatgcaacgtgaggtgctttgcagggagaagaataaacagaaatgctccagcacttaagcgccataaaatcacaagcatgagattaattaattagtgtacactaggaaggcggctggtctgtctgcgctcctggggaaagctagaatggatggcactgggttagagatgacgggtccctgcaccagcctcc

SEQ ID NO: 400 - DNA, 496 bp, Homo Sapiens
gaggtggcaactcctgccaaaggggattaagaacaaggagttctaagaactttctgcagggctgttggttggagacgctgcctccatgcaaatctcatttgccgctgtcaatccagatcctgtcccaccacgaccatttctgagaaacagactcaagacatgaaaaaaaaccctctttctgtaaaattggttcgtgaaacagactacaggcattaatatcctttatgagtgacaatttagggccaatatttacactttgtaatgttcgttctctttctctcgggacagaaaagaatgttgccaatatcaatgaataaacattaataaaatcaaatataatcttgttccatctggaatcaacctttaaaaaaattcttaacatctgtatataatatacatacacctctatgtacaatagggaaatcagattttgcctgagagatgtgcacagtatttaatgccaatttatttggttccaccttttctccagactgct

SEQ ID NO: 401 - DNA, 474 bp, Homo Sapiens
gctgagaagatgtgactgtcatcctcccaacccgacaagatgatttttctcaaccataatacaagcccagtgagccatacaatcatggtgaatcccctatcagctcaacatcctatgcaatttttcagagaatatgattctatctgaaaatacatgcaacagtctggaactcatttttccccagtgcctaactttcagattcctataaataccagatggccttccaggcagtgacacacgttggaattatcgaacaagcatcgcttatgactttgccttgggcagtgtcaaaaggtactgagaatttacccatctcattacggcgttgctaacagggtctcaggcagtttgctgggcctggaggtgtgtcaaattgcagtgccatgaatgcctcaaacgagagacagagaaagagaaagagaaggaatatgtgaatgtgtgtctgtagctgagggaaacaacaagagtaaaggg

SEQ ID NO: 402 - DNA, 460 bp, Homo Sapiens
cctttacaactgccctttccaccgaaggattcagacacaaattgtactttaaattcaatatcagtcattaatatttcatgattacaaaacgttaaagataatgtcagtggaaggagcgtctgcatgggcagaatggatgactcagaagttcggggagaggggagccggcatactaagtggctcgggagtctttgaggtaatccagtatgacaggcggtggctcctggctgagtgcaacattctccgaggtgctcaccaagcgccgccgctgtgtataaatatttcccctctgattcttgtcacctcatgtttattatgaccaggagcaggtggggccaccatgaccctctgagtttcccttctgtttttgaggaagccaaatggacgctttggcaggagggcatggggctgggtgggcagacccgatggccatgcacctggggctctggctggctcctgg

SEQ ID NO: 403 - DNA, 410 bp, Homo Sapiens
gagatgagtaggggattggagaagagaaccgctggaaatgacaggagctgaaggccccaaaggtacacagaaggtcatgcctctcagcttcccaaacccacacacccccagatgctgcctgtccctacatccggctgctggggctgagcagccaatttgggacgaccgtgatatatttaacggtgagtcatgctctcccccagcaatcagcagtggcaggctcgggaggatgcagggagcatctctggaaatccgtgcctgagggtcgccatgacaacgccatctgagtcgcttgccagcagctgggatgccagtgcctgaaccaaggcacaaaatagtctcacaggctgagtgcggccgaggacaggagcaggccccctgcacggcatccccaatgggtttgccaggga

SEQ ID NO: 404 - DNA, 489 bp, Homo Sapiens
tgagagctggaacagcagcagaaatcagaagaaatctcattgagaaaagaggcacagagaggagtgccaattagcacccaggtcccctcctgggagtgtcaatccataaatattaataaccgtaatcatccagtattagttataatgccttgtaaattaaggtcattttccgtggagtaaatagctgcgttaatggcagcaaaaggtaacggcgttgctggctgcatgccagttgatgcctgccaggatgacagtataaatcaggaaggacacgtccaatctgtgaagacaggcagtggcatgggggcaggtggagtgacggggcagagtgtggccgcagacacacatcccacgcaaggcccttgggccgatctgatctaacagggacctgctttagacaggtgatgtctggggcagatgaagctcccagggtcactaggtgtaggtaggaggggagagaaggggccgggtgggtagggagagggtgtc

SEQ ID NO: 405 - DNA, 494 bp, Homo Sapiens
ctcacctcccatctggacattattttaatgtaaaggcatggctgagacacagaaatccccttgaaatgtatcattgcggtcctcattgactcccattgtgtgccttaatggtgggcccagtgggtgggggctgggaggggtggagcaggtgcatggggcagcggtgcccagcacctgttccagtcacagctgctggcccactgcatggcaggcccctttaatccggggatatcgcatgtacagtgcccccctcggcgccctttgtccccgccggcctggtgccgatttcacacttgccaggagtaccatgaaggcgtctggggggcgagggatccaaggagtgggggtctgtgcctcctgcgtgtgcacacagcccccgcccccagcccatcatgtcctagaatgtctccttccccttttgtttgggttcaggtctcatcacactttgggcacttactgtacaggagggtagtgctcaggacttcaccaacagc

SEQ ID NO: 406 - DNA, 472 bp, Homo Sapiens
ttggttacttccaccttggagtatcacaggtcaaatcagccagtaactcgtggaactaacccacgagtggtgtttacccctggataatggcccagtggaggggctggcctgcagctcacacccaccatggttttgctgaatggtgctcgttagactttgcataatcgaatttagcccagctctatgaaggctctgcacaagctagtcccctctctccgctatttgatggaataatagatccataggagaattcatttgcaactctaagccccgagttaaagacgtctcaagggatgaacgtgggtgatttgtggaacactgcgatgcatttatgagatagattgcacgttcaccgcggcgctcaaagaaaccagatcgggttgcattagaggcggtgctgtaatccggctgtcctctgggaaagaatgcaagcttccagtgtgcgaagtatgaggggctgcagaggaaattg

SEQ ID NO: 407 - DNA, 474 bp, Homo Sapiens
cctgccccacctaggtgtgaagcacctcgctttacctggaaggctgggcatatttaaataccactcccctgcacgcttatttgtcgcagagtggttaatgctctttaattggtgcagtaaatattccagagtcttccttgttatgccggagtcatttagaaatcagccctgaaatgtggctgctattttagggatcatcacacatcatctgctgtttggtgttaaaccctgagccgctgttatttaacactgattaataaatggcaggttgtcagtaccggcagtgaagacacttcaaggagccattgttcttttaaattaaaacatttaaacatttaaatccagggctggttctcatggctcgttttaattattccttttgtcttggcatacctttcttctcctgatcacacagctgtcacgccagcagtacctggagtcggaacacgacagccctttccctattagctgcca

SEQ ID NO: 408 - DNA, 481 bp, Homo Sapiens
gggagcagcctgggtactctccacgctcggcacaatccgcccgggctggcagttagagaagccaggcagagaagtgcggccagagaggctgtccaacccaatttccccgggctgggttatttgaaagtctaaaactccctaataccaagagacgggcggtatttaaatttaagtctggctcccaaatgaaatcttttcgttcaactgttcaactttatttggaaatatgaaatggtaacttgattacatgttaaggtagctttggtcgggggattagagccgaaatctctgcccctctgagttcatcctccagcgaatggaatccatccaaattaggaatcagttctgctaccgcgggcgagccgcaggcctggtggcctggagggtggggcatcttgaggctgcgggattccagttactctgcatggccaggataagggggcgcccagagctctgcgttccccaagggaggttggaagga

SEQ ID NO: 409 - DNA, 425 bp, Homo Sapiens
gaagtcagggtaggggatgttcttcgaaggccacactccatggcaggcatacagcagcacgcttaaacatggttcctgttaaggctagagaggcaccattcacatagaagaagtcatcatcgtgactctacccaccccgcgcccccaccgcgtaattgaatgctgagtgtggacggcacttcttccagcacttggctgcgttaccgtgctcagttggcaagccttgggggagaagagaggttcagaaggaagaccatctgagtccatcagaacaatgtgtgcttttaacaaggcaggggcgcccaaactcagtaggtccaacagaccaagttatgctatgaaggtcttgtggaccacctacccccgccaaccagtcaccacttaaaagatgagaaaacgccagctcacaggccaaatgggaggca

SEQ ID NO: 410 - DNA, 492 bp, Homo Sapiens
ccaaatgctccttttccctcaagccgcaagggacggacagcactatctgtggcctttgtggttggcatttcccctgcagtgtcttcctgttaggagttctctcagataataagctgcagaagagagcaggagatggagcaggcactgtgtgcatcggattgaaactcctaagtgtctcttgcacctgccccagtgccagccacagcccaggccttcaacgccctccggcctcttatgctggaagtctccttagcagatggcctcatggccagagctggcctcctgtgagctctgttgctgccctaactgcagtgcctatcatctgagccccctctcgcgagccaccttcactcgctaaagtgaatttaggccgactttgtttttgctgtgtctggcttgctatctattctttgttatgagtgatctcaaatatgccctatgatcgaagagttctgagcagagagaattcagcagcccttcaggagccacatc

SEQ ID NO: 411 - DNA, 489 bp, Homo Sapiens
gaacagaatccagggctgaggtcagccctgagtctgcaggctctgccctctcacaaaggtgagtagatgggtctggagagggctgttcatgctatggaagggcctctatgccatcgaggctaaaaccaaagcaggagcaaatcagccctgctagtgtgtacagtcggcatcaaagaggcaacaacggtagagaatattttctgaaagacacacatgaaaccagtaacggcgatggtctctggaagaattaggtcagaagcagacttaatttgcactgtgtacattctttggtatcctttttaattgaacgcatgtgaatgcattacctattcaaaaataaatgtgtaaaaacacgtgccacgacaaagcaaaatgaggagacagtataaaaaagacaaggataattttaaatttctcctaataaaacgctgtttaaaaatctaagaggaaaaaagggtaggctccagctagtggagagaacaactgaaa

SEQ ID NO: 412 - DNA, 417 bp, Homo Sapiens
agtgcagagaggccactgttgcccccaaaactcatgtgcactggagcatcttgcccctgtgtgctagcattttatccactttccttccagccacctccacccccaccatcaaccctggcaactttgtcctgtaactaaaatagcctttagcacatggcataaccggagagcttttgacattcctctttggagattcatgtctgcgtcttgggggcattcggcactagtgatgggcagccctgcctgctgactccccggctgtttctaattggatctgagtattctaagagaaactgtaaaatgctccaagacagaaaggccccacgaggtcctatccttagagccaaggctgtagcatttcctatcaagcagacccttaaccggcgcacaggaaggagctgagaagagtgagtatac

SEQ ID NO: 413 - DNA, 2844 bp, Homo Sapiens
ttgtattagagaaaagccagagtagtggagaactgcagaggaacgcggggcacctacataaatgtcttgaatgaatgagtgcacagagtgatagacaaaaagaatcagagggccgggctccgtggctcacgcctgtaatcccagcactttgggaggccgagctgggcggatcacaaggttaagagatcgagaccatcctggacaatatggtgaaaccccgtctctactaaacatacaaaaattagccaggagtggtggcgcctgcctgtagtcccagctactcaggaggctgaggcaggagaatcgcttgaacccgggagacggaggttgcagtgagccgagatcgcgccactgcactccagcttggcgacagagcaagactccgtctcaaaaaaaaaaaaaaaaaaaaaaaaaagagagccagggctcctcttgaagcgaagagggcaaagggcaaaggggaagcacaggggaacttcgcggcgccctctgaagctccctctcgaatataatcgcaacgaaaaggccaacgactagaggctttgcgaggctgaggctgggcttcgggaggggattgccctgagaggtccgggaggacttgctgtggaattcaagcgaccgtgggccttgagggaaccggggggcaagacacccacccagcattcgcggaatatttcctcgaattatttcggggaggggtgaggccggggcagggtggggccttcttcggagggggcgcggcctccgagtaattaatcccgtctttgttgcgttttgctcctctcctgtccacccagcagggccagcccagggcgcgctaagagtccagagagttcgtttccatggtgacgggttccgcgaaggttttcctggggtgaagaggcagggcgttgaataatcgccatggcgacagcagcagatgacggtgtcccttctgagtgctcctacctagagttaagggatacctgagggtaagcaaccgagtgacgaaacaaagaaggcggggcctgaggacagaacgccaaggttaggggaatggagccaggcaaacgaggggcggggctgtagatgacccggtcgggagagggccacggtttgttgggggagcggctcgagattgcgttctagagaggaaccagagagagggtctttaacctaaatataaatgaatgactggattcctgaagaatccggaatggcttgttgattggatagatggatggatggatggacggacggacggaccgatggatggaaatctggctatcactgacgcctgagctccccaccctcttgggccctccacctccggagccctcactcgcttgtgacagctgtacgagaaatacatgcctctcctaggagcaaaccctcaacccaaacaggcagcacagagccagtccagcacctcacactggaggcactcagggtggagcccaggtcgatgagacggcgtaggatgaggctttttggcccagctgggaaccacttctttccagatttcccgtccagagtctaactttcctttctcccagcgccatcttttctgctagtttgcccagctcctcagggtgcctggactttcaggcctcaccttgtgtccagtatagcagggtccagcgccccagcaactgggaaggtctgcatctctgctgatcatcccctggaactgctggaactttgctatatagggtgaggagtggacaggggcctgcttccacccctgggtggggattagttctgaaaacaaacacagctgctctgaaccttattgcatagggagtaatctgaagtaggctgaggcccctggatgggggggttcagaattcacatgttgagcctacctttctttccctacccaatttcaggtatctaagggcccctcaggtcatccactgttgtctacaattacatgcagtaagatgggggaaagtggcagtaggggcagttcagcagagtccctaatggccatgtccagggaggggtgtcctttgtccccagggtatgggaggtgagactgggcacccctatttgctttttttttttttttttgagacagagtctcactctgtcacccaagctggagtccggtggcacgatcacagctcactgcagcctcaacctaccgtgatcctcagccaagcgatcctcttacctcagcctccagagtagcttggaacacgggtgcatgccaccatgcctgggtaatttttaaattttttgtactgatggagtctccctatgttgccctgtccagtcttgaacttctaggctcaagtgatcctcctgccccagcctcccaaagtgctgggattacagatgtgagccaccatgcccagctcctctttgcatttaaggagcttcccttagctgaacaaaaatttagttttcaggggattaactcttctgttggatctgggaggatgggattcagaactgtgcagctggctccagagcttcatgttccacacttcccatcgtttgcccccctggaatgggatagaggagagggcaccagtatcagctatccacctgtttgctaacggtggagcattatggagctgtggtcacctgcctcttctaactccaaatttcaggcatcacatcacctgattaagtctcagatctccacttccagtggagactcagtatatcttcccttaaggagttgcagcgctaatgggggcacacacagcctctgccctggggtttcaagaagagcttcatgcactgggtttggagaagacacagaaatttagccagagactccatctaggacattagaacattgtcgcccacgttaagtatcttgctcaaaagaatggagttggccgggcgcggtgg

SEQ ID NO: 414 - DNA, 2457 bp, Homo Sapiens
cgttatcacaatcccctacaaaacaggagtttttgttgttgttgtttttgagacagggtctggctggctctgtcgcccaggctggagtgcaatggcctgatcacagttcactgcaacctcgacctcctgagctcaagcgatcctccctcctcagcctcctaagtagctgggattacaggcgcacctgaaaagttaagcaggccaaagcatttgtgtaaatggcccgagcacacattttaagtgagaaccatttgaagactccgagtttgcctgcgaggattcccaaagggatctgggcagctggtggccccgccccctctcttatcggagccccccagcccctccgttctccccacgcctaacttccctccggtccccccccaaccggccccacgccgctgattcgctcgcagcttctcctcaccacatcctaaccatggctgtgtttctgcagctgctaccgctgctgctctcgagggcccaagggaaccctgggggtaagcgatccctgggagagttgtgatagacgcagaggggctgaagcaagataagggccgcctagtagggtgggttgtgtgtgggaagatccaggatggctggagtgcagaacagagaagagaaagaggagacgggatggagggtcgtcttgccctgtggacgtgccctaaccacagcctccggcctctcctagcttctctggacggccgccctggggaccgggtgaatctctcctgcggaggagtctctcatcccatccgctgggtctgggcacccagcttcccggcctgcaagggcctgtccaaaggacgccgaccgatcctgtgggcctcttcgagcgggacccccaccgtgcctcccctccagcctttcgtcggccgcctacgctccctggactctggtatccggcggctggagctcctcttgagcgcgggagactcgggcacttttttctgcaagggccgccacgaggacgagagccgtacagtgcttcacgtgctgggggacaggacctattgcaaggcccccgggcctacccatggtaggtgcaggcctgtgcgcacaagggtacttaactccgacacatacccggaggagggaagagggccttggctgggggttcttgagcgggactgctggctgtccctcgtcaaacccctgacctcagcatccctccccgccacgcctttcccccagggtccgtgtatccccagctcctgatcccgctgctgggcgctgggttggtgctcggactgggagctttgggcctggtctggtggctgcacaggtgagcaggagggacccggcctcgttaaatggggagtgaccagaggtggaaggggcaggaccagaaccttcgcaaaagaaagagctagacctagagctctggtcctggcttggcgaagaatgggagaggtcaaaggtgggagcgaggccgctggctggtgagtagagccccaccagagcagatgagctggaagtgcagcagagttagagcctgggctggactgtcggtggggtagagtctaagttgtttccggtctgagccttcaagttgctgggctgtccttggcgtggcgagtcccaggagaaccagtgagacaagactggtggttctcaaagactcatatgtcccttacaggcgcctgcccccgcaaccgattcgaccactccctagatttggtgagactaattccaccccattttctttctcctacatgcccactccccacccctcaattcctgagtctgagcccttgctgggagcagacacgttggtcaccttctctccatccttcagctctgtcccccccacatagctccacttgtgaaaaccgagccccagaggccagtaaaggaggaagagcccaagattccaggggacctggaccaggaaccggtaagggcatggggatgggaaggggatagccagaatctctgaggaaaatggaccaaaaaaaaaaaggcctgaaccccaaggaagactgtggagaccatcttgtcttcctccccttcctcctccagagcctgctctatgcggatctggaccatctagccctcagcaggccccgccggctgtccacagcggaccctgctgatgcctccaccatctatgcagttgtagtttgaagggaagcccttactccaaacctcccaagctaggggatcccagctccccataatccctctcccctccttggttcctcacctggaagaggaaggcaccatggtatagaaataagtgctagactgggagttgggagacctgggttccaggctgtctctgccactggtcttacttctaaacttactcccatctctcctataacctccatgtctccctcaccaccagtgtcctctctatacccaatcaagccctagctccttttttttttttttttgagacggagtctcgctctgttgcccaggctggagtgcagtgacaccatctccctcact

SEQ ID NO: 415 - DNA, 2898 bp, Homo Sapiens
cattcagtgtccccacctaagcaggagagcacagtctcccaggccggtcacttcatttgtcagatgatgatgatgatattgcccccctcccagggctcttgggagaaccaagtgagattaaccacgtccactcaaggctctctagctcttggcctccatgactggttttctctgtgtctgtgcagtttactccactgcttctctctggcggaacccaggaggcaggggacaaacaagactggccttccagggtcagcccagtaggcttgaaagtaagtggtgggaggcccagggctccccgactacatgtggaccccaagcccagccccaggcatgcaggtttccacattttgggcagctgggtggggtacgaagggtctggctgggagataggatgcctggttctaggtcagcctccgtctcccacctgttgtgtgaccctgggttgtgcccagcccccagctgctccccatgtgtaaggggagggccttctatggtccctgctcaaagcgcctgggctccatgctccccagtggattccccagggttgggtacagagtccagcttccagaccaggattggtttttgttttgttttgttttttttccagacagggtcttctctctgttgcccaggctcaagtgcagtggcatgatctcggctcactgcagtcttgacctcccaggctcaagcaatccgcccacctcagccccccgagtagctgggaccccaagtgtgtgccactatggccagctaatttttgtatttttgttgtagagatgggatttcaccatgttggctggtctcaaacccctgggctcaagtgatccacccaccttggcctcccaaatttctgggattacaggtgtgagccactgagccaggctgttttgttttttaaggctagtgggagtggagaaggaacaaagaaatctgtaactggttacgatcaattagttgtcaacaccactgcactcggaccagcccagaccagggttttgatggaggaaggggatggtgtgggaaatgcccacccaggccacacaccttggcttcatctgcctcctggacttcgagcggcaccttgacaggatagcccgaggcagcacggcgttcccgcagacgctgggcctgccgctgggcctcaactcgcttggcttgcagcttgcccagctcccgtgcagggtccaccagcccctgaagctgcaggtggatggagcagcgatcagaagccagagccacagcgcaaccctggggggcgggagcccccagggccagaacagccaccacacctgcgctggccagggcctgcacgtagcccgacaccgccgatgccagggcgcccgtggcctcatccgccacttccaggaaacctgccagggagggagaaaggtgaggcctagctccatggagacaggaaaccaagcagtcactgccggacactgggtcccagagtaggctgaggggacagtgggatggggcggacatgggggcctgaggctcacagtcaggccggatccgggtgaggttgtagtcggcccgcagggagcgcacggctcgcgtgatgcttagcgccagctcaagggcggcttctgcctcggggtccttccaggagcactgtggggtggaggagggggtgagggggcctggagggcaggtcagactcccctctccaggccatgccatacctctgagggctccgggtagggggtaacacagaggctagggggagcttgcggcatcctccggggcagcctctggaacagctcctccgtcacgaagggcatgaagggtgagagcagccgcaggccaacgtccaggcaagtgtacagggtctggcgggcacactcagctgccacctggtccaccccattcagtacaggtttcaggcactcctaggggacgagaggtacagggctcacggctggaggtctagccttgagccctcgctgtgcctgtgaggactgggaaggggatgggttggcttaggtctcaaggccaactctggcaaaactgagcccagggctctgctgcccacctgcccccaccatcccctgccccgctgtgctccttctcaccaagtagacatcacagagctcatagagccagaagctgtactgggcagtggtgacggccgggaagtcgtaggcctggaagccttgattgctgagcctcacagcctctgtcaggcggctgcggatccagcggtccaccaggctctcatggcctccgggcttggggagagagggtgtatcagccggcgggccaggggagggtgccagaaccccatgggggcaggagtcatgggcaaatcttcatccagagtctgatgagtccaaagcaaccacctatgtgccaggatctgggaagaagtgacaggccccagcccccaatgcgctgggctttccctttaactgtctgtctctgtgtctatctgtccccccagctacatggaggctgctccggacaggggtacagcctgtgtgagtgctgccagctttgctgcccaccaggcccttacctgggaggtgggtgagggcacaaaacccttcccaaggccacgaagggcaaacttggtggcattccagagcttgttgcagaagtggcggtaacccagtatccggttcacatccaggttgatgtcacgacctgggtcgggggtgagatgtgagtcctcatcaccctcttcccagcccatgcccaccagaggctcagggtggagaagagggatgggcctcacagaaggaggaaggagtggctgggagggacgctttgggggccataccctgggacatgtaggcacataatccaaaccggagagcatcggtgccacattcaggaatccccgctgggaagtcagctttctacagggaagaggcagggggaggagcgtcctca

SEQ ID NO: 416 - DNA, 3108 bp, Homo Sapiens
tagacacacacctgccagacactgctcatggcactccctaggaagaacagcatgtgggaaaggctgccaaaattgttcatgtaaaaattacatcaatgctgtcttcctcggtgctgcctatgcagctggcagccatctcttcctccacatcatggcctccctcagactcctcatgaaggataagatcctcaaaaagaggaccaacaagttcatgaggcaccaatcagactgaaatgtcaaaattaagcataactggcggaaacccagaggtcttaacagtagggttcgtagaaggtccaagggccagatcttgatgcccaacattgcttatgggagcaacaacaacaacaaaaaaaacatgctgcccagtggcttccagaagtttctggtccacagcctcaaggagctgaaagtgctgctgatgtgcaacaaatcttactgtgctgagatcgctcacaaaatttcctccagaactgcaaagtcatcatggaaagagtcacccagccggccatcagagtcaccaaccccagtaccagggtgcacagctaagaaaatgagtagaaagttcatgtccacgttttgtgtgtaaataaaaccataaaaactgccaaaaaaaattacatcaatgcctctaaacccaaaggactctacccccacaggtccctggttgttgtggtgattttcattgtgtaaaatactttccacatcttttgacaccaagtctttctgcagccatgtttgaaaattaactttcaggctacagagtctttcttataccaaagttgaagaaagttttaagaaatatatttctacatctcctacatgcaaaacaacaggagcaagttgaggaattctcaagaaactggtcgagaagagagagcgcttagctatggaaaagagaaagaaggaagggagggcttcctggaggaggtggcatttgaaccaggactgacatcaggatggaaatgtcagtcagggagttaagtagggggagcagctccgccctccacgtccccagctcctcccgcccctgttttttctcccagtgaccccacgtgaaacgtctccgcctcctccagccaccagcagaagggactgccttcccctcagtgctcgcccctccctagtgatcactcagtgcccctgagctcattcttttcagtaaattctctctctgcgtggtgagaaaacaggcctggagaggctctgcgacccgcttaggaccacagaactcggtactaggaaaactcctattttaaaatccagccctgggtgggaagatttgggaagaatcgttaatattgagagagagagggagaaagaggattagatgagagtggcgcctccgctcatgtccgccccctccccgcagagaattaccttttccagggacggcaggaatgctacgcgtttaatgggacacagcgcttcctggagagatacatctacaaccgggaggagttcgcgcgcttcgacagcgacgtgggggagttccgggcggtgacggagctggggcggcctgctgcggagtactggaacagccagaaggacatcctggaggagaagcgggcagtgccggacaggatgtgcagacacaactacgagctgggcgggcccatgaccctgcagcgccgaggtgagtgagggctttgggccggcggtcccagggcagccccgcgggcccgtgcccagggcgcaggagcagccgggttggcctaagggaccttagtgccgggcggaaaggggactttgggttggggattcatggggggagcccatctggagcttgtcaggggagcgagcgcggggacctggactgggctgagcatggagtgaggaggacgagagcagagagacccccgggacttcatcaggcctggcagctgactgcatgtggggtgaaaaaaggaagccacaggacagcgcacaagggtatggtgtggagatggaggtggagatggcacagcaggccacacagagaagaaacctacagggaggtagctgggtttgaggtgcttgaggggcagatgggtggtctgatgggcaggtagacagaagggtctgcagccggggaggagactgagatacatgagaccatccagggagaggggacccagggggaagagcaaaggaccggatcctgggaactggacagttgtgatttggccaagacagaaaagcctgtgaaagagaccaaaaaaacccaagtgcagtgtgaggagaggcccgcagagaagagtcttggaagctgaggggaggtgacctcagcagcacagtggacagcggtgccagtgacttgggaaggtcagaaaacagaagatggaaagtgggtttggaaaccagggagacctggggagagcaggttggccgcagcggcaggagctggaatgggagggggtgcatgaggctgagtgtggcgcatcctcctcggggctgagatggattttacttgtcttgggttccccacggctgtcacagggcagtgtctcagttcattcgtctttttccttcaggaagtctgggtgtaaagggatggagagaggtgaggtgtgtgcagtaagaggatttctcaaggatgggacaggaaggccttggagctttggcttcctcctgtgaacttgtggggtggggagcctggtgcaccaacctgagggacttgagggagtagtatcaggatgtgggattgagccctggaccttttttctagaaagaggaaaaaaatgaagggaggaggaggaggaagctggggagatcacacctttgattttcttgttcctggaaagtgaaaggaagttcacctgctatgagtgagaaggtggacacactgggtggggatgaggtgagtgacatgagcttaggaaagttgctgaggtaattggttgagagaggtgttcaaataaaaataacgcaattggcaaaaactgttactaagactttgtagaggcaccaatcagtgacatggcagcattttctttcacagtaatcaactgccagattgcagacagccctgatgccagcctaaggagtgtgggtttctcctccaggcccgcaggtccccaacctcactcctctgaagactcttctggagatcctctgtgatgcacagat

SEQ ID NO: 417 - DNA, 2897 bp, Homo Sapiens
gattgcttgagtgtgggaggcagaggttgcagtgagcctcgatcgcaccactgagctacagcctgggtgacagaggcaggccctatctcaaagagaaaaatattatctctttcagtggatctcatagtgctaaggatctgtgcaagctttagagatttctggaaatgatgacaacatagttggggaaaaatagagagaaatgggaggaagaggtaagcagacatggctaattaaggaaagctgagggcatgatgggtgaacctatgaaactgaggacaagaccgcagtaagacaatgagtttccaggacttgcccattgactttcagccctatgagatgtgaacaatgtccacattgtctcggtaaccccacacagtatatagtttgaacattattaaatttctgatatttgattatttttgacttacaaaaatagaatttcatataatttatactacattagttaaatctcttctgtcatgtctagttagagcatgtaggagatgtaggagaaacaagtatagaaaggttaaaaagattcataataaacactaacctgggccagtttttcagaggatgccttaagttctttaggcaccaaagaatacctcataagtgctctgtatctgtaaggtgattccaagtactaatgatctcagcttcagttccagggatttttccccataagaaagaaagagcactaagtataacttctgtcagacaacctacatacactacagggatacaggctttataaacattggagttcagaaagaaaagaaaggagatactagggaggccactgggtccatcctcacatatgaggaagaggggccaacaccacaggtcctgtggaggacataacccaggatcgtctaggagagaccctttgaattcccttgactcccacaaaattttcagtaaaaacctccttttgtctgacataagtcaacataataaagggaattgctgtatggggaatttattttagcatccttatttccaaatcctctaaagaccctgagtacatgtgatgcaaaggttttattggtggagatttgagaagaaatggcctgtacaaaggccccttacacaagtctcatggagagggcaagtagccaagttccttttgtggaggaaataatttgcgatcccttgataaagatgagcaatctctgaagaaaacctcacaatttcttaagggacatggcctgggcacaatgttaacacaactccctatattcccccaccccatagtagctcagcaccctcaatgtgctcttacgtcgggtgtccccagcgaaagccagtcgggagctcagcaccatcagtgtcactgtcaacgctgccaagctggagcctccagggagcttcagacacaccatgctggagaagaggacaggaccaggggccagaggagcaggcaagtctcactcagggagaactatgacccccctccacccacattccaaattatagggaggaagttactgatttccttgctcctggattgggtaatctcgtgtcggagaaccaatcagcatctgagttcaacagcatcatcagttgctgctcagagatgctgtatgaaggtcctcttctgaaataatttcattctttaaaggattgttttaatttagtacttgaaaggtttgaaccagttgcatgtaaaacactttaattggggagctattgtgagccagctctgtgctggtcagtgatgtgttcacaagtttgagccttgtaagagcattcatttcccacttgacaagacaactgtttgcagaagtgagtgtgtgagtgtgtttaagagtaaaggagacggagggaacatggttgtaaatccggagtcctttaatcttgtctttattgtaccatatcttaatgtcacagatttgggaaaattacttcatgtctcacagttgaaatgaaggcactgcgatctttcaggtctttcaatactggaaaattctgtgattctctagatgcctcaaggagcggcagccccaggtatctgataatatgacagaatgacagctattgactagagagtgtaatatgtacctatttccaggtagtgatgtctttaataagttaaaggaaattgaaagtctgttaataatttaatctgagtaaaaatatctttttcaagcgtgtctcctgatgctgcccccaggtttagcggcacctccagaacacacacaggaatgggctaacaggggccacctatgtgcaatggagggtctgaaggtgcctttgtacggcacttaccctaacaatgtgataaggtcaagtgtgcaatccaggtattcgtgggtctgagagatcgatcaaagactctcaaagtcagccgttcacagaacaactcttttttttcttcttcttttttgagacagagccttgctctgttgccctggctggagtgcagtggcatgatcttggctcactgcaacctccgcctcctcggttcaaacaattctcctgccacagcctcccgagtaactctgactacaggcacgtgcctccacgcttggctaattttttgtatttttagtggagatggggtttcaccgtgttagccaggatggtctcgatctcctgacttcgtgttctacaccagcagtgtaaccccaaactgctggggttactggcgtgagccatcatgcctggtcacaattctgttttaaaataatgaatattttatatgaagagtgttcagtccctcattcctggttcccattatgatttcctcatttgattgaggctatagcactttactattatgtttctcttgttttatcataagggaggatataagacgactttgctaactaatacatttttgaatgttcaggaaagagaacactagggaaaactatgaattacatcagttgatg

SEQ ID NO: 418 - DNA, 2884 bp, Homo Sapiens
ccacagccctttgtctcccagcctggtggtcagttaccttgacccctcgaggtcctgggtatcctagaggtccctgaggtccagagggaccctggaagataaaagagaggcatttataaaggggcctcagagtgtcactgtgggggcctccaggggtggaagaaatggaagtaacaacattgctgtctgggtagggttacggggcacaggaattgagaatgtggcagagccatatgaataatgagacaagggaatcccaaggactttgaggctctagagtctgagtggagactccctcaggggataaagacatggaagatctcacctggtttcctttggttccagggggaccttccttccctgggtgaccctgggagtaagggatagaaaatgtgaccagtggcccctgtcaccctctctgcacccctccctacacttcttccaacccaaatttcctgtgacctagtgaagccaactgtccatggacaagcaccaccagtgacctttcagtgcaagggtcactaaaggagctctgaggtcatgcactggggtggaaggccaaggggaactggattcggaagtggggtcccactcaccgggggtccgtctgagccaggcatgccggggagccctggcttcccttgaggaccctgcaggaagacaaagaggctcagggtcactagaggggtcatgtctggacacagacaaaatcccagcagacatttagggttctccctacatccccactctaaaccccctgtcctccaaatcacttagtcacttaccttctctccatgagggccgatggcaccctggggcccgggaagaccctacatacagggaaagagaagtcacaggggcctcccagggtctcttctatccagcctcccggattcaaagcatgagcaacaagggcctgaaacccttaatttcctgtatccttccagggtctcacccattgtggaagcccaagggaagtcatgaaaattggggaacggagtaggggcaccgctcacctgggtcccaggggtgccctgttgtccaggaggtcctggctctccctggggtccctagaaacaggtgaccaggcacaggtcagaaggagatggagatagaacacatttagagcatggagctgagtcccagcagcgatagccaagaaggcaagagcaggaagcaggcaggggtcaaaatggcggccaacaggatgctggcagggacctcgggggataagaatgggggtgggatctcctatccatcactcaccaagctccctttggggccctggggaccatccatgcctcggacgccctgaaacacaagatgggtgtgagcagcctgaaggtggcccggagggacctgtggttttcagaggcccggccattcccgagggtgtgacggtcagacctccaatccatcccaaacccaagcaaacacagctggcccaggcctgcagtgtgtgggactgtggatctgtgggcttgtgggctttggttttgtttttcttgaagatttatttcctatgcccagagccctcagggcaccacgccacatggccctccctgtgcacggggagcgaatgctgaggcagggcagtgtggggccagagcagggggagctcacagggaatgggaagcatgccgagagaggagagggagcaggaaggcagctagaaaggtggagagttggagaggtcaaggggtcacctcagggtcagaagtcagggagtcacttacagggggtccaggaataccaggtgggcctttggggccaaggagacctcgaggtccctgcattcacggtgaggggaggagacggcatgaatggataaaactgtgtccctttagtgctcatgtccccctcctggcttccccagagccccctcccccagcaccagcccttggacactcaccgactctccaggcagccctcgaggcccaatctccccgtcatctccctggaggaggaggacacggtaaagctgctgtgccttctagacctcccctgcacccagcccctacatttgccactacacttaccctctctccatcctcaccagggggaccaggaaggccctgggcaccagtatcaccctgcaaaatgggggaactcataagaggggcttcagagcccccaacacaggcagacaccgaacctctgcacttagcccatccattactttcactgagctcctgccaagcctccagcctcccttccctacctatcctcactcccatagaagatctatccccaattacaacacacacccactaatgtactcaccctatggcccttctctccagggagccctgggagtccatcaaaacctcggtcaccctaggaggaggaaggatagccagagtgaggacacgaccctgtccaagcccacccctccctactgcaccctgagctgggggggtgctgatcctggggaagcctggagaactaggtcatccccaagaaacaactgagcccagcgtgggctgaaggctacaggcttcagggaggggcccaagcctgttaccttcactccaggatctccaggcatccctcgggctccatcagcacctgcccggccctgggagaacaagggaagtgtcagaacaagcagggccgcagtcccctaccctgcaggccctgtctccccacaacacccatccacccctggggcactcacccttcgcccagccttgccaggagggcctgtgaggccctgaggtcctctggggccctggtgagaggagagatggggtggggttaggaggcatagggaggggagtgagggagactgagctggtgaacagatatgggggtgcagtggaggaaagtggtcacctgaggtcctaagtctccagactctcctttcaggccagggctcccaggt

SEQ ID NO: 419 - DNA, 2476 bp, Homo Sapiens
tggagagcagaggaggctgggggtggggagcagatgggggtggggaaggaggggagatgggggtggggaaggggggcgggaggagggttaggaatgggggaaggaagacagggtgggggaggggtgggcatgggggaaggaagacagggtgggggaggggtgggcatggggaaagggagacagggtgggggaggggtgggcatgggggaagggagacagggtgggggaggggtgggcatgcgggaagggagacagggtggggaaccgagaagaaagacagtggggggggatggaggaaggaacacagggtggggtggggggtcgggatgggggaagggaaacaaagagtggtggaggcgtggggattaggaacggagacagagggtgggggaggggtggggtgggggaagggagacagggtgggggaggggtgaggatggcggaaggtagacaaggcgggggaggggtggggatgggggaagggagacagaagggggggaggggtggggatgggggaagggagacagaaggcgggccagggcgggaatgggggaagggaaacagggtgggggtggggatgagagaagacagaggttgggggaggggtggggatgtgtaagaaaaacaaagggttggggagggggagggaaaagaggcagagagtgggggagggggtggggatgtggaaagaaagtcagaaggtggggggtgaggggtggggatgggtgaatacgtgatggctgcggcctttcccaccagacagtagggtgggggcagggtggaaaaagggggtgcggtgggcgaatggggaggcggggggctgactgggagtgtgggacggggtgttctgggatcacggagacgtccaagtctggactctgtcctgggtctgtgcttctggcgacctcccttttcttcagtgggatgcggggtgcaggggccggttccaggtcccctgagctcaagtctcgccccaccccgccccgcaagtctagaaaagatgcccctgcccttggctgggtaatctctggatttacctactgtctgtaaccccccgggctgaagagaccaccccccgggagtcaattaacttactctctggagcgcgcgttcctccctgctcccaggagtcggtttcccaaaactttctgaggcccgcgcatgctcccctcgactccccgtgtttccactctccacagaaatccacgcattcacgcccctcccctcccccgagcctgcagaggactccgccctgctttccctacattcagggctgctccttttgtcgccaatacaaacctgttgacaggtcacgcctgggaagcgggtggggtgtcccggagcggtgctgaggcgctgcaggcccggcttctggctgcgggggagctgtaccctgaagcctcgccggaactcgcgtctggggccagcagggggcactagagtcaacagggactgtatgcaaaacccacttcctcccaggccctctagggggatggtcaggcttctgcagagatggggaggatcctttcctggtaaggggagagggacgggctaggagccaagcggaaggaccccgtgttcaaggcccttcaagggacgggacaggcgaggaatctctttgagtcttttgaattgttttatcagtcaggcctgggaagtactccgcctccacaaactctgttttcctgaaaggggtcgggggggggaccccaacatctcctgccacaggctatgatgggcatggtggctaagagcaacaggccgcgtggtgaggctggctttttgtggctctgccctgccattccccgaggcatccccatgccagtgaacagagctgcgggttcccagctgcacagatgaatgcacgaacaaaacataggtccatacaaaggaagtcattgcattgatccagattcgacctgggattgtcgcataaaacagggctgataaaaaccgtcgtgttttcaccctggaaacagagactcagcctccccctctttgcttgaggcattcagcaaaggtttgtccttgagtggctgtggatgctcaaggacttacgatttctgactttataaagtttagggtgaaaacaaaaaacaaaataaggagaccattgttttaaagtggccgttgtagctaattatctcaagaaagcaaacaggctggtactgaaagttacacaggcgggcggctccctgggagggttgcccagctctccttttctgagacctgagcagggagcagccagaggagcttgaagggatggtgttcagggcatgggaacaggctgcacacatcttcacggagtacggtgcttgtccagtttgagaagggaaagaaacgggagcagagggctgatgagaaggcagcagatggatagtgcgggattgaaaaggggatccatttgaagactggccaccattatttattttcatcatctgattgctgttgctccattgagatcgatgcgtggaga

SEQ ID NO: 420 - DNA, 2391 bp, Homo Sapiens
ggacgattctgcccagtgtcctcagtctgtcccctcaggtcatggtcccaagtgaaatgacagagttcacagccctggtcttggctgaggtccaggtcatagtaagggcatgttcttggggccctcgacctgaactctgaccctccgggcagggaagaggaggttgtcccctttggttgtcctggctttggagtcctttgcaaaaatattttgggccccctgccactggctgcagaaatggctcgacggggtgtgtggggacagacacccagaaggaatgtacttttgtggccttggtgtccgatggggctgggggagagtgctctccactgacccagcagcacacccatgtgcagtgcgcctgcatctgtgtgggggcagccacaccccttggctgctgcttccttgggctgcctttctgggggcatgtgactggacctacgaggtctgcactgagctccatttgaatgatacctttcctatcccatttcccccacggaagcaccgcttcagggttattcagtcctctgcctcatggctgaaattgctcatctcgtctgcagatgtctactatcctgtctacctaatgcactattatgtattgattctccatgagacagagagagagagagactatcagatagtttacacccaaagggtaggtttttgtatatttttccagccttttttattaaggggaaggggagagtttaaaaacccaaaccgttgtggttttaaggtgtttcatttttaaaagggagagagaatctatttaaagctatttcagatcagggattgtcatccttttttgtccaatgtattccttgttctttaaaaaaattttttttagaggaaactaatattagtctttgtgttcactaactcttctggtcacttgtatttatttattcattcattcatcagatatttgttgccatctgaaagaactggcccagtgggtctgaaagctcgcttgagaataggaaacttgagacctggccccctgtgggtaggagaacaaggaccacctgggttctccagtcttgaacgagaatctcactcttatcagaatgtttttcttaacctcagcgtatgatgaggaaatttacttatctctagctaggatttgacaaattccaacatcaaatgatcaaaacatttgccactgaggcttcactggtgagatccgttctccgtcctcgggtgcagtcccttgggggctgctcctcggactgcgccccgcacacctgttatcgagggtgtgagaagcgcctaagctggtgacatgtgatctgggacgccttcatttctcgggccaggagtagcagctgctaaggacagcagcttgcattgcgtggttttagggaagcagggtctggcttttaatatgaactgcaaaaagcagcttctcactgatatttttttgttgttgtttctggggggtttttttgttttgtttttaatgcctttgagtgcatattttcttcctcgtctgaaaccgaactcccaaagtggctttctttagccctggctggaaaaccacctctcaatagccttaagcaataaatagatgagtagagaatgtggcttcaactgggcttattaaagtaagtgtgtctagttttcacttgaacaagtgatagctgcagatggcgaaagaaacccatttaatttttgtagcttacaggtggtagaaacaaaaatgcaattttaaaaccttaaataccaaataccaaccattgccttttttttttttgagatggaattttgctcttgtcacccaggctggagtgcaatggcgcgatctcacctcactgcaacctctgcctcccgggtccaagtgattctcctgcctcagcctcccaagtagctgggattacaggcatgcgccaccacacccagctaattttgtatttttggtagagacagggtatctccatgttggtcaggctggtcttggattcccgacctcaggtgatccgcccacctcggcctcccaaagtgctgggattacaggcgtgagccaccatgcctgcccagcaataccaaccattgtcttttaaattcgtgttggcttctcagacagggagatcactggaataaaataaccgatggtcttattttgtcacacgtaaatcaaaagaaatgtcctctttgaagttgtaagactccaccaatgacagacacccttttcggtggactctgagtggtgtgtagtggttttatagccatggaaactaggagtatctcactttccactgagaacccctgcccccaatccctctaagttggggtgtggcagttgggcagggtcaagtgacccagccctggctgtaggacagccatatacagtgaagagttctagaaccagctaaaaatggaagtttgggt

SEQ ID NO: 421 - DNA, 2483 bp, Homo Sapiens
aaaagagaaatcttgatagttttttaattatgtgggacacggcattattttatcagaaaactgtatgttgaaaatattgcattgttgtgtatagatagagtggcatggattcaattttgtatgcataaattaaatttgtaatgtttaagcagtggattagaattttaacatgctttcacttcatttggtcctgttaggtaagcaagggatcttgtgtgttggaaaaagaattactttggtgcagccgcccaagaggagcttggggaggacgctggcccgcgaggctcgtcgcagacaaggtggcggcgatgtccgggagccaggccagtgccgcggcggcagcgtcggggcctttcgcgcggcagggcggcctgggcttcggcctcccgccggttccctggaagcgggcccgcggctagcgcgggagcagcagcagagatggaggctccagcgcctctctctcttccccgtccgcctgagccaggggaggccaggcggcccgggtgtctggagccgggggtctgctgtccgagaatgagaattttcttcccccagaacgtggagactgttcgatcaccaggagcacaaagttatcattgttgggctggataatgcagggaaaactaccattctttaccagttttctatgaatgaggttgtacatacatctcctataataggaagtaatgtagaagagatagtgattaataatacgcgtttcctaatgtgggatattggtggccaagaatcttttcgttcttcctggaacacttactatactaacacagagttgataatagttgtggacagtacagacacatgatttctgtaactagagaagaactctataaaacgttagcgcatgaggacctaaggaaagctggattgctgagttttgttaataaacgagacgttaaagaatgcctgactgtagcggaaatctcccagtttttgaagctaccttctattaaagataacagttagtggcatatccaggcatgctgtgctctaactggcaagggattgtgccaaagacttgaatggacgatgtcacgactttagattacatgatctcttctaacctcatagactttgtataaatgaagtgctggactttacctgaaagctgcaaaaattaatggtttagatatatttataataaactgatttaaactttttctataagaagaaaaattaagaccacttatttgaaaagaaagatggagagggaggaggaagaagagaaaacggccgggcggcggcggctgtaggttgtgcagcggtagcggctctcccccgcggcggacgatggacagccaggacaggaaggtggtggtgtacaacaacagcaccgggcttgtgaagtgtggttatatgcaggctctaactttccagaagacatcttcccagctttggttggaagacctattatcagatcaaccaccaaagtgggaaacattgaacaaggatcttatggttggtgatgaggcaggtgaattacgatcaatgttggaagttaattaccctatggaaaatggcatagtaagaaattaggatgacgtgaaaaacctgtgggactacacgtttggaccagagaaacttaatatagataccagaaattgtaaaatcttactcacagaacctcctatgaacccaaccaaaaacacagagaagactgtagaggtaatgtttgaaacttagcagttttccggtgtatatgtagccatccagacggttctgactttgtacgctcaaggtttattgactggtgtagcggtagactctggagatagtgtgagtcatatttgcccagtatatgaaggcttttctctccctcatcttaccaggagactggatattgctgagagggatgtaactagataccaggttgcttctattgcgaggatatgccttcaaccaccctgctgattttgaaacggtttgcatgattaaagaaaaactgttacgtgggatataatattgagcaagagcagaaactggccttagaaaccaaagtattagttgaatcttatacattcccagatggacatatcatcaaagttggaggggagagatttgaagcaccagaaattttatttcagcctcacttgatcagtgttgaaggagttggtgttgctgaattgcttttgaacacaattcaggcagctgacattgatacctgatctgaatcctacaaacacattgtgctttctggagggtctactatgtatcctggcctgtcatcaaggttggaacgagaacttaaacagctttacttagaacgagttttaaagggtgatgtggaaaaactttttaaatttaagatccgcatcgaagacctacccctcagaaagcacatgggtggtgcagttctagcagataccatgaaagacaaagacaacttttggatgacccgacaagagtaccaagaaaggggtgtccgtgtgctagagaaacttggtgtgactgttcgataaactcca

SEQ ID NO: 422 - DNA, 2431 bp, Homo Sapiens
ctcctacctttctctccgagtccccaaagtccattatatcattcttaaatgcatttgcatcctcatagcttagcttccacttacaagtgagaacatatgatacttggttttccactcctgagttacttagaataatggcctctggctgcctccaggttgctgcaaaggccattatttcatcccattttatggctgagtagtataccactgtgtatatataccatattttcttcatccattcgttggctgatgggcatttagttgatgggtatggttgatgggcttcctatttttgcaattgcgaattgtgctactatgaaaacatgcatatgcatctgtcttccatgtaatgacctcttttcctctgggtagatacccagtagtgtgattgttggatcgaatggtagttctactttgagttctttgagaaatctaggagtcattttaatatagataattgaattgcagttaattctccatccagttttccacactggttacttactaccaccgatttgaggccatttttcatttatattactcgatcattttattcagtcacatttctaacagtatatgctgtttccaaagcatatcatgtgaacagtttaaaattctcaaagtataattctttgttgaagcatttgtaagttttacacaagcccttatatgatctgttttgatttttaaatcatcatctcttctattttacttatatttacttttcttcttgtgagatgtaatctcatacaaactttatagataggaagatgttgggaaactatcacatggtctgttatgttgtgttattttaataggccaaattatttgatgaaaagagaaatcttgatagttttttaattatgtgggacacggcattattttatcagaaaactgtatgttgaaaatattgcattgttgtgtatagatagagtggcatggattcaattttgtatgcataaattaaatttgtaatgtttaagcagtggattagaattttaacatgctttcacttcatttggtcctgttaggtaagcaagggatcttgtgtgttggaaaaagaattactttggtgcagccgcccaagaggagcttggggaggacgctggcccgcgaggctcgtcgcagacaaggtggcggcgatgtccgggagccaggccagtgccgcggcggcagcgtcggggcctttcgcgcggcagggcggcctgggcttcggcctcccgccggttccctggaagcgggcccgcggctagcgcgggagcagcagcagagatggaggctccagcgcctctctctcttccccgtccgcctgagccaggggaggccaggcggcccgggtgtctggagccgggggtctgctgtccgagaatgagaattttcttcccccagaacgtggagactgttcgatcaccaggagcacaaagttatcattgttgggctggataatgcagggaaaactaccattctttaccagttttctatgaatgaggttgtacatacatctcctataataggaagtaatgtagaagagatagtgattaataatacgcgtttcctaatgtgggatattggtggccaagaatcttttcgttcttcctggaacacttactatactaacacagagttgataatagttgtggacagtacagacacatgatttctgtaactagagaagaactctataaaacgttagcgcatgaggacctaaggaaagctggattgctgagttttgttaataaacgagacgttaaagaatgcctgactgtagcggaaatctcccagtttttgaagctaccttctattaaagataacagttagtggcatatccaggcatgctgtgctctaactggcaagggattgtgccaaagacttgaatggacgatgtcacgactttagattacatgatctcttctaacctcatagactttgtataaatgaagtgctggactttacctgaaagctgcaaaaattaatggtttagatatatttataataaactgatttaaactttttctataagaagaaaaattaagaccacttatttgaaaagaaagatggagagggaggaggaagaagagaaaacggccgggcggcggcggctgtaggttgtgcagcggtagcggctctcccccgcggcggacgatggacagccaggacaggaaggtggtggtgtacaacaacagcaccgggcttgtgaagtgtggttatatgcaggctctaactttccagaagacatcttcccagctttggttggaagacctattatcagatcaaccaccaaagtgggaaacattgaacaaggatcttatggttggtgatgaggcaggtgaattacgatcaatgttggaagttaattaccctatggaaaatggcatagtaagaaattaggatgacgtgaaaaacctgtgggactacacgtttggaccagaga

SEQ ID NO: 423 - DNA, 2412 bp, Homo Sapiens
ggcagaggccaggaggatgatgccagcagccaggaagtccgggtagtggcccaggaggggcacctgccaagaacccacgtgggtctcagtgaagttgcggatgctgtggctgaacatagagtccaggtagccactccaggcacgggccacggcggcgccaccgatgatgtattcgaggagaacattccagccgatgaggaaggcccacagctcgcccatggatacgtaggtgaacaggtaggcagagcccgtgcgtggcacacgtgccccaaattctgcatagcatagggctgccagcagggaggccacagcggccacaccgaaggacaagagcacagcagggccagccacctccttggccacggcacctgtgagcacgtagagacccgagcccaccatgccacccacgcccagaagagtcaggtccagcgtggacaggcagcgccgcagtgacgtctccatggtggagtcctccagcggcttcaggcggttcagcttctggcataagcgtgccaggctagcaatggtgggcagcccccgggccatggcaggtggccgagaagagcaccgagccagctactggaacctgctagggccagaggggaatgacaggatgcgtagccggggcctgaccagccttccatccctcctggtctgaccacccccagtcctctctctgtccctgacctggggacctggacaccctcaccaggggcctgctggagagctggaatggggcaggtgtcagaacctgtgggcaggaggtcacaggaagcctggaggccctgtctgcatcccaggcagcaaaggaggcctggtgaggccccacctgctcacccgctcggtggccctgaggggtggggagggagcagctccagggggagcagggtgagaggctgggaacggctcagtggtggggtcccagagccaggtgaaaccgaggcttccccagagtcgagccggacccggaacaggagccgcggctctgcgtcggggcgggtgtggcccaggcagccacctggccacagacagacagtggcggctacatacacccccgcccctgcacccgtggccaggctggggtatccgcgcgccaggcggaatgcaggggcgccctgggcccgcacacctccccatgtccgacacgccgctgctgctagagcctgctccgccgcgcccccgtccccggacacctgcgccttcgcctgttcttgggcctgagcccgtcccagtccccgtccccgcaggatctgctgcaacccacctgctgctgccgcagccgctgcctccgctctgagcactgagcccgcccagttcgccggcgccgagcgcagggcccgcccccatcccaggccccccgcgcggccccacccgctgccacacacccagatatttcaccctgcccactctgcccgacctcgcaaggtcgttaccggagctcaccggggtctagggaagccctgtgactgtgactcagtcacagatggagaaggtcagaccgccggctgactgactagcctaggtcagttcggggaggttaagggccacgtctgaaagtccgcagcccaccttctttctactgcagcggacacccttcttgatccctcaccccagtacatgaaccccacccagctgggccccagacaggccccacagcaccgtcatgtgagcttcaggcacagtgagttagatgaagacatgggtctggcagagtggcctggggcggtccctgacctctactcttacaatggaagagactgcagccttttgagagagttctgcgaattgagggaatgcattctggctgttttgagcctgcagctaccacgtcctgcaaggaagcaagcagcttctgggaccagcctgcagccctcctgtgggggagtagagctcctcagaccccagtggcagcccttcctagcctaggcacctctggcaggccgggagggccctatgggaccccaatagcagatccccacttgtgtttatcagcgacagccactgtgtcctgagtactgcattccagtgccccacgccccaggcaggcagctatgcaacaatacacctggctaattttttaattttaatttttttagagactgggtctcactatgctgcccgggctggtctcgaactcttggcctcccaaaaggctgtgattacattcatgaaccatggctcctggcctccccagaacgctatactagacatgtgttcaggcttacatgtggtttgtggaatggaatcttaggagcatctgcagcctatccagcctattgggctggtgacaggatgatggactcccagacaagatggtgccaatttggaacattctgcctcggccagaatgccaataccttctaatatttggctggtattgtcttgaggaacttctcagatggctcccacttc

SEQ ID NO: 424 - DNA, 2475 bp, Homo Sapiens
tttttgagatagagtctcttatcgcctaggctagagtgcagtggcgtgaccttagctcattgcaacctccgcctcctgggttcaagcaattctcctgcctcagcctcccaagtagctgggatcacagacaaccactaccccacccagctgatttttttttttttttttgagatggagtctctctctgtcacccaggctggagtgcagtggcgcgatctcggcttactgcaagctccgcctgtagctgggactacaggcgcccaccaccacgcccggctaattttgtttttgtatttttagtagagacggggtttcactgtgttagccaggatggtctcaatctcctgacctcgtgatatgcccacctcggcttcccaaagtgccgggattacagacgtgagccaccgtgccaggcccaaagcacttttttatagcccctagtttgctgttgtgtctgtttcctctacggcccgcacagcctgggtttgaattctggctctccatggccttgggcaagttggttaactttttgtgtctcaatttccccacttgtaaagtggggctggggaaaaaccctacctcatagggaacattaagtgagttcatgaaagccctcggtgtgtggcatgcgataaccactacctaagcataaggtatgtttacatgcactggttgtttaccacgacgcaccagcattcattcaagttattttcttccagagtctgcctggaatgtagaaccggccagctctcctcctcaaacagttcctgcaacctctggttatctgtgtgggcagaggcgggagtgtgggtgtgtggccctgccctgggacagggatgacgagagagcatgtgcttgtgtccagagctgtccccttccctgctcaggggccaccaaatatgtccatggtctctgctgcctggtcaacggccaccccgggctgccgtctcctggccagacctggagctcacaagctaattttagaaatgactggtcgactcagctgctgctatcacattggcccagaaggagggtggggggaggacgggtcggggaggggcagtaaggggaagggatgtgtgtcggtgtgtgtggagagggtgctccttcgctcctgctttcccggctcggtggggtcccttcgcggccacccggggagacgtcttagacagtcgtggttcctgtgatctgtgtcctctttgcagaaggtactattgggctgggttttagacgggcaccttgcgagcggatcggcgagttttaattttccggaatgcgctgctgggggctgcggtggcaggcctccggtcttttggtctattttaggcctttctggtgttgagagcttccgaggcctgattcctttgcctgttgcccgtgctgctcactttgaaaacaagagtgtttcggtggaaggatttgagaacaaaatgctggggcaaatggacattcgtaagaatcactctcctcaggccccagctgttcgctaataatttttaaaaatgtgtttagaatcatgagttaatctccactgtgaatctttgcccgcagacgtcagggtttatatttttcctcaactaccagtaatttctgcttcactggtgttcagttatggtcggggaagagccaggcttcccctttcgtgttaacaacgctgttgagtcgaaatgttaattttaatgttcttttttaaactgcaaattaagcatgtatgagtgttgggggaagggcaatggaagttcatggctgaaggtttcaatttcatgccaccttccttgagctctgtctgagggaaggtgtcttatctggcaccccggatagcaggcatttctctgaatgaagaagattcacaggtcccagtggccccatagtggggcagaagggggctatgctttgacatggagctctctcccaggagaggagaagacctcaccagctacaggcctctgggctgctgccttcctgcagcttttccatggaggaggccaggagtggggaggcccggaatggggagcccagtcggctcccagtcggctccaagctgtccagtctggcctcaacccgcaagtgtggggatctgggcttctatcctgtagggcctggaatacgacgaggctgttactttcactttgtggctgtccaaaaagatgctgcctcattcagtgcaccagctcatggaggctgagtgtcccactagggcttctagactccaacaaggataatggtggccttgggtgctgtatccattgctgacctaagttgtattctcctatgcctgggtaccatgtccagtgtgtaccttgggagcagaaaagagaggggtctatatactcttaggctatggatgagttctagaaaataatagtggagaggagagagagaaaagaaggaagaggaggaggagaaggagaagaagagaaggaggaggaggaaaaaagcaggaggagaaagagaagaaggaggagaagaataata

SEQ ID NO: 425 - DNA, 2443 bp, Homo Sapiens
gcacttgacctgtggcatgtgtcaactcattactgctaattgcagggactcagtgacctctccgaacttctgtcacccctgtcacggcccctgccctgtggaggcctgtggaatgggaagtggggaggggaaggagaagggggcggagtcagccggagcctcctggccaggcctggagtcaccctgtcctgccacagctctcatgggtttagagtgggccctggggcagagggtttgcaaggataggggtgggtggctctgccgagggcggtgttctgagtaggtctcattccccagtctgcccagcctggccccaccccagctctgctgccctgttactttgtccccctgtgttcaccctccacttcctgccggggacactccaaggcctgccaaggttggagcaggggtgggactcagccattcaacaaacgcttccttggttatgcagggctgggcattggggtggggggctgacctggaccctccaagacatcagattgtccaactgctcagttttcattggggcaagtgcctcgctgagggtgaagggggctgtgagtgcccatcagggagcctggacaggtcccgcctctcacagctgtcccactctctggagctgccttggtggcagatggcactgtcctagaaaggtgaggctggagctgtctcttccaccaggggtggccaaggacgcttccagggtcttccatgcaggcctccagggtcaccctgggcgtggctgagggcatgcagaccacgctgtgctcccccccaccccccatgcccgtcgcttgcctgacatgctcctcagctgtcttgccccgcagaagctgtgtggtctcccctgtgagtagagtcgggctccatgatcctccggagcagcgccagggactctccccaggcacaattttaaagggggccctaggacctgccaggtccacggaagtggtccttgtaactctctccctggtggcagcctctggtgcattccggcaggggcagcccctcctcatcacagggaccctgtgtgccaggccccagctgcgttgccgctgaattatggatttaatagcagagaagccttgcaggccgcctgtgctggctcgggaaaccggggcccagccggggcctgtcacggtcctggtgccgccctgcttcctgtcggcgccacggagcaagcggagagatttatcttcccggctttaagaggtactaacggaggaggctgagaggcaggagctgaataattgatggccttctctggctcaggatctgctgaaaatgacacggtgcaaggcagaggggctgagagtgctgaccacaaaatgctgagaagccactccagggcggtcacggccagaaggaggacccccactcaggacggggtcacaggcatttggggcgggtgtcagaggctcctgccctgggtcattccagggggccaggatacccagaagctgggcctagaggcccacagggctggctcacccccacttccctctcacacgcctgccatcaccggtgcttcagcccagcaaccccatggctcgttggccccgtccacagcccccactgcctcctgtgtgctgggcgtgggcctctgagctctactctcagcctccttagccccaggagaggagtggaggacaggggtttaacgtggggtgtggtgcggagcggggagggctgtggcgccccctcagcccctcctttcctaacagcctcagcctcccccctggagaatcccctacctgctgggcacatctggcctctccccaccattctgtctccagccgggagatctctacccagtgaaacagtgaaacaggaagggttccctggttaccccgcgcagggcgcagggcatgcagcgggggagtggctcgcttcttcagtgccccaccgctcacacctctaggggagcatacagacgggcaggctgtggggctctgaccccatggcagtgtctgggggtgaatgtttacagctcttgaaaccccagtgggagtgcgttaccgggtggtcttttagtctagcggtctgtaggtggctggtgagagtgagctcaattagacccctgccttataacaaggacagaggaatttctgtatcccagggtttcttgccttggtgtaccaaaaaattggatcacacgtgggcttggagaatgagtgcaaggttttattgagtggaagtagctctcagcagatgggggagccagaggggagatggttttcccctggagtcaggcaacattctcgggatgtccagcagcttgtcttcttccaccagtgtgttcctctccccacacagaggcttctgtctctgccttgctagggtcttgggtttttataggcataggatggaggcatggcaggccagggtggtcttgggaaatgcaacatttgggcaggaaatgcctgtcctcacctaggttcgt

SEQ ID NO: 426 - DNA, 2892 bp, Homo Sapiens
gcctccttaacctcagaggcgtgagcatgctggtccccttggtaagctttcctgggctctctgcaaacttcaaacttataagacaccctgtggggagatgagttcttgtccttttgtttttcattttaaaatttaacatgtgaccgggcacggtgactcacgcctgtaatctcagcactttgggaggacaaggcgggtggatcacctgatgtcgggagttcaagaccagcctgaccaacacggagaaaccccgtctctactaaaaatacaaaatttgccaggcgtggtggtgcatgcctgtagtcccagctactcaggaggctgaggcaggagaatcgcttgaacccgggaggtggaggttgcagtgggctgagattgcgccactgcactccagcctgggcaacaaaagcaaaacaccatctcaaaaaaacagaaagaaacaacatgtattcagaaaagggcacgtaccataaatgaacagctcaataaattctcacaaactgagcccaaccttgtaaccaatacccagagtaagaaagctgaacctaaccagcccccgaaagcccagcacgctcccactccaggatcaccactctcctgacctctgaactgttcttgcctttttttttttttttttttttttttgagacggagtctcactccgccgcccaggctggagtgcagtggtgagatctcggctcactgcaacctccgtctcccgggttcaggcgattctcctgcctcagcctcccgagtagctgggactacaggtgtgcaccaccatgcctggctaatttatttttatttttatttttagtagagacagggtttcaccatgttggccaggctggtttcgaactcctgacctcaggcaatccgcccacttcatcctcccaaagtgctgggattacaggtgtgagccaccgccaccggcctgttcttgccttttatgtaaatggaatcatgcagcgagtgttcctttgtggctgactctattactctgacttacgtctgtgagatttacccgttatgtgagttgcggatcattcactcctgttccgtttgtcgtgctcctaagcccgaatactccacgatattcatctgccttgatgacgctaggcttcccaattggaggaattatgaatgtgcggctacatgtctttctgtcttttggagcacatgttgtatgcgtttctgctgagtgtaaggctgggcggggcgtcggtggctcaaggggtccatggtgaactcacaggaacaccgctttgagctgcccagtggcgttcctatgcgtctcatccagttcctccgcatcttcacctgcaccattttattcttcttctttggaaaataaatctacttgtggttccaaagcctaactcatcctcagtaaccccggtagctatgaattcctatacaagaggctcccgcaggcccagcgccaaagctgcctcccctgcagcctcggtgacttcccgggtctctccctccggccctggtgtcccgggtgagcccagcacacgttgggattttggttgtttgttggcctggcccgactgtccctgtctctgagggcagagtcgggtcccatcccgggacacgcctggggttagccaccgacctgcagcctcccggccgagggtgcggggttggcggtaaggcctgccccagtgccccccagcagccgggcctccgactgcaggcccgggtccccgctcctccgcgcggagtcgggcggggataacctttgatcccgagccctcccctcgagagggggtggggggaggaggggatcgggtttcacggagtgttgggggataggactgggggcatccggcccgaaggcgccccctctgtgccccctccggggaagtctgggatccaggccctcgcccccagccgtgggcgcgcgcccctcgcagccggggtccggggagggagggtcccggcagggggcgccggggagggaggaccaggagacccgcggccccgcctccgccgcgccctcctcccgggcgggataattgaacggcgcggccctggcccagcgttggctgccgaggctcggccggagcgtggagcccgcgccgctgccccaggaccgcgcccgcgcctttgtccgccgccgcccaccgcccgtcgcccgccgcccatggagcgcgccgcgccgtcgcgccgggtcccgcttccgctgctgctgctcggcggccttgcgctgctggcggccggaggtaggggcgtcccgggtccgccgccccagcttagggtcccgaccccctcggcctcgcgctccctgcgagtttcggaaccacggggactcggagtccgtgcgttgccctgcgcggcgcccccggactgtcagcgccgaggcctcggcgacgcccccctcccccacggccagctccggtcctcatctcctccccggcctggggacttgtttcaaaaccggattcccccacccctcaaacacaccgtcctaccccagtcctagcaaatccagccggctccgggggccgcatcccgggccctgggggttcaggggcgctagctgggctgggggacgctggctgggggttaccgagcccagggcgccttgcacttgacgctggaagcgccctcggctatctttcctcaccgcttcccgcctccacccccaggtaggagctgttgtacccagcttgcggatgtgaaacttgagcctggagggtgggaagcagtcttttccccaggagacactagcggtcctgggataggggctggagaggaagaaatgagaaagccagggagcagcctggaggtttttggggcgtagctgggaggatggaggggatgcggacctggccacctcctccctgcctccctcccgggacagagggcccaaggcagtggttc

SEQ ID NO: 427 - DNA, 2588 bp, Homo Sapiens
cactgacctcaccaagtccctccccaagtgccagcctccaccctctctctccttgcccagaggagaaacctaaaatcgaaatctccaacgtggacgggggtacagagtccttggcctctcctggtgccccctgacccgggcacacctctcccacgaccatgtctgagatgtcccctcctcctccaggcccttcttacagtggggtctcctggaatgtcctttcccaaacccatctatgcaaatcctgcccttcggaggccccagtccagccccggcacctctcaggagctcgccctgcagagactcctcggtctctcgctccgcacctcgcgcaggaagcccgactcctccttcagtccctcctgagctaggtccagcagcctgaggaagcgagggtcgtcgtactcgaagcggcgcccgcaggtgagggaggcgatcacgttgctcacggctttgtccaagaggccgttggggcgaaaggggcgtcctgggggtgggagatgcgggtaaggggttgccttctccgtcccccgccttcccagttcccgctttgtgcccttctgcccatcacccaccggcttggtcggcgaaggcggcacaaaggcaggcggcctcctcggtcacccactgctccagcgacttcttgcccaggcccaagttgcgcaaggtggacacggagaagcgcctctgctcgcgccacgcgggcccatagcgcgacaggatcacccctgggggcgggacgggcacgtgggcgttgccatgaaggccttggccccaccctccgccacccactccaaccctggcgctccacaaggtctcccgcagtccctagcccggtccagctgggcacagggcccactctttgctcacccacattgctcccctgcctggggcggggtttggccccacctcgtctctgcccaccctgaccacctttccactcaaggaagatcccgcccgtcccgcccacactgagcccgcagcataggcgcggtccccgccaccgccacttcgacgcatcagcctcgcccaccgggcttctggcgggtctgggcagtagccccgccccctcccagcccacagactcgcacctcccccgtgcaggtggtttcctggcccactgtcctcagcccactcgctggcctttatctctgtttcacgtccaggaccccacgccctgtcggcgctgcttgggctacggtcactgtccacccggggcccacggaaacgcggtctctgtcccccaccgccgcttgccttgggaacgcggcccgaagcccaggacctggtagatgggcgcaggcgggcggtcggccgtgtcctcgccgcgggtcaccatcgcctcgcgcacggccgccagcccattgagcacgaccaccggcgtccaggccagctgcaggctgaacacgtccccgaagcggcgccgcaactgcagagggagggtcagggcctcttgtcaagccaggatcaccccagactacaggtcctagtcctatttgaaccttggacgacccccggggctaccaggagtgagcaggtggaaggaggagacccagcctcctgatcctggggcgggggtgggggtcacaccttctgtgatggaggaactcagtttggatgcgtcacccaggtatgaccttgcaagagtcaccaaaattgccgagaggccccagttagcatcccattcccagatgatggtccatgccggtgagcagtgaggcccgaggacccacagtgcaaaaggtttgaaccgggtcactgcacccccttcatcctcgatttcgtgatttaaacggcactcaggactaactcatcttccattcccaaggcctttccttctggtgtcagcagaagggactttgtactccataacatatgttgcccaatgggcttgcatgcccactgccaagtccagctccacctccaggcccttgccctactcttccttggcctttggaaaatccagtccttcatgccatgtataaatgtccttccccaggacgtcccccaaacctgcttccccttctcagcctggcttctgatccagcctgtggtttaacccaccacccatgtttgctggtggtggggcatcctcaggacctctgccgccctccaggacctcctccctcacctggtcgaagcagtatggtgtgttctggaagtccacatgcagcaaggttgcccagcccgggcagtggcaggggacctggcgggtagcgtgcagcccagcgttggtgccggtgcatcaggtccaccaggagcaggaagatggccactatcatggccaggggcaccagtgcttctagccccatggctgcctcactaccaactgggctcctctggacacacctggcacccccaccccaccaggcacagaggaccaggcaggacactctcggcacaccgagcgcgtgacccttcccttataaagggagctgatgatggccttcgccctctgctgtgagtgaacctgctgtgttgactgtgctgccagtggcagagtcaggccagggcaggtatgggctgctccagaggtccttgccgctgcttcctgctccaggcccttacccagggtagggtggtagaaa

SEQ ID NO: 428 - DNA, 2282 bp, Homo Sapiens
ggccgaggcgggcggatcacgaggtcaggaggtcgaggccatcctggctaacacggtgaaaccccgtctctactaaaaatacaaaaaagcagccgggtgtggtggcgggcgcctgtagtccgagctactcccgaggctgaggcaggagaatggcgtgaacccggtaggcggagcttgcggtgagcccagagatcaggccactggaatccagcctgggcgacagagggagactccgtctcaaaaaaaaaaaaagaaaaaaaaaaaagactctgactctgttgcccaggttggagtgcagtggcgcgatctcggcgcatcgcaatcccttcccagcccccgggttcaagtgattctccagtctcagccgccggagtagctgggactacaggcgcgtgccaccatgtctgactaaatttgtatttttactagaaagggggtttcactatgttggccaggctggtctccaactcctgatctcgtgatccgtccgccccgacctcccaaagtgctaggattataggcataagccgccacgcccggccttttgtttttctttttcttttttttatttgaagactgagttttgcacttgttgcccaggctggagtgcaatggtgcgatctcagctcactgcaatctccacctcagcaggagagcaggaatcttcagtgatccacgggcagatctgccgccattgtgggcacctgttcctcccgcgacctttgtgcccgcctctctccttccagtacctattgcatgaccccccacgtccgcctcccgccattgccagcaagtgcctcgcgcgggtacctggctgcgcttattaatccgttaagctcgctctgtcacgggcgccgtgatgtgctcacgcgcccgctccctcaggtttaaaaggcgcgttgcccggcaacagaagaaactgctggcttagccgttggccgagttggcggctggacgaggacgctcagagcccagctctcgagagttcaagcaaccgacggttccccactgctcccaggagcggttacctgggcactctgtgcccctccttcctgttcgggcccaggccgaggacctgccagtagggctcagttgcctggagcccgttcagcccatcccccagttcactttgcctgtgggatctccccgttgctcctgcccgtggactgagtggcaggccatcctacaagcacccggacacttgacatccgtggtgtcaagacaactctaagaaggttttccgtgatcctgcaagccctgccttcctttctgggatcctgccttcaatttgattgcacaggtaccacagcaagccagtgctgtgtgctccgagttccagggcgtcctccagctcagccactgcactgagaacatggactctctgtggggcccaggagctgggagtcacccctttggggtccacaacagccggctgtccccagacttgtgtccagggaagatagtgttgagggccctcaaggagagcggggcagggatgcctgagcaggacaaggaccctagagtccaagagaatcctggtgatcagagaagggtccccgaggtcaccggggatgcaccgtctgcatttcggcccctgcgggacaatggaggcctctctccctttgtgcccgggcccgggcctctgcagacagacctccatgcccagaggtcagaaatcagatatgaccagtcatcccagacctcctggacgagctcgtgcaccaaccgaaatgccatctccagctcctacagctccacgggaggcttgccggggctaaagcggaggagggggccagcctcatcccactgccagctgaccctcagttcctcaaagacagtgagtgaggacaggcctcaggctgtctcttcgggtcacacccagtgtgaaaaggtggcagagaaagcaccagggcagacactcgccctcaggaatgactcctccagatccgaggcctctaggcccagtacacgcaagtttcccctgctgccacacaggcgaggggagcctttgatgctgccacctcccgtagagctggggtaccgggtcactgctgaagacctggactgggagaaggaggcggcattccagtgcatcaagagtgcactgcaggttgaggacaaggccatctcagactgcagaccctcacggccttcccacactttgtcctcacttgcaacaggggcttctggtctgcctgccgtttctaaagcacccagtatggatgcacagcaggagagacacaagtcccaagactgcctgggcctagtggcccccctagcat

SEQ ID NO: 429 - DNA, 2731 bp, Homo Sapiens
gggccaggcatcgccagcccacgctgagcctcccggtggcgccgccccgcccatcctcccccccgccccgcgcagcaaactgacccaggacagccgcatggagagccccatcccgatcctgccgctgcccaccccggacgccgagactgagaagcttatcaggatgaaggatgaggaagtatgtggggcggcgggggcggcggaggcgggcgtcagggatgctcctccgcggtgctgctcacccgccgggttgtctccgcccgcagctgaggcgcatgcaggagatgctgcagaggatgaagcagcagatgcaggaccagtgacgctcgccgcggacacaccgtccgtctccgggacgccctcgcacccctggacaccagaccggactgttcccgacccggagacgcggggccacagcccccagctgaccctaatttattctcagcaccaccccctcccaggtcattgtgtctgtttccgaggggcctggaccgtagcccccgcccagctggccctctctgaccttgggggatcaggagcgaagttgggcgggacttcagagatccgcctcccttgcccttcccccgcccccggacggtcacagcacccaaaccgcaggccctgctctggcaggcaggcaaagctaggcagaagaggattcccaggatcctgggtctgttccctgccccagtgctgcagaacggacttgggagccctcctttgcctgctcccgcgggtcacccagcgagtgctgagaccccattttctgtcgaggcgggccgagtcttcccttatccccagacgcctagcgggcagggttgggctgaatcaaatgggagccctccagacataaggaggccagaggctgcaaggagcggggtcgtgaccgcttacaccccttctccacagcccggcccgacctggagggcccccggggcactgggcggtgagccacctcctggcaactctcggtgccgtcccctgccctcgctcgaggcctcttctccccagcaccgctgtggtgtgccgggatcctgagcctaggcctcccgatgttcccacccgcatgatcccttcccgccacacgatgctccgttttcttccgttgtgaatgccgcgtcctgtcctggtgacaggagaacaatgttggtgaacgtcgcagcgggtgtccgagtgctccgtgtgcccctgagagcgggtgggagcggaagcctgagcggcctgcggcctccggcgatagtgtgctatctgccgctgcagcgcgcgtccgcgcggcctctgggctatttctggccaggccgcagcactgtggtcggtgcgggcgtggcaggggcggggcggccttatcgctcggctctcccgcctacgcctcccgctgcagagtaagccgggctgccgtcttctcgccatgggctccggtgagtctggagtccggtcgggcccccggctgctccctaggccgacccgggttgagaggagctctggtcgtttggctgcagctgggagagacttgggtcagacttagaggggacttccagccggcgtgcggggtggtcagggtggagaggctggcgggctaccgggacgccgggcatcaggggctggatggagccgggccggcagtctgggtactcagagatgtcgcccaggtgcccgccgaccgctcggcttactgcggcgcttcccttgcagggccgcgcggggcgctgagcttactgctcctgctgctggccccgccgagccgcccggccgcaggttgcccggcgccctgtagctgcgcggggacgctcgtggactgcgggcgccgcgggctgacttgggcctcgctgccgaccgccttccctgtcgacacaaccgagctggtgctgaccggcaacaacctgacggcgctgccgccggggctgctggacgcgctgcccgcgctgcgcaccgcacacctgggcgccaacccctggcgctgcgactgccgccttgtgccgctgcgcgcctggctggccggccgccccgagcgtgcgccctaccgcgacctgcgttgcgtggcgcccccagcgctgcgcggccgcctgctgccctatctggccgaggacgagctgcgcgccgcttgcgctcccggcccgctctgctggggggcgctggcggcgcagcttgcgctgctgggccttgggctgctgcacgcgttgctgctggtgctgctgctgtgccgcctgcggaggctgcgggcccgggcccgcgctcgcgccgcagcccggctgtcgctgaccgacccgctggtggccgagcgagccggaaccgacgagtcctgaggagagaaccggtgcgtcctgaggagagaaccggcgctgggcaacacgggcctgcaaactcgacaggaccctgcccgaggggccctcgcgccaacctggaccggtccccgcctcctccgctgcccaatctctcagacccaccccacctgcaggcccagaccacgtgggacagaactcctgcccaccctaccccgagggaggcgaacccgcacttccaggcttgggaggaccatggggcacaatgcggtccagaccctgctgcgtctcccttccaaactctggtgctgaataaacccttctgatctggtcttctctgcacgactgacctggaaattcccctcgccaaactcaggaaaaggccccaggaggcggttcaaggggacacaaacacatcctcacatgcccaccctaacctcaggggcagacag

SEQ ID NO: 430 - DNA, 2284 bp, Homo Sapiens
aggaacaccaaatctattagcttgttttcctctttccttggggtagagctacattttgtgcaatatgcatcacacttccatttgctctctgaccagtataaaaattaaaatatatatatatatgtatatattcacacacagatatatatattcatcaagagagactaaataaagaagaaaactatgctcactggctagtagaaagatccgtcactaccaaggaatatgttttggtgtatgtggggacaaaaagacattctgtggttcaataggttagtaagccttgcactgataaaagtaaatgggtgtccatcctggctaacacggtgaaaccccgtctctactaaaaatacaaaaaaaatttagctgggtatggtggcgggcgcctgtagtcccagctacttgggaggctgaggcaggagaatggcatgaacctgggaggtggagcttgcagtgagcagagatggcaccactgcactccagcctgggcgacagagcgagactctgtctcaaaaaaaaaaaagtaaatgggtgtctttcccataaggtaggttgacccttagcatgagatgtgcattgcaaagcaacaagaagaacttagatattcggtgttttctttttttttttttccccaacctatgtggcggtgaatgctctgtatggggcatctctctggactaagcctctagggcacactactaggggctggggcagggaattaaaaactgcagtagccagtctctaagagctcctctaactcgtgaaagttgatgcctctattttagctgtttcatttgccttttttttcaataactcctctacgtaactcttcttcatttttgtctgtgcttgtcttgatgcggttcacaatcatggttttattgaccttgttttcgtgttacaaaatcactctgtgtttgtgatttgtttcatggtatttctcaagaagtggcttcaatcccctctgggataggcacattactatgtaccacagggcaggccaggctgcaggaggagcttgcagtcctggaggcttctggctctcctctcaccccgctgcccgcccctcagtgattagttggaatccaagacagcaatacaagatgtgtcgttggtgggagtgatggagtgcctgctgagtgggccgcagataagcaccgtgatttcggaggacgcttcatcatttcgccgtaagaacatgttaacgggtgattgtttgaatgtctccagctaataggatattattcataacactctggctagttggaatggaagatgataagaaattaaatccttaatggctttctttaagggaggacttttcccaggggaaccaggaaccctgggaaatcgctccatgtaccctggcaatatctatacggagagaattggctttaaatgaacctctgagggttacacaaagggtaaaagaaagagaacaaaaagcaattgacattaaccgggtccctactacgtgccaagtacttagacattttacctacatcacgttacttcatcctggccctgtctctgttgtgacaaggcactattaagctcatttcagaactgggaaaactgaggcacacagaggtgagctgacttggccaaggtctcatttctggtgctggagtcacgatttacattctaaagcaatattcttctcgtgaaatgaattatggagagagaagttgtctgggagaagtagccctcacatgcaatttgaaaggtggagaagccatagtcgcatagaggtagctgcagcaggtgcagagggaaggcgagggttgtgcaggtggcttctattgatgcctgggaatcatctatttcctggatacctgcagccaacattacccatgaatatttcctgcggtccctgagcttccgcatttcctggaagcttttctgagctttgctctccctgtctttccaacaagtaaggaagcttctgactctatgtatcaaatcccctcctgcttgaaatactgagaagaatgacagaaccctgcttgcaaagtaccctgcgtaagcattacacacatgcatggcacacacacacacatactcaactcacaaaggtaaattcccaagaatagaattacaggtcacacatgttggggacataagatattacaatgataacagtaacagtatggtttttttttccaacatggaaaccatttctggaacaatttctacaagcctgggaagaaagagaccacactactttttaccaacaactgctttttacacataatgaaatcctccttctagataaacaggacag

SEQ ID NO: 431 - DNA, 2519 bp, Homo Sapiens
gcagaggaaagggaagatgactataggatcagcttattctggaatagattcttgaagggctggacctggggctaaggaacaggagagaaaagcctcttctatgtaccttggtataatcatagtgactcctaacaattaccgcttcctcagtaaaattgttgaaatttagaacaacactcttcaaattagccactaggggaaagggcaaccaatcttctttttttctaaatcgtttaaccacatgaattaatatatagaaaactacactgcagtgcacactgtccctcagcaggcgtggtggcatggaaggacgcgaacgaccccgggagtggcgggtgaggagggaaggggagcgagcgggtgcgaggtgcccgcgttttcctggggcccgggagggaaagggagagggtgtgaggtgcctgccttctcggggcttgggagggaaggtgagcaggtttaaggcgcctgccttccttggggcctgggagggaaggagagagggtgcgaggtgcccgccattctcagggcctgggagggaaggggagcgggtgcgaggttcctgccgttttgcgaggctgcggagcctgctgtgtcccctttcccgcccactctccgacctgcaggcccacggcgctcaaggtaatagggtccccagccctggaatcaactccctgggtctcggaacgcaacccacacaaacctggaccctgtctctcactggcggggagtcgccttcgcatgcagacgtggagaagtcgcctccacccgcagctcctcccgtggacccaggccgcctcccccacgcccctcccggagtccccagaccctccgtggcgctcctggtaccgcccccactgccccactcacaaagagcctcagcttcttctcggggggcgacttcctcagccagccgctgtacagcacgtggccacttctcgtgcttccgccggcggggccacttccgggccacgaagacaaaggcgcaaatgccgggtcaggtgggcacagctcccgggagggtgagggggacggcagggacatgggggctgcagctcacagtgaaggtgggggagacagggcgagagggcgttgctggaggtggggtgtgagggacggcttgcgataccctgggactgcggggtagaaagcgcagttctaggggaggtcggggtcagaggtgaagctcgtggggagggcgagacccgggcgcaggtgctcacaggcgagggcggggttcaggttccagctgggctttgagttccggttcaggcttccatctgtggttccggttccaatttgaggtggagtttgggattaaagtttagacgaggcctctcgttcagggtttgcgttggggattggggtggggatttgcaccctgggtcagcctgggtgcatctcatcgggaccaccggggcgggggacatgggccgggtggctccttgggagaagagggacagggagcgcagctggtggagaggacaagaacgaggggcgcagctcattcagagggccacaacagagtctcaggtgctgagtcccatgcgccagatgaggaaagacaatggaagagttcaggttcctgctggggtttgagttccagttcgggattcggcccatggtttaccttctgacttgagttggggtttggggtcaaggttcaggctaggacttgagttccgggttgcagtttgggggtggggttaggtttcagagtgagggtttgggcctgtttgtgttgtgtatgtttgtgaatgtattgggatgtcaccgtgtgtacttatgtcacgtgtgtgcacgcatcagtgtgtgcatgtgtgagtgttcattgagtgtggcactgacagccaacccctctcctcccatttatgccccactgtcttatcctggttggggtgggctttacaagttccttccctgggccagttggaggttctcatgttgcctggggagagaagggaaggagagaacaggtcaaagatgagggcagcttggcctcaaccagacccggtgtcacggggaccaagaagccggaggtccttgtctcctgcctctggaggagcttggtttgcttctttgttcacacattgtgtgaaagcacagttgggggcatctgatatgcacaggatctgttcttgcctctgcagatgtcttagagaacaggacagacaaggggcctcttcagtaagccatccccaatgtgcactgcatgtcagcttacaagaggggcacaggggccccatcaggtagcagggaggatgcaaggaagagtgtgtggggatgggggtgctgggtggggccaggtgagtgggtgcctggcttctcctcagagcaaaggaaagtgctgaagagtgtgaaactgtgtgacatgttatgctttatgttttgagaatggattgcaggaacaagcagacatgggggacctgatgagggccaatgggatgtccatagagataagatttggcttgagctggtgggaaaagtggagatggagccacatggaggaaattgcagagtct

SEQ ID NO: 432 - DNA, 2452 bp, Homo Sapiens
gaacatttcacctaaaagaaggcttctccacagagcacaccaggacggacccccagaaccactggctggctgtatcccaccttcaggttcttgattggagactccttcatgtatcgttcactgatccttgtggctgaaagtcttgttgctccagccagatggcaaactacacctcaaggacagacacttgtcatacatgcctgtgtcccccagagctgcacccagcacagagctggtcacaaagtggcctccccaaatttctgtggctttagcctaacaaacacctgcaattccttatagctgaacaaagatgaatgaccctaacccgttcaagtcaggctggactccttccactctgatcatacatttggttttacaaagcgctgagcgacaggaagaaagaatggctcttactggccgagttgaagggcttcgagcacatttttctcaacagcacaatctggctccctgacacaaaaggcagggaaaggaaggggcagcggctcccaatgaacagagacggatggcggccgggcctctgccgccactgctgtgcccactgggcagaccagccacatctcctggctcaggccaaagactagggcagatgacacatggggtactcacaggagagctgtgctcagggcttcctgctggccccggaaccttccagaatggcctctcacacactccccgccctccctccttctctctgtctctcccggaaccttccagagtgggctctcacacactcccctccctccctccttctctgtctctctctctctctcagtgaaaggacttccttggcaagagtgtcaggtttcagttgtctgtgtcctgggaaattacaagatctttcccctttctctttttagctaggattacacatgcagagccatttggctcccctggcctgcgcagctgctgccggccgggccgggggatcatgccaggcagcccagccagaggtgagctgggtcacaggggtgagctgccaggcctgctcacccctcttcttggtgtgatcccctcaagtccaatccccagggaccttccccaggaatgctgagagcaccagctgtcccggccatgtcaggcatctggccaccaggtctccttccactccaggggcaaccaccgccagagggaaaaacggaaacaccaggttatttgtgatctgcatactcactcctcgtttagagagacaagcaggaggccaggggaatagatgggactgtgggaacagccaagggcagagggtgaagggcggcgatcagaaggaaagacggaatgcccacacattccctgccgctcccggctccagccgtggaggaagcggggctcggaggacattgcaccagacaggtcttgtttagaaaattggaaaagaacaaatattgattacaagagtgcaggagaatgggcccttccatcatcaaaaacaggtattcagccaggcgaagtgactcacgcttgtaatcccagcactttgggaggcaaaggcaggaggatcgcttgggcccaagagtttgagaccagcctgggcagcatggtgaaacccagtctctacaaaaaataccaaaaattagctgggtgtggtgacgtgtctgtggtcccagccattcgggtggctgaggtgggaggattgcttgggcccgggaggtcgaaccatgttcacaccatggcattccagcctggatgacagaatgagaccctgtttctaataataacagtaataataataataaaatacatactcactagctatgactctgctttacaggataattggggcaaaaatgttcttgggtgaaactgggtaacctaatttgaaaggtctgggaaacatggcccaatttcagcctcgctcgccactcacaggccaagtggaggttgcggttcataacatactggacactagacatcactaatgccttcattctacaaatgggaaaaccatggctgagaggtcacctgatctcccaagttcactcagagacgtggggatgggccgagctccagagcctgggccttgccctgctccaccccatacagcacgaagttccctggccaactaaggaaggagtgcaaggtgactgaagaaaacaaaaacaaacagaactgacacaaaaaacaaacaaacaaaactgagtgccaaagaaggagaatttgggggctgaggctgtggctgcagagtgggagtggggataatcaacgctgggctcctgagtgtctctggaagggcgggccctggtgtccagagcgcctggtgcccaccttcccctttcccccagggcccctgtctgagagctcttctacccactcctggctgctggggcacctgatattttccaaaacacaattttcacacccttaatagtgggctgcggaggagtcaggatcagagcctctagctcagatttccttccctgaaaggatacggtcttag

SEQ ID NO: 433 - DNA, 2410 bp, Homo Sapiens
caagcagggcatatgtgatctctgtcagctaaataaacaattttctttaggtctcttttgtttttgtagagacagggtcttgctgtattgcccagcaggagtgcattaatggggattcacagatcattgcagccttgaactcctgggctcaagtgatcctcccacctcagcctcccaagtaactgggactacaggctcacaccaccacacccagctaattaaaacaaaatgtttggacaggcacagtggctcatacctgtaatcccagcattttgggaagctgaggtgggcggatcacctgaggtcaggagttcgagaccagcctggccaacatggtgaaaccccgtctctactaaaagtataaaaattagccgggagtggtggcaggagcctgtaatcccagctagttgggaggctgaggcatgagaatcacttgaacccaggaggcagaggttgcagtgagctgagattgtgccactgcactccagcctggatgacagagtaagactctgtctcaaaaaacaaacaaacaaaaaaataaataaatttttgtttagcctgggcgcagtggctcacatgtgtaatcccagcactttgggaagccaaggtgggcagattgcttgagctcaggagtttgagaccagcctgggcaatacagtaaaaccctgtctctacaaaatgcataaaaattagccaggcatagtggtgcacacctgtagcacctgtagtggaaggctcaggtaggaggatctcttgagcctgggaggcagaggttgcagtgagctgagattgtaccactgcattccagcctaggcaacagaacaagactctgtctcaaaaaaataattttttttttttttttttttgtagagatggggtcttgttatgctgcccaggctggtctcaaactgccaacctcaagcaatcctcctatcctggtctcccaaagtgcagggattacaggtgttagccactgtgcctggccttcttcagggttggtgaaatcccctgttgctcatcctggctcgaggaggcctaggggccccggagggggaccagtagaggcaggtctctggctgagggagagtgagggtgtgcccaggactctgcgggtgtggccagcacctggtgaatgcacagccgattcgcaggtccagctcctggcgagcatccactgagagcgcctcgttgtggtcaggctcgcctaggcaggccatggcattacagatgtctgtgtccgtgatggagctaaacctggcccggaacacggtcttctcgccaccatgggccttgttcatgacgggcagaacagcatcaagaacctgggggtggggagtggccagctgtgacccacctcccagatccctgccacagctccccaccccactgtgaagcctggttccttccaggaaagaacacgtgtgctcggctccctctcctgcccctgccagaccctcctctatcccctttcctgcacctgccagaccctcctctatccccctgcctttccagaagccctgagcactccacaacaccccaccacatggcttcctttactcccatctagaaacatactcgaacactcccttcttactcccgccctctcttctaatcctctgctttcatccccaccaaatcaggaaatgctactgccaagtacatgagggacctcttagtccccaaacccatcccatgtgacacgattccctgccttctaggagggagggtttggaggggtgggtggaaattttaagaggctgaagaaaagacagggaaggaaaaaagaatgaaggggaaaggaaatgggcaagagcaggaaggccacgggtggtcctagcttgtggtgggggcagctcgggctaaagcacagcaggggtcctggagccgagactcactaggaaggccgtgcagtgggactagggtcgccgccggagcctggccacgcagcttccttactgggaataagtggcttcatttctgaagggagaaagccccatgagctgcccccattctccattcccagatgcaaaggcccccagggaggagccgccctgcaggggaggagagggtatctgggaagagacagagtgtgatcgcatttgctgagggtgctgtactgcaacgccaggtgcctcagctctgtctcactgaccagctcttgagccacgggtgagagctgggggtacaggagcacgggggcgacccatagaacaacagtctgaagggcaccaagtgagaccagcagtcatggccactgtgagggcaccatggccggggcaagcatggggcatggggtgtgcacagggagcagctgccacctgcttctctgcagggctcccagggttggctggaggcaggaggcatcctggatgaggcaggagatgagcagagcgaggcctgcaaaaggagc

SEQ ID NO: 434 - DNA, 2424 bp, Homo Sapiens
caaggactcagtaaattccagctactgttcctattaggtcgccaatataaatgcttgatgagtgaatgaatgacttccgtctgggacttggttgcaaataaagccgagctgcatcttagggaggggtggagactttgcccctgtttgtgccttgaagccagcagggccttgccctaggatacctccacccaccctcctgcccagcaagtggaggtgaggggcgtggcctggggctctccgggaggtcatggtcattgggtcactcggagcttgtgtttatatgaggcctggcagagggaggcccctggctacccacctttgtgcccgggttcaccaccactggtttctgcgttccctggactctgccctgcacgggccgcacctcccccgccggccctcgcccatgctccagccccagccctagccccaacagcggcctctccctgcttcccttctgacatcctccctgtcgcccaggcccgcagcccgagtgtcgccgccatggcttcgccgcagctctgccgcgcgctggtgtcggcgcaatgggtggcggaggcgctgcgggccccgcgcgctgggcagcctctgcagctgctggacgcctcctggtacctgccgaagctggggcgcgacgcgcgacgcgagttcgaggagcgccacatcccgggcgccgctttcttcgacatcgaccagtgcagcgaccgcacctcgccctacgaccacatgctgcccggggccgagcatttcgcggagtacgcaggccgcctgggcgtgggcgcggccacccacgtcgtgatctacgacgccagcgaccagggcctctactccgccccgcgcgtctggtggatgttccgcgccttcggccaccacgccgtgtcactgcttgatggcggcctccgccactggctgcgccagaacctcccgctcagctccggcaagagccaacctgctcccgccgagttccgcgctcagctcgaccccgccttcatcaagacctacgaggacatcaaggagaacctggaatcccggcgcttccaggtggtggactcccgagccactggcaggttccgcggcaccgagcccgagccccgagacggtaacgcgggggaagggggcaggaggtcgtcgggggcgcggcctctacgccctgagcagtgccctggacttgacctttcttttatttttttaatttatcttgctttcatttcctttccttttttctttcctttccttccctttcccttccctcctttcccccttttccctacccttgccttcttttcacagggtctggctctaccgcccaggctggagtgcagtggcacaatcatggctcactgcagcctcaacctcctgggctcaggtgaccctccccgctcagcctgaccttgcctttaaaggccactgcatgaggtggggaaggagatttgacttccacttgcctcggtgactttgtctgttaagcagaaccataatactggcccttcccctcctgtgctttgggcagtgactctccctagctcattgggaaccctggttgcccaaacagctctcaatccaacactagaggtgtggggggtcactgtggaatgttggggggcaggccccagtatgagagaaaaacccagagggatggtcctgatcagggctacccatgcccctgaggatggtggaatgaaggcagagtcgggggctgcataaaggaaagtctcttccagggaccaaagcttggagaactgagggtggaagggggattaaacagaagtgggtagggcagagccttctgcctgtgggctggatttcctcaggcaagaagcctgtgggtaagctctgtataatgcgaggaggagtccccacaaagcaggctggtcagtggtcacgctagtgtgagtctttcaaacatcccgtgtaagtagatactgtcattgcacagaggaggaaatggaacctggcccaaggtctcaagaaacaacccagccgggattcagactcggcagcctgcgcacttaacagccgtgagcaaccaggaactccccagccctttctcttgtgccttcaagagtgcaagaaactgaccactgcccctagagagctctctgaagagcattcccatggctacagattgggtttggagccgcttgggctcaccatgggccagcattgttttggatggcctgagggcaaggactgtccctgctcttcatgcatcctgaagattagctcagtacctggcacagagtcgatgttccagagaggtttggtgaatacagaaggtccctgttgcatggaatcctgcaaagcaatgttggtgttaccggaaccataggaaacagctgatatccaaccatttttgaacctacacaggtgtcagtttcatgtggttcagcctaatgagagcaccaccttaatcctgttgggttctcc

SEQ ID NO: 435 - DNA, 2313 bp, Homo Sapiens
ccacccccacctggagggcagtgcggtatcttagggcgtcattcttccagagccgcctgaggccagcagagaggaagtgctgtaggagccgtgagtgggcggcccggcctaccattgggagcagctgtcttgctgatgctggcagggtgcacctgtttcaaataaagaatgatcagagatcacacctgtaatcctcacgtcatgagcagctgaggcaggaggatcacgtcaggccaggagtttgagaccagcctgggcaacatagctaaagcctatctatctctcaaaaaaatttaaaaattagccaggtgtgctggcacatgcctgtcattccaactgctcaggaggctgaggtggatcacttgagcccaggagctcgaggctgagtgacccatcatcatgccactgcactccagcctgggtgacagagtgagactcatctctaaaaaaaaattgttttagaaatgaacagccaggctcccaaagcctgccagcctctgagggccggggaaggcgggtgcctggagaacagctattctttggtccagcctggccagagtctgcaccacagtgccccaggcccagccaggttgccagccctgggttgggaggagggcgaagggccggctaaggagacttcttcccacactgcctccccacccctgcccagcagctgcaggagaatcagcccctctgacatttagggggagaaattcagaatcaagagcagaaggcagaaatgaaaggattttctcagtgaaaggtcagagtggtttctcttgtttttgtttaaaaatggtttgtgttgaactatgacaaggccaaatgtactaaggcagcagaaacagggggagggcagggggagggcacggggacggctcctgagaaacagaggaacaggtcaggccgcagggcctcgggggcagcacgtgctccaaaggtggtgaggggaggggcgacaccatcagggcagggcccagcccaggcatgctccggtggacaggggagctgccaggaccaagctggatggagccaggccgccctgtggctcctggggagggttcccagagggctgccgggcgaagggagtcctttccaaaacggtttcctgagctctgatgcacacacatgcagctcacccccaagtctagcgttccattagtctaccgttccgttcttcccagcacattcggtgcgcagccgcgaccagtctaaccgtggcacctttccaccggccctgagccctggcgtgcccctccacgacatcccctgggcacggagttgtgtcgacaggtctctgtgactggctgggcatgttttcggggtttgcccgcggggcagcgtgtctcagagtttggctgtacgaagcggtgttgacgggtaaacccggttttgtctctccctccggcggttgagggctggttccgcgttccatctgttagtgatgggatcgtgttgccgtggacgtccgtgccgaggtctgtgtgtggacagcgctcagaccccctggctgcgcgcccgggcgtgtgctgggcccatggactctgcgttcagctctttgaggagccgccggctgtttgcagtggccgcatcacacacgctcccgccagcgacgcggagggtctgattcccctcgacccagcagctcatggtgtttgctctcagtggccgtcggcgcgaggcgggtccgtgtctcgctcagttgaggttcacgtttccccggtgcccggcgtcctggcatgagctcactggccgtgtgtggctcttctctggagaaatgttcaaaggccccttgtttaatcggccctttcctcttcatggtggagttgtgggagttctgggcatattctgggtacaggacttttcagggacgtggtttgagagggagctttgtggtgggctgggtttgtgtcctgcctgacctggggctgtgtgggtgctgaccggggtggggctggctctcgggggcagctcagaagggcctctgtccactccccacacagcccaggactgtggcacagcagcttgctcagacctgctgtgtgacctgaaccctgtgcctcctgccctgtgtcccctggggcctgcagcgctgtctggaagctcctccttgcccgttctccagttacaggaggcctccctctgggctgcagaatccacagagccagacgccccctgggcccccagcgcccccctgcacaagtggggaaactaggtcatggggcccaggcagtgtggaaggcgttgcaggagttgcccagggtgtggggtcctccagcctcagtgaagagtggcactggggcctgtcacagg

SEQ ID NO: 436 - DNA, 2410 bp, Homo Sapiens
aactgcttgggaaactttatcacagttcttggggacaagatctgtggtctgctttgctctgaggggcaggagaaaagggggcaatggtccgcaggggcagacgggcaggagcagagcagggggcgaaggcatattcagaatggcaaggaaggggggccagccgtgagacagcaggggaaggctcgctgctgggttccaaagatgcttggcagaaaaaattccaggctggaaaagcaagcgagagaagctggagggtggtatgtgggagacagctgggggctcactcctgcactgttagcctcagctttttactcccacttggatgatgaggtctgagacatccttactgccacctgggagaggccctgggaagggaagacttcacagagccatgaggggattaacttttctggtgaattaagcttcctgacatttccagagctgcggtgccctgggattccagctttgaaggagaaaggaaggaaggaaaagaggaaaggcttatgtagataatttttccaggctgctgagctccaacagacagtttctgtctctgcttcactcaagaagcccaggctcagaagataccaatcaaggaaatccccgctaggaagcctggggtagggagagctgctggcttgaccagggcacagccggcaaaagcctctacaagacagtcacccacagatatgcccaagaatcagtacacagtttccaaccagagatctccaaaatgaaacactcagggctacacataggaaaagcacgcacacacacacacacacacatacacagacacttacttttgtgtccttctggctatgctgacgagttttcctggtgaagcccggggctcacagagtaatctctgcagacaactgtggttcttgcctctggtgcctgcaggaggcaggcatgttgtgtccttccaagacagatggctcagggcactctggtaggattcaccaggaaactcatggagaagggaaaagggacaagattagcaacagtgaagggagggagaatggtgggagaggattccagatgaacggtgggtcgctggaggctgagcatgccagcaggatgtcagttctcagagcaaagcccatgtcaaacagccaacgcttgctccttctgtccccaggatcacctcctcgcacggggagcatctcctacatcaacatcatcatgccttcggtgttcggcaccatctgcctcctgggcatcatcgggaactccacggtcatcttcgcggtcgtgaagaagtccaagctgcactggtgcaacaacgtccccgacatcttcatcatcaacctctcggtagtagatctcctctttctcctgggcatgcccttcatgatccaccagctcatgggcaatggggtgtggcactttggggagaccatgtgcaccctcatcacggccatggatgccaatagtcagttcaccagcacctacatcctgaccgccatggccattgaccgctacctggccactgtccaccccatctcttccacgaagttccggaagccctctgtggccaccctggtgatctgcctcctgtgggccctctccttcatcagcatcacccctgtgtggctgtatgccagactcatccccttcccaggaggtgcagtgggctgcggcatacgcctgcccaacccagacactgacctctactggttcaccctgtaccagtttttcctggcctttgccctgccttttgtggtcatcacagccgcatacgtgaggatcctgcagcgcatgacgtcctcagtggcccccgcctcccagcgcagcatccggctgcggacaaagagggtgacccgcacagccatcgccatctgtctggtcttctttgtgtgctgggcaccctactatgtgctacagctgacccagttgtccatcagccgcccgaccctcacctttgtctacttatacaatgcggccatcagcttgggctatgccaacagctgcctcaacccctttgtgtacatcgtgctctgtgagacgttccgcaaacgcttggtcctgtcggtgaagcctgcagcccaggggcagcttcgcgctgtcagcaacgctcagacggctgacgaggagaggacagaaagcaaaggcacctgatacttcccctgccaccctgcacacctccaagtcagggcaccacaacacgccaccgggagagatgctgagaaaaacccaagaccgctcgggaaatgcaggaaggccgggttgtgaggggttgttgcaatgaaataaatacattccatggggctcacacgttgctggggaggcctggagtcaggtttggggttttcagatatcagaaatccccttgggggagcaggatgagacctttggatagaacagaagctgagcaagagaacatgttggtttggataaccggttg

SEQ ID NO: 437 - DNA, 2494 bp, Homo Sapiens
agctcatgggagtccctgaaccatatagaactatagcatatagcaaataacacatcaaatccctgccaccccattgggctctgcccacagactcacccaggcaccactgtggtctcttgggttccccccaccccaacccccaccccaagtcaccaccactgaggctgattaacaaaaacacaacatcaaattcctttacttctgaggtctcccctttaaggggaggcagaaatagaacattctttatcggggagggaaaggggtttaataaaaactggtataattagttaaatactgatctcggttaggccctctctgtgttcatgggcccagtcttggctggctgcctccccccagggagccccccctcaccccggggtctgaggtggcaccaggagggggctgggggcggccagcaccagcggcgtcctgctcagcccctctgcagggagcgagcaggcaggcaagccgctgggcggtgggacgtcaccaccgcaggaaatcgcgaatgaacttccagagcttggtgacccacaggttggcgccgaggtccatcaggtactggatctcgggcgtgagcatgcgccggcagagctgcgcgtgccgctgcccgatgctcttcttgaggttgtagcccaggatggacttggtgcccagcggctgccagggctgcatggcctcgtcctggatggcggcggcgtccacggcgtggcccccgtcgatgcagatggtccgcatgcgctcgttggcatggcgcagggcggccacctcgcgggccatgcgctcccgcccgaaggcctccaccttgcgccagaagctggcgttgaagtggcggtagaggtgggagtccagcatgttccaggcggtggcgcgcccatacagctcccccgagagccgcggcacgggcgagtcgcggcgggcgttgagcttgaagtagagcacgtcctccagctcccagcacagcaggtccttcagcagcaccagcgactcgtcgaagtactcttgaaggagcaccaggtggaagcgacgctccacctccaggatgtgctcctgcacctgcgggctgctggggtccaggctgttgtcatagcccaggtcgaagaagagcaggtttcggaggtagtgggcattgaagccgttggggtcgtagtagcgatccgggtcttgcaggaactcggtcagcttgtcgccggccgagagcttccacgtgaggggcaccaccggcccgaagtagtggaaggaggactcgaacaagcgggcggggtcgcggagcaccgtgatgaagatggcgttggtcggcaccaggccgcgcacctcgtcgtagtggaagcgcatgtggttgcagatgatgttgaagcaggccccgggccgatagtcctgcaccaggctgcgggcgaagaaggtcgggtagtcgaagtcattgcggccgttagggaaggcgaacttgagccggtgcttctggccgaagcggaacaggatgttgagcagggtgctgctggccgtcttgtgcgtcttcaagaacacgatgttgcgccgcggctggcactcccccgccgagccgttggcccggatcactgcctctggctcgagtgcaggtggagagcaggacgctgcggcctccggggtcctgctggggacagagaggtggggagagcctcaggggggtgctggggccctcaggactctggtagttagagagggagattattgggaacagtggtggcaaaggagctgggatagtgagacctgtggggcctgagtccaggctgggtgcctgcgcgggtggtttggcctctctagcctcatgttcctcttctgtgaaatggggacgataacaggccctattcacggtgttgtgagatgaggcacacaggctctcctctcattcatggccactgtgttgcatgtaccatgaatcagtatcagcttgggccacatgaaactgccattttataggacaaaaatggtccatttttgcagaaatttgcagtttcctctgtgtcaagttaatatcaccaaccactggtattgcaccagctacaggctgtgctgggtctgtgcagagcagccccatgaggaaacgggagagcctggttctcaggagctgggcctggagtcagaccgacccgtttgaatccatgcccatggacaggtcgcccccaccagggccccgttggcatctcagatgatgcaaatctgagccctgtacagacagtgttacctgattctcatgctctatgaggaaggctctgggttttttttgtttgtttgtttttctttttgttttgagacagtctcactccgttggcccagcctggagtacagtggtgccatctcggctcactgcaacttctgccttccgggttcaagcaattctcctgcctcagactcccaagtagctgagattacagacacacaccaccatgcccagctaatttttgtatttttagtagagatggggtttcaccatgttggccaggctggtctcgaactc

SEQ ID NO: 438 - DNA, 3457 bp, Homo Sapiens
aaaaattagccggatgtggtggcgggtgcctgtaatcccagctactcgggaggctgagacagaagaatcgcttgaacccgggaggcggaggttgcagtgagcagagattgcgccactgcactccaacctggtgacagagatgccgtctaaaaaaaaaaaatgcaaggattactgtgaaatccgtatgttaatgtaaaatattacttgtgcgtttagaagacaaagtgattcctttttccagaaaaggcaaaacggcccaagggagcgtgagagccgtggatctgaccaacctggtttagtgtcctgtgccgtctcccagctgcaggacctgagaaaacgtacttgaaaactcgtcaagcttcggcttcctgaccacacaaggtcacaccttctcagaagttgcggggaggctcacacatcactaccgcgccgggcacacagcaggcgccggctccagccctcctgctcccgcccgcggagcctccagcgctcagtcgaggtcacagcgagctgaactgaacccaaggcccgcaccaaacccacaggcacttgggggcggagcacccgcaggcgcggctcccggcgcgcggcccagtttcctccacatgcagatgaaaatcacgacccaaacgtcctcatggtggaaatcagaagacgcgcagggaaaacagggacgcggaaactgccgggaagcgcaggggctgacaagcagcctggcccaggccgtcccacgagcgctctcccgcgggagtagcgtttccgaggccgccagcgagtcagaggaaggcagggcgcatccgccctccagcaagaacgcgatgcactcgggcgcgacgacggtccaggcagttcccaggaggctgggataccagcccggccgcccctccttccccgcggctccccgccccgcctccggccctgagtggcgagtggctcggccagaacccggacgtcctcacctgagcggggcccacagcatagcacctgcgggcggggcggccctggagccccgcagccgcgcgcgccgcccgccagcaaagcccacgcgccgcgccgagcgcagccacacagccccacgcagccatccggccgtcgccgtgcgcacgtgcacggcgtgcggccccccccccccgcgagtccgtccgctgcacagccaatcagcggtcggcgcgcgcggcatcacgggagttgtagtcctgtaagcgcgcggagcccgtcgggcgcctatggaactcgacccgcaggccaaaggggctccgttgcaaggaagaagtgcggggtcccgccgcctcctagaccgagatcgcggtgagctggccgcggcgcacaatgggcacggcctgggcggcggcgtccgtactatcgccctgtgcctgcggatcccggtaacattgcgcggcaggccccaggccggcctccctcagcttcgcggactgtctgggccgggggtctcaaccttgacttcagggccgggccgctggggcagacccttagtgatgttcaggtcctctgggcccctgccagtcaagggacgctcgtcgcgcgccaattgttaagtctttcattgtttctgtaaacctgctgacgccctcccagcgcatagggagactgcgcacgtgagtccgcccccgcgcgcactgcggagaggtagaggcacgaatgtagtacaaggtacaaaatgactactccagagagggccagatgactaagtcagcaaacacttagggaacacgactgtgtccgctgcgcgtttcccggagtagacacaagggtgaatgaacaaagaatggatttcggtcactgaaagtggagaggtagccgactccgtccgtggaggcccttagcagagctggatctggtagtcccccggtcatgaggggagattctgctggaggaaagaggtctccattcccaccgtttgaaatgtgtaggatgccctcagattctttggcccattcataggtatagctatgctaaaaacgcgggaccctacaatgtacttagcactagcagagagggagtcgaggatatggacagagactgcactagctcacacattagcaggccagggtgcggtggctcacccctgtaatcccagaactttggaaggtcaaggtgggaggaaaacttgagtccaggagttccagaccagcctgggcaacatagggagaccccttctctattttaaaaataataaaatagggccgggtgcggtggctcacacctgtaatcccagcactttgggagactgaggcgagtggatcaggaggtcaggggttcaagaccacctagccaagatggtgaaaccccgtctctgctgaaaactgcaaaaattagccaggcgcggtggcaggcgcctcaagtcccagctactcgggaggctgaggcaggagaatcgcttgaacccaggcagcagaagttgcagtgagccgagattgcgccaatgcactccagcctgggtgacggagtgagactccgtcttgaaaaaaaaaaaaataataataataataataaaatgaagaagtagttagcggtgtcctttggtcctcagctttgaagggcaagatcttaattcagttcaactacagctaatcagaatttggaagactaattcaagtcagtcaaactcacaatagcccgacacttaaaccctgccaggggacatagctctctaggattgcaatgttcctaatcccttccttctattaaactacctagaaactgatttagtcattagaaatttcttggtatgatggcttttaaacatgcccacagttttttttgacaatcggctcctcaaaagcatagccaggcgcggtggctcacacctgtaatcccagcactttgggaggccaagtcaggcggatcatctgagatcaggagttcaagaccagcctggccaacatggcgaaacccgtctctactaaaaatacaaaaattagctcgtcatgcacctgtaatcccagctacttgggaagctgaggcaggagaatcgcttgaacctgggaggtggaggttgcagtgagctgagagcgtgccactgtactcgagcctgggcaacagagtgagactctatctcaaaaaaaaaaaaaaaagaaagaagaaaaaaaggccggtcacagtggctcatgcctgtaatcccagcactttgggaggccgaggtaggtggatcatctgaggtcaggagttcgtgaccagcctggccaacatggtgaaactctgtctctactaaaaatacaaaaattagccaggcatggtggtgtgtgcctgtaatcccagctacttgggaggctgaggcaggagaatcacttgaacctgggaagcagaggttgcagagagctgagctgagattgagccactgcactccagcctgagcgacagagcggaactatgtctccaaaaaaaaaaaaagctggagttgggtgggtatggtggttcatgcctgtaatcccaacac

SEQ ID NO: 439 - DNA, 2424 bp, Homo Sapiens
cccaactgctcccacagttaccagggcagaaaaaactgagattaggggtagggcacaaaggagaatatatttatgttttatttgcataattacaaattaatgttaaaaagaatgcaaagtcaggtccagggtagggatgaagaggttgcagatgccctcaagtattggaaagctctggccttctggccttatgtcttttttctttcttttctttttttttatttttgagacagggtctccctctgttgcccaggctggagtgcaatggtacgatcttggctcactgcaacctcaaactccccggctcaagcgatcctcctacctcagcctcccgagcagctgggactacaggcgcacgtcaggtggcccagctaatttttgtactttttaaaatttttttgagacggagtctcgctctgtcgcccaggctggagtgcaatggcggaatctcggctcactgcaacctcagcctcctgggctcaagcgattctcgtgcctcagcttcccaagtagctgggactacaggcgcgcgccaccacgcccagctaatttttgtattttttgtagagacgggttttcaacatgttggccaggctggtctcgaattcctgacctcaagtgacgcgcccgcctcagcctcccagagtgctgggatcccaggtggagccaccgcgccgcacttctcgggccttcttctaactcgggtccctgggccccccaggctctcgcttccctcccctacgccgccccgcgcccgcctcagacctctctgggacccgccggcctggcgtcctggcccgcccgagccccacggtccctcgggtcctaacctcggcggggcaggcacctcctcaggaagccccggagcaggctgtcgttgtataggtggcccaggctggcggcccctgaccgaaggtcgcgtcgggtcagtgtgcagcccgtggctgagaggcggctgctgaggggccgggcgggctaggggccggctagccgccgttcgcccctgctttgcatattcatgaagtctagcgaggccggtcgcccaggctagccgtggacgggtcatgaattattcatgaggaaacctctggtcccgcccagaaaggcctcgttgactattcatgagccgaggagcgggtttgggccggaaaaggccgttgacccccggtgggagggaagcgtcgacgagctgaggtgagggctgttgagacgcgaggtctcggcccagagagggcactcgggcgttgttagttctgtctttatgtcaaaaaacaatttttttttcttttcttattacttaaggctttaagttggatttgaaagtatcatatttcgtgagggcctaaagtactgtgaagagaatcgggagggcagggggctgaggaggaaggcaaaagggaggcgatttcccccagaactggacagagagcacccaggtagttttgaaattcagatttttctggacatgaaatcaaacttgctgagcaagcagcagccataatgagccatgatgaggctggcagggcagacgatgtctgtgcccgacattggagggggccgtgtgtggtggagctttggggaagtttatcttacctgggtcagattctccccagccattgaggttttctgccaggatcgatgcctggtacaggccaagaggtgagagaggtggggacaagacaccccgccccccttgacctcagctcccctttcactttagtgaggatttgccaattaatccctatggactttagttccctaaacagagggagagagtcttgaacctcaggattagccaatcgccaaaatgtgtccgagtacgcagggcactggacaggctgtgcagtacatcgtgtactcagctggtagaaatgaggggtggttctggcccctaaaggggtttttaatctcagcaggatcataatctaatttctcctccattggaccatcaatctgttgaggtaggaacagtattttacatctcgtaatcctgcatgttgttgcctggcacattgtagttgcctcgtagatgttgaatgaatgaataattgaaatagcatgaaaaagatattaaaaagtcaaaagagcatgaacaaatactcaattaatatagtggaagccattttctctgaatgagcacaggtaggggaattaccagggccaaatggaatttgttaaaatggtgaataatttattgaagcaagctctgttggaaggtctaagtaattgggcgaactttggcaaaccaagttcccttgcttagcctcactttccttttcttttttcttttttttttgtgagatggagtcgagctctgtgccaggctggagtgcagtgacgcaatctcagctcactgcaacctccacctctcgggttcaagcgattcccctgcctcagcctcccatgtagctgggactacaggtg

SEQ ID NO: 440 - DNA, 2371 bp, Homo Sapiens
ctctaggcctttcatgtggttgctggtcagaagcacatttgataaggtgtcccggctgtcctggccgtccctacatgaagtctgtctagccaaggcatttccaggggtctaatgagaagggaactgtggttgggtgatttcgaaggtgatgggaaagacgttgtttttcatttataaagctgccagggccagttggggaaaagcagaggaaagggaaactacaagaaagtagatccaaagaaacagaacctgaaagagctccccaggctgctgcctagaacatctggaactaagctaatgggcatggagggagagcagctgccaagccatctcttggcacgagctctgagagccgcctgagggagctggagcagacgccgtgggacttttcccctgagttattgcagcttcctcctggagccggcccggggtggcggctcaaacatggaaatgtggtctgaatcctcttcccagcaaccgctgctgggcctcagtttctctctgtgaggcgggcagttgagcgaaatgaaattataatatttaattataatattgcgagtgtcagacactgcgctgagttctgcatgtggatcctcttaatccttaaaacaactccagaggtggcaatgattgcacccactttacagatagaataactggtcagagagggtgtgtgtgtgttacctaaggtcacggagccagcaagggcaccgggtgagaatttgaacccagagccactggcttcctaaccacagcgctctcctgctgagcagggacaagtactcatcttcccagctctccctgcagtcagggagccagaacaccctgggaccggaaactgctgcctggatgacctcagccagctacctcgtttcgcagacggggaaagtgagaaccagagaaggccggtgactggcccaaggtcacgttgtgtcccatatcctcctctcattcccggacgtccagctccccaacagccccagcacagagctggggaaaaatcttcagagacatccccttgggaagacagctggaaggcagggctgagccggggtcatttgtgacccagcggtgaggtgatgaggtactgacgaaagtactgtatttcccccttttgagaaacgctttggcatcagatgagtcttgggggagggaggagaggaatttggcagggatctggttataagccatctggagggtggcgtgaggaccggaaaagccgctgcccgttctgtttggtctcatcccctgaatgaggtcactgaatgtgcacgggaggctcagcgctgccccactccagcctgatggagaaatcctacccgaaatcccaaagcagggcagggacattcccaccagatacttttgcagcctttgtcctgtgggacgaagcaagggatgatgacacactcgcctgcccacccggaagtgagtctcaggtcattgcatcagaagggtgacaacctaacacaagtcattgctaagcaactctcgcgtgctcagtattcacattttcttgcttcattctgaccactacactgcacaggagccattattctcaccccccgcctccatttacagatgaggacaccgagacccagagagttttttgttttgttttgttttttgagatggagtcttgctctgtcacccaggctggagtgcaatggcacgatctcagctcactgcaacctctgcctcctgggttcaagagattcccttgcctcagcctcctgagtagctgggactacaggcacctgccaccacacccagctaattttgtattagagatggggtttcaccatgttggccaggctggtctccaactcctgacctcgtgatccacctgcctcagcctcccaaagtgctgggattacaggcatgagccaccgcgcctggcctgttttattttttgttttgtttgtttgttttgttttgttttcagagatagggtctggctttgttttccaggttagggtgcagtggtgcgaccatagctcactgtagcctcaaactcctgggctcaagcaatcctctcgcctcagcctaccaggaactggaactacaaatgcatgccaccatccccagctaatatttttcctttttggaaaaatgaagtctcactatgttgcccaggctggtctcaaactcctgggctcaagtgatcctcctgcagtgctgggattacaggcatgagccactctgcccggccaatctcagagagttttgatgaagttacaaaattctgaccatggagccagaactcaaatctaggtatgtgaggtctgagcccaggcttccaccagggccactgtgctgcaactgccaccacttcctggcacctcaagtgacacccgagcatcattcaagggaa

SEQ ID NO: 441 - DNA, 2500 bp, Homo Sapiens
ctctggagaacaggatacgtggagggttaggaaggggccaggcctagagacgggagactccctcccggagcaggtggaggcacaggaccattcgctaccccatctgccggcacctgcgggggagcccaggcattctttgtaagccctcctgaccacctggctcaaagaaaacagaagcatggaggccgccaagtattttcaagaaataatcccatgaacatggcatcacttttttagaaagaggggcttggggcaggcagaggagagaagggagatcaaactgagagccaagtttccagacggtcctgcaggaggagaggatgcagctgcccagagggaagcaggatcacatttaaggaagtgtgtggggtccctggatgacaccagcacccagtgcggctctgtctggcaaccgctcccaaggtggcaggagtgggtgtcccctgtgtgtcagtgggcagctcctgctgaacccacagctcactggggagcctgacagtggggccatgtgcctgacactcctctctgcttgtggacctggcaaggcagggagcagaaaacagagctacttgaaggctttctgtctgcgtctgtgtgcagtgtggatttagttgtgctttttacttgctgggagagcacagccaccatttacaagcagtgtcaccctcgtgggtggcgaggacagaacaggagcctctgctctctgtacctatctgggcccggtgggctcccttgtcctggcttccatctctgtctcagcgaccattcagccctgcacaggaacacatgttgcttagaaaagccaaatccagcccttgtctctgcctcctctggtctcatgatgtgcatctgttaccttgaaactggaaaccagtctatcaatgtctgtgccaattttttattccctccccaacctccttccccatacgactttttatttatgtaggatgtgtgctgtctaatgatgggatgaccacacttttccatgttctaaaagtgctcctctcccacagggtcccagggctggtggttgctttgggtctacagctacgtcttacccgcctcctgcctcaacagcctgtgtggtggcaaagccggtgtggggctggggaacgcagcgttctccaggaggggacccggctctccttctgcagtgcaggcgaaggcctagatgccagtgtgacctcccacaaggcgtggcttccagactccccggccggaagtgatgcttttttgccgcgggccctgggtttgaagcagcctggctttctcttggtaagtggctggtgtcttagcagctgcaatctgagctcagccacctacacaccaccgtggccgacactttcattaaaaagtttcctgagacgacttgcgtgcatgttgacttcatgatcagcgccgctgggaagaaccccagagccggtggggtggggctggaagcagcaggtgcagtgatagggctgggtgcccaggaggcctcagtgctcaatcaggccaaggtggccaagcccaggctgcagggaaggccggcctggggggtgtgggtgagcacaggcaggcaccagctgggcagtgttaggatgctggagcagcatccgtaactccactgagtggggtagtctggttggggcagggaccgctgttgctttggcagagagagaggatccccactggggagaggctgttctgactctgcaggtgggacagggacagatggccaccagggtgacccggctggtcttcctttgctatgctaagccctgggacatggaggattcctgccacacagcctgggcccgggttcttacctgtggccaccgctctggcatgagcccctcagtcttgggtggtttctgcctggtccgggatttggtgttgctgctgagtccagcctttctgccacctccgcatgggccgtgggtggtgatgtcagctgcctcccaccttggcttcagtagctcacccagcttacaggggagctgccctgggctggagatgggcatgcaccctgggtcctacttgaatgaatgcagcttgaggagacccggccatatacactgggccacaggttaccctcggcaatgcccacatcagccgtcagcctgagcctccccaggagagcaaggctcacacgacaaaggctgcccgtggccagtgaggtggctgagcccagccaggacctttctcggactcccgggatgtggctctgctcgtgagctgcctggtcagctctctcggggtgagaggggcttgtcacacgggcccctgcctgcagtgtgacccttctcagcttctctcagcagccctgcctgcagagtgtcaccaccaccatgatcatttccctgacactgcgagggtcgggggacgtcctgggtagagacagggcccgtggcagcagcaggctcaggggcgccctacactggtgggctggggacctggtggagaccacgccaagggctggacaaggggacgagcctccaccctggcctctccgcaggcc

SEQ ID NO: 442 - DNA, 2431 bp, Homo Sapiens; identical to SEQ ID NO: 422

SEQ ID NO: 443 - DNA, 2451 bp, Homo Sapiens
caattaaagatttccctaaacccagcagggaccagcaaatacttatagaagattagagatttcttgtgagtgcaaagggctcagagtgacctgatgctatagaccaaatcttatggtcccctcaaattcatgtgttaaaatctaattccccatatgatgggatttggaggtgaggccttggaaggtgattagatcatgaaagcagagactgtatgaatgggatcagtgtccctatcaaagggactgctgagagctccctcatctcttctgtcatgtgaggacacagtaaaaagatggcagtctatgaacaaggaaggaagccctcatcagacacgaaacctgctgacgagttgaccttggattttaccatctccagaagcatgagaaatgaatttgtttctctgctacctagtgcagtgcattatcttttggcacccagattggctacagtaccaacatatcaacttgtacacgtaatttttgaaattctgatgccaaatctttgatggcaacaggtgattgatctgctggaggaatggactgacatgatccctctttccacaataaaccagagagtaaaaacaagcaaaagtaggtcaaggtcttctaaaagccgtacctgaaaggtttccagtaacagttgattagatggtaattcaatcacacaaacaaccacggcaaagatacacaactatcagacattttcagaatagcctctaaaacaacatctgacaacattagggagttaaagaaggcacgaactttcaaaaagtcaaactttatttaaatgttattgtagaaacttgtaattttaacactatggatgaattctagggcaggtggtggcatggcatggcgatttgggggcacaagtgctgagttttgaagcttcggttttgataccctttggagatgccccctggcctccacacccctgcccacctgtcaagaagagcctgtcctgggcagcacctcagggacaaacagcccagaagcccagttgagggcagacctccaaggttggaggaagaagccgcctctgggagcaggaggagctgctggatcccctcctcccaggtttcttttcctgccccccagcgcctcttgcaggcaggcaaacaaccccagcaggagcagcagcaggcccttcagccgcagggctgcagctctgctgaatgagagaagcctctctctggcgagtcagaggagcgcaggccatatacccgggtctctacctccatgtctcccactgtgcccaggactgagcccagcgtgggagatgcgggctggggccgtgctggccaccccctctcttccacctcttgctccagccatgctttcagctccagggctgaggccagtggctagagcagatctcatgatgtcaggtagctcctcactgggctggtccttggcaggaccaggacaggggcaggagggatctggagctgctgatagctccagttctgtccctgaaggggggtcttcccctggtgctggcactggctcatcagctggcgctggaatttcctgtgttgctgcacatggaacaggagatgaaaaagaagaaagactcaccaacgtcagtcactttccactggaattttcacacacagaatcaacctcgctgaatgtaaggtattccagcccgaaaacactgcccctgcaaaggctcatagactataggccacctcaccgtgtgcctgtgcctcgatgaactccagaggctccagctggacaagaacaatgtgcagatgtggccgcgatgggatcaccggtggggcctggcctggtagggcctgccctgggctgccctgtggtacttgggggcgcctttgcccaaatggccagaggcgcctggagtgagagatgagtgaggtattgcccctcacaagagggcattagctgcggggatccgcccacagaccctgacccaaatgacggatgaataaaacgtacactgacacagagttattctgctttgccagtcctgctgagtgtcccactgcctgcacaccaagagaggtttgtcactgcagctggccgtgaatagctcgcactgcaggcatttatttagtatagaatttacaacggaagctttgagtaaatactcttgtggataattaacatggttaagagagtagttctaccaatgattaaagctcaggtaccatggtttaaagtaaataccactgggggcaatttcccgggtctacctcccccctcctccccaagaggactatctggctcaaaggctagttaatggaagtagggtaaacagacttaactggggaagcctctattgtccctaacatttaccctatgagctaatgctctaagataagaagcagctgccttcagcctgttcaattattacaagctatgtaacctttccgccttccaaaaggtttgtgactattccctgtaactttccctaatatttccctttaa

SEQ ID NO: 444 - DNA, 2402 bp, Homo Sapiens
ctgcttttgcaggctgagttttggagtccctctgtgctcgggatggagttggagcccacccctctgaccctcactcgggagcagtggagccctgagcctttctgaacactggggaggatgggtgtagacggactgtgcacttctgccccctttgccaacctggtgggcaggtgctgagttcacaaggtcctagaatcccacaacgaagccagggtgcctggtgggagcccagggagtcccagctgctgttcattcccccttctcctcaaaaagcctgttcatctgtggcgtggggactatcattagtggggagtggctaaggtaggctaggcagggacgcagcctacaagccccgtggcatcttttccttccctgtggacctctggggtgattcccttgtctctgtccctgcttctcagaaatgcccctatcaatctgagcgtggtggctcacgcctgtaatcccagcactttggaggctgaggcggggcagatcacttttggtcaggggttcgagaccagcctggccaacatggtgaaactccatctcgactaaaaatacaaaaaatgagccgggcatggtggcgtttgcctataaacccagcaactcgggaggctgagctgggagaatcacttgaacccagtggagattgcagtgagccaagatagcaccactgcactccagcctgggtgacaaagtgaggctctaccaaaaagaaaaagaaaaaaaaagctccaatctgtgtgtcctgcctccccccaggaccaggcctgccaggcagcagtgggagctgacctttcagcagatccacaaactgaaagttgaactggatgtcatgcttcttcgagaagatgtagacggcacggcagggtgctgacagcaggtccatgtagagctccagggccatgttgagacacatgccaggccccacagctgcagctggccagccacagacctgggcctatgtctggccagagtccctggccctgtgccctctccgatctgggcccaggaccctgcattctggaacctcttgtttccctttgtgttgtcataaggccaggaagcctgcaattctcacagcatcaaggattctaaggaggcccaggagtaggctggcagaggcccgtggcaaaggtgtggcagccgtgaccctactctccccctctcacgtgtgtctgtgtcccgtggcgccacctcacagacaccctgtctgagaagggattatgcctgggaattcccagggccggactttgattgcagaacctgacgaaaggggctttgcagggtccagaatgaggaggaggcaatgagaattatccctggaggattctagaagtagaggctgggagcatccacaggtgaatggagcctgaactatgactagaaaggaattgggagaaagagacacaggaacctgggagcttcgggagcagtggggacaccaccaccaggaagtcagggggcactcggcaatgaaagtggcagatgcaataaaacttttaacatattgttgtataatgtacaataatgtaataaaaatacaccccctatacattattgttccaactctagctctatctattgccctcctcatatgaatccctctccccataccccattctctagttaatcttaactaggcctcctgtttatattagccacatcaagcctagctgtctactctatcctgtgatcaggatgagcatctaatttgaaatatgcactcatcggtgcactatgtacagtggcccaaacagtctcatatgaagtcactctagctattatcctcctatcagtcctattaataagtggttcatttaatttgtatatactcattggaacagaagaatttctctggctgctcctaccatcatgacctctggccataatatgacttatttccacactagcagaaaccagccgagcctctttagacctaacagagggggaatcagaattaatctcgggctttaacgtcgaatatgctgcaggcccatttgccctgttctttatagcagactatataaatatcattataataaatgccctgaaggccgcaagaggttcgtgggtgcagtgcacaggagaccatatctggggacagcagctgcagcagaccccaagctgggccatccctgccacttgccaggtggtgcttggcgaaggcaagcagctcccacccgcccggggaatacagcgcgacccccggcggcatgctcttcagcaccaccccaggaggtaccaggatcatctaccactggaaattcctgatggagtgttgaaacttacccgtgaccaaaacactcccaagggatctgcccaccattcccggggtcaccagccctgccagtgatgatccccccaacggaagccagccagagccacctgagcaatagtcc

SEQ ID NO: 445 - DNA, 2500 bp, Homo Sapiens
aatatttgtacgtttagtagcaatggggtttcactgtgttgcccaggctggtctcgaactcgtgacctcaggtgatctgcccacctcggcctcccaaagtgttgggattataggcgtgagccaccatgccccactcccattcgctttttatcacaggagccaaagaacactctctccctggtttgcgttttttttttttttttttttttggttctaccaagacattttaagatgagtttctgtcatttccatttgaaaaagtcctgactagtttactcccccgaaccaaccagaagacacaaagcagagctcaccttcctggaaatgggccctttaccccctctttttttttttctcctctagtttggaaattctttctctccacttctgcctgtcccaggcttcattggccatgatcgtcctccattgctgggtctcagtctcctcctccctccataaatctccccctttctcagatgaaaagaccaacactgaaaaggcaagttgatgtgctccggtttgcacagagccctggaagcagagctgggatttgaattctgggctcctgattctctgtccagggctcttcattctggcagagcaggagatcaatttcttctctttctttttttttaaatgaagcttttatacatagctatccacatatgtacaagcagctcttaaggccagagaagttaattccaaattttagagctgtggaggctctacagattatatggagtttcagctagtgattaaatctgaggtaacagcatctggaggctcagccttagcactgaggggagttggagggaaaaattaagccaagagtaaaatcttcccgttctgaaaataatagtggcataacacaatactcctggactgtgggaaataaaatggagagggacatgattagaaggaaacttctagaattctactaattccacgttcctcaaattggtacaactggtgacaatctcagagtcacctgtcatcgcatcaaagtttgacagagaaggatgacccacaggagcagccttgctgtgcttgaggattgtttgacacttgaaatgagcttcggatcagttcttggctgaagtccacctaggcccctttcgcgaaggctaagctatcagagtcaaccaccactcttgccccaccctgttcaaataccgtcgtcggggttgataactgtatccagtgaacatctgtactggaatccggagcatctacctccctccacctgcagcctgaggaattctgatcctttggtgatttccagaagcctctggacgcagctgtccgtgaggcggatctgcccgtcgccggcctcggggctggacgacacgcccggagtcccagggaggccgcgaggagcctgcccctcggccaggaagtgaccgctgtctgcgtcgcggcccttaaggacaacccctgggcggcaaccatcttcctccacccaggagatcaatttctttgttgaggttccacctaaggctgtagcactcactcactgaggttcctaagaaacctgcctgtcctaggaaacctcctactgagacctgccccgcactgccacctggtggtaagatataaaaacacaccctccacggtgggatcagattgcgcgcctgctccgcccccaccccgccctctccccggtggtggggtagagggatggtggaaagggaaccaagagctagttcccagaagtgtaggtatctgggattgagattggagtggggctacacctccttctctgttttcagtaccagccatagctctgtcactgtgcctctagtttctttcctctttgcagacattggccacttgtgaaactaattgtattccctctttgcattgtcttccaggacacctggaaccagcgtacagttcactgttagcaactggatagaatcgcatggcaggaatttagaagaggagcttaatctctgagtccacattccttcccctgggcctcattttcctaccttattttatatttagttttctgatgatgttcaggacatccttccagccaccttaactctcctctttgtaagggacaggagggacaaagcaaggttatacattcagaaagagcttgcctaccttctgcaagtctcagtttcctcccctataaagtgggcacaagaatccctgccttggagggttttgtgtgtgtttcaggagatgctggattaatattagtgtccaccctatttcccacctccccatcctccaggctctctgccagttatgtgatgcaggctaggatgcaaaggagatcaacagcacagatcactttttccccagtgccatttgtgctctgcaggcccagtgggtgcccctactagagccttgtaccctgagcccagtccctacctgccttctggaagatgttggctccagaattctctgcctccctcctgcaggcattgtggcattcacagctgatttgcagagagcccagatgcatctcataaataaggaatgtact

SEQ ID NO: 446 - DNA, 2480 bp, Homo Sapiens
gagactccatctcaaaaaaaaaaaaaaaaaaaaaacaaaaaaaaacccaaccaatcaaaaaacaaaaggtacctacctggtaggttttggtaattctagagttaatctgtgtggtgtggtggccaggaggctcagtgcacattcaataaacatcagtggccatcatgattcacccacagctgcaagtcatccccgcgactgggaagtcctcagaactcagagtccctgtccctggcaaaatttccctgtcctaggttctcctctgtcaagagactgcttttcctatagcgcgaatagatggtcatggattattccacaaatgactctctactgaaggtgttcagcctggcttgccctttcaggaagcaggttgaggtttctccagaaagttgcccagaagtagtgtctctccagctgttgcgacgacagctggctgaacgtgccctaacccagccctgactcttgcttcttttgagcctgtgcagcagccgtgttcattaccaagtgctgccggcagagcctggtggtggaacgccaaagtgtgtgtttcagtaaatgctcgtcacgtgcctgcgttagtctatgcacgctacattttcgtagccctcagttatttcattaataggcctgaactagttctataatattggggagtgaagaatgaatgatcctatttcttttttctcagtttgtctatctcatttttcactatatcctgtgcctagaatagtgcttggcacgggtagatgcttagtaggtatattttattttatttttatttttgagacagagtcttgctctgtcacccaggctggagtgcagtggcacgatctcggctcactgcaacctccgcctcctgggttcaagcgattctcctccctcagcctcttgggtaagtgggactacaggcgcccaccaccacgcctggctaatttttgtagagagagttttgccatgttggccaggctgagctggagcaatgctcctctcacctcatggagcctccacctaccacagctgtcagtttcccctaatcctaggaacccccgccccaagggaaacaggacagacagcgcccgtgtcccactctgctcattttcagatgaggaaacagtcaccaaggtcccgtgcaaactcgccgcccacccaacagcccacatcacttgccttgctccagcttcccgctcgccagctggtgttcctggcagccagcaggtccgcgggggccccgtctcagccaggctgggggccgggggctgggcctcaggaactctgctgctgctgttggggctgccccaagctagcgtggacagaagcccagagctcaggggcacctcagggctgaggggctcaggctggcccttgggtctcgggctcagggcagtcacccagggtgtgtgcctgcagccaatcagggttgtggggaggaaggtccccggcactgccacagtctgcaggtcccatgagcctggtcctggggttgggaaggtgggagtctctggctccaggaggctgtccctgcccttaatctccggcagagtgcctacgggaggagggggaggagccgcccccacagtgggccacagctaactgtccacaggccccaggccgccatcctgagctggctcccaggctacagtccttcctgtccacagctccaccatgtcaggaccaggacaggagtgggtgctgtcgacagggaacaaagggggcagcgtggggctgagtctctggggcaggtagggtgctccgtgacccacgggttcctcattgtccttggaaacctcattggtcctgtcccaccatggagggggcagctggttctggctgtcctagtcgactaggaagtcattttggctcccaggggtggcaggcgtctgcgtgccatcaatagaaaccctgggccagggcgggctggagagctcaaggtctggagcctctatgggggtgtcttcctcacgcaggaaattgaccagagtgttcccaggagtctgctctgaaggtgggggtggggagtggctggcctggctgggccaagggctagtgggccagggtctcagtaccccctcctccttggctgcaggaggccctgtggcaggcatggggctgccggtggaaggtgcagcaggacggctgtgcagtgggggcgtccgatcccctgtccctgccaggtctaggtcaggcccctctaagggcccatagcacagatcctcgtggagatgaatgaaattgtagtcgtagtggaagtcatctacaaacacgcgccccagtgggcccagctctggggcctcctcctcaatggcattgccatgctggctggcgcaggtgaagggcttggggccaggaggcgtgagatgaagtcagcctcgctgaagagctcgtggctgaggagccgctgcctgagccttcagggcccagtgtgtccaggattcgccaacagggtggtagagagcaggtgactgtgctggctggctgctggg

SEQ ID NO: 447 - DNA, 2364 bp, Homo Sapiens
aagctcctcttgtaaccgccaagtgggttatcaaggcaggggaattgcagtggagaaagagtttaatttatgcagaaatggctgaacaggagaccagagttgttttttgtttgtttgttttggtttttcttttgagatgaaggcttgctctgtcgcccaggctggagtgcagtggcgtgatctcggctcactgcaacctcctcctcccaggttcaacccattctcctgtctcaacctcctaagtagctgggactacaggcatgcgccaccaggtctggctaatttttgtatttttagtagaaatggggtttcaccatgttggccaggctggtcttgaactcctgacctcaggtgatccttctgccttgacctcccaaagtgctgggattacaagcaggagccactgagactggagtttttttattattcaaattagtctcttggagcatttaggggctagggtttttcaaaggtagtttaagggaagggtggcgggggtggctaggcaatggggcctgctgctgactggttgggggtgcaatgataggggtgtgggaaatgatcctgtatgctgagtcacttctgggtgaggccacaggagcagttggcaggtccaggtggaaccataggtgtcagacatacaaaaagcctgaaaagatacctcaaaaaagcccgggcgtgatggctcacacctgtaatcccagcactttgggaagccgaggtgggtggatcacctgaggtcaggagtttgagaccagcctggccaacatggtgaaacctttgtctctactaaaaatacaaaagctagctgggcgtggtgatgggcatctgtaatcccagctactcaggaggctgaggcaggagaattgcttgaacccaggaggcggaggttgcagtgagccgagatcgtgccattgaactccagcctgagcgacgagagagaaactctgtctcaaaaaagaaaaaaaaaaagatacctcaaaaggccaatcttcacgaagggccaggggtcccacaggtgagtggagccccagcagccccctcagctctgcgtgcccatgtactggtcttctccctggctctatactcagtgttcaaggggttgcagtgagacggggcttgggccgcggagctgcgcctggctttgctgctccacaagggcaccgtggctgtcagcctgtccctgcaactgctgcagagccacgtagggttacaggtggtggctggctgtgggatccacttcttgtgcatgacacttctaggcatccggctgggtgcggctctggcagtcagcagggcctctgcaccagctggcccagtctgtgctagagggcatggtggctggcaccttcctctataccacctttctggaaatctttccaggagctggcgacttctgagcaaaggatcctcaaggtcattctgctcctagaagggtgtgccctgctcactggcctgctcttcatccatatctagggggctttgaaatagaggccgctgttctccctccctgccccagtgtgtggggaaaaggaaggaatgggaagggaggttctgaggacgaaagctttctctaggagctaaggatggagcctttggcactatctgacccatgagagggaagtgggcaggcaagagagactggtctcagccccaaggaacgagagacggctgagtcactagagacatgatcagggacattagtgttactagaaaggggtcccgatccagaccccaagagagggttcttggctcttacacaagaaataattcgaggtgggtccataaagtgaaagcaagtttattaagaaagtaaaggaaggccagacgcggtggctcatgcctgtaatcccagcactttgggaggccaaggtgggcagatcaaaaggtcaggagatcaagaccagactggctgacacggtgaaaccctgcctctactaaaaatacaaaaattagccagctgtggtggcgcatacctgtaatcccagctgcttgggaggctgaggcaggagaatcgcttgaacccgggaggcggaggttgcagtgagccaagattgtgccactgcgctccagcctgggtgacagagtgagactccgtctcaaaaaaaaaaaaaaaggaagtaaaagaattaaagaatactccatagacagagcagcagcatgggctgcttgactgagtatacttacagttatttcttgatcatgtaactgcccagcgggttctccttgcccactgcctagacagagccgattgatcaagacgggaattgcaatagagaaacagtaattcacacagagcctgctgtgtgggagactggagttttatcattactcaaatcagtctccccgagcattcggggatca

SEQ ID NO: 448 - DNA, 2467 bp, Homo Sapiens
gagaggttctggaagggcaggggcgtgtggtgacactgggtgctcctgggttccagtacctctctagccagttggaagaatataggcaagtcaagtccttcctcctccctgagcctctaattcctcaccggtaaagtagggatgataaaaataaattattaaattgttgtgaggtttcaatgagggcaaagcttgctgcctgaaacagagcaagctcttgtggcgtcttagctatttgtattagttacttgtatttttctctgcggtttcccttttaactcccacctcctttttattttaaaaagactccttttgaaaatgccagcctgcctcagtagtaccaggagacaccagggaaaggcttccttctttccaagctgaggctgagaaggaatgggaagaacgaagagaagcacctttgtggaggcctcctccagctggccctgggtttaggaacatcacacactcaacctccaaaggccctcaggggctggcccaaggtcacacagcttgacagtgcggagcacttcgaagccagggcgtgtggtgtagaacaggctgggtgcctgaattcaatcagccctctctacttctctactcagagcctcccaggctgtggggtgttcacctgtgcaccttcaagccgatcacttccttggggtcctcgtcaattcaattccatggaaatattacaaggggtagacagagatgagccgtgtcagtgtctgtactagcagagggcaggaccactgagcgtccggaggggagacgagtgtctgggtgtccctgggaacctggcttgtctcgacccctctggggggctcctcttggctctgacctccattctcccagactcacccccactcatgcccacccaccccgaggggccccccagtgtgcactcacacactcacactcaaactcaccaccccacttgctctctaattaccaggaacgtggcgctgtctcaggttcttcctcccctgcattcctcagcagctgccctcactgggcagggcaaattataccgtggcccgaccataaaagccactttccaaaaaaagaagctttaaggcccccgagagacgcagctgagcctctcacctggcagtgcctgactcaggaggtgatgtctgggccatgagccacagagcctggtgtccctttaagcagggagtacaaattctcatccctccctcctgctctccctgacgtcagctggaaggcgtgtgagtgagtgaggggctgaggtaccgcccgcgcgagcacacacagacacacacacacacacacacacacacacacacacacatcttccagacccatcccctgcctgccagctccacgagccagagagagacagagcgcggacgccgcaggaggcagtgcctggaccccagctgcccaggagaggtgaggggctagatggggcctgaggacactgtgccagaaactgtggctttggccaggccgaaggagagaggtacaacgtgaaggtgggggctggatcagcccagttcagcttacagatagggtgttgggggtatagaggataccacctgtctctccctccctcattctctccccgtgacccccaaatgaggtgaggccgtgtggctcccgtgggagcatgtctgtgtctgtgtctgtgtctgtgtctgggacctgcgtctggctcaggaggcagagagcagcagatacctgccaagccgcagcctcctgtctgggaagcagcgggagagaggaccgccttgaccagagaaaccccagtgccgcttccagttgctgaaagcagagtgcagcagggacccttgctggtccttcccctggaatgttgggctgggaagggaccggctgggaaaggcagacagttggacctggagcagctgtcttatcctgactctattttttccccagtgtgatggggataattgtgttagttggcttagagaggtggctccgtgtggttattctcttcccccaggtaccaccccaccccgagcccttgcttcttgcctgcctgctggtctgctctgacctccacccttgccagggcacagcccccggagggcaggggtgataagtcagggcctgccaggcctctatcttgggatacagggacttagggtggccttggctggtgccaagcccatgaatggcctgaccctggcacaaggagtccaggcggagataaggggcgacgctggcacccacaaggagacagcaggttcctgccaagctgccagcctgcaggctcttcccagggagaggggagggggacacagagcgagaacaataataaatacagagtgtgaactgctgcatccactggggctggggtaggagaggaggaagtatgcccagtggggggtgggcaacctctctgagagcctggcatcatgctgcctggctgtgatccggcaggggcctctccctgggaaagggggtctccagctttctgggggat

SEQ ID NO: 449 - DNA, 2366 bp, Homo Sapiens
gactcatgtgcctcagtgtcttcctctgtaatatgggggtgatgattgtacctacctcacaaggaagtttccagtaaaatgaaagcccttaaaattatgtttgtttcatcaccaatgactccataaatattagcaacaataccagtactaagttttgtcattttttattaacttcttgtaaacgaccctactttcctgctctcacacactccttacacctgcatcccacctgatttagccactttctgcctaacctgtcagaaagggtagatagcttcccagtcacctgttgctagggaaactcaccatttcagcccggatggtgaagattccagcttgagagaccagctcgggtctgaagtgtttctctatctactgtgctgagatctctccttctcgaaccctgctatgcctttgcatacgctgttttctccacctgccacgttctcaccccttcttcttccactgcaaactcctatgcagccgtcaaggccccattctcctctggaaagccttcccgatccccttggcaacaaccaccaccaatatttattcactgagcccactttgtgccaagcattgttctagacacgggtatgtaaccgcgattgagagagacagaccacgcacagcctggattttattttaagagctattgggtgccgttggtgggtttgagtgagtggggtcaggaagtgactcactcctccgagggcttgtgggagcctcagctcaggggcgggcagggggcgtggggaagtctgcagccgagagtccaggtaggagtctcctgcgtggtcccgggagaggaaggggcctggcccggggcggggtgtggaggtgggaggacggcggtgcgggatggagggtggaggccaggctgacagggtgctggtggtgggttgcgggggtcgaccccaggctctggcctatgtagctgccattttggaggtgaacagcctgcggggaaactggcatggtttggggaaggcggggagagggggagaaatgaaagcattgagtttaagtggcctgcagaaccccgggggcccaggcggcacggcgggcgctggggctccgggcagagctttctggaggtttgtggcagcttcactttcacggcatccacccccctcgggccctgccgcagagaggaggaagctcctgccggctgagcgggcctggaggaagtgagcagcggggctcctgcctcccggcctggtccccgaagaccccagaagaacccggaacttgcttccattcggaatccagggaccaccctttgcactcagtaggcctttgttttcctgcgtggaaagcggttgggtgagttctggcatcggggccaccatacttgagtgttgggggtcacggagggaggggcccagacaccacctgggaaggatcccagagtgcagtcccagcccaggccacccggggaagggagtcggtaaagtgggaccttgagtccccacggcccctccggctgcccctgctcagaggctgctcggcgtcctccctccctgttctactgaggagttgccgcctctgaacttcagccaacccctccgtctccaggtgaagaaactgaggccctggggccaggaaggggcttgcccaggctgctgatccctttgggcagcatcgagtccaggccctccttgtaaccatgcatcaggaccagagagggcagggggtttgcccaacgtcacacagcctgagtgaggaggagctggcctgggacccaggcttcctgacgcccaggccaggctctttcgttttctctggccatggccctcagcttggatattaaggggctgggagtcagttgtgtccccaccacctccatgctacagggcaggatggagtctggcatcccccgccccaggctggctgctggtgtgacatgggtggctccagtcgagtgaatgcctccgtctcccacagctcagggggctccctgctctggccaccaacttctgccatgtgactcccctacctcaatgtctgattgagtttgaaaacactgagaagacccaggggctgaaaagggaggaagagggaggccagaaggcgccagccgagccagcgaagccttcacaggagaggaagtgggccaggggaacaggaaggagggctgggctggcctctgggtctgcccctgtcccgggcatgtggtgagcccagccttctgcctgtaatgaggaggaggaagatgaacagtgcctctgtcaaccctggcccttccggtttatgggatgggagatgtcaccattccacgtatccacctcagccagccccacacaggccgaccggggaggtttcccttgagctcaacctgacaagctctgaggagtgagctgtac

SEQ ID NO: 450 - DNA, 2333 bp, Homo Sapiens
ccgacatacacgcacacacacacagagtgcacacacatgcacacacgtgcagccgcatttcctggtgcgcttgctgtgagggcacaggggtgggtaggctggcaggcacgtgaagttgccatcagccccgagggaccgtgagcgagttgggacttgggggagaaaaaaatgggggcggacgtcagctccctgggcggccgccgccaccgcctccgcctccccgaggcccctcctgcattcctgggcagcgaagcccctcgctaagacgggggctgatgtcatcccgggctgctcagccaggggacccgggggccctggtggctgcctccggaagtgagctagccgcctgccggccgacaggtttggaatctccagccagaggacagaaaacctgcatgggtcaggtgagcggggtctggccgagggcagccgggcagggggcagcagggtgcggcagcttgcccaccggaacctcccagggtgcacctcaggggggctgcctacctgaagggaagtgaggacgagggtgcccaaaggccgccccctccacccccacccccatccccatcccccgcctttcgggaccgtcacgccctggagtgagtgcagccggcttgttcctcaaagctccttgtctcggccgatcagctgggtgagccctggaactggaacctggactgcccagtgtgttgactttataactccgctggggtggactcccagcctggcacttagctgcctcttaattctgagcggcacccgtggatgcagccggctcctggctcagggatgtttacttacccttggtttgcctgaagaaagctgctgtttttaattttttttcctccaagcaagcccaaaacttccatgagcaaaagagtccaaagaggcaagaggacactggcgttttaattgctctctccctccctaacttccttcttccctctcctcctggctggccccatggattacctgggagataaactcacagtggcccagacccacatgacccagtggatgggcaccgtgaggaggtccttccaggaagccctcaatttggtgaccaccacggtgggccacgaacggacgagtgcagagtcggccagccggacccccttcaagcgtacttcctccttccgacacctggcttcccggagtcgggaatccttccgccgcttctctgctcgcagccaacagagattttcttcactgaggaaaaggcatacagattcggaaccgccagatattgtaagcttattatgttttaaaaaatattaaaacaacactgaaagctcctcccctccagtcctcccagggagggggtcccagacatcaaaccggggaagttacttcttccagaatagttgtcagtcaaagcccaggcacttcctgtcccctgtacctgggaaagaggcacgtagcaataattcctctctcctgaagtcagtcaggacatttttgctggagtcgacgtctgtgtggacagggccagcacgtgagttgggctgaatttgccagttgatttatgtttaagtgtgaacaccccaacccccgacacgaaagctcatccttctccctatttttagggtggattagtggcacctgcctcatctcctctcaccctcctaggaagcacaagtggcggtgtcatgtgcacgctgagttgtagcttttgtcgttccaccgagctttcattggattgccaaggaaagggtcttaggagaccgaggtgtggtgggcgagtttgcccgctggccgtgaaccttgggtttggtgtgagtgggccagggagggaggccttgatttcttactcaggcaggctcgggagggcttggattgggacagcagggtggaatgacagctaatgattaaaaccttggcctgtgtcctgctaggcgacagtgcagaaacaatcgtaaggtccttctgatgatttggagaggtgggactgggcccagaaagcgaaagtgcctactgtgggggaagcacagtgagtgagtggcagagccaggtcccgaaccccaggctctgacctccccattcacggctctttgcagtccagctcccagcagatgttctccccagaccctcccaattaattcagggctgcccaggtcactgaccagacctgagcctaaagagagggcctgccattttcacataggagacttctgccacctgactgtgttggcccagtttatgggagcacttgaggacaggcgaagggctaagccagcccctttttctgggttcctcctagccaggagtgctatagtcattaagggacccagcatttagggaggagccctgagctggccctccctacactcgag

SEQ ID NO: 451 - DNA, 2378 bp, Homo Sapiens
gttaaggctggaataacatagcgactcagttccccgacctggccatatggagtggggctaggcctgtcctccctgcttctcactcccttcctaaccccatagttctctgagactcagatgccacaagggcccaggtgcttacataggggtccaggagtctgctggtgtcctgcatgagatctgtctgcttctggagctggccaaggagcacgcggtactctttcgagcagctgcctatagccgccatgctcgccatgcttggaaacaggagtgcaaggaccagacctaaggcagagaagaggggtgtcacctgacttggtgaggaaagccacagatgggagcctcggggagggggttcaagagggccttgaaaggtgcctccttcatcccagactttgtgtagtggagggcgggggctgggcactgtgtggcacggtgtgtgcccaggtgtgcccaccaaggccaccatcatctccccagtaagtcactgcccagggcctgacacagcaagcagtgggagggactgagacagtggctgcgatttaccaagtaggtctttgagcaaaggctgcagtgcctggccggatcccagtcctgcctacagcacggttctaacctcgggagctgactctctgcaaggtgggactggctccctgcaagaccactgggctaaagaccggccactgccctaggacctgccttgtcagctgctctggccatccaggtagatgggcctgagagggcttcagggcaggcagcccgggagcagcttgtgtcctcagctctgtctagaaccaggagaggctgccttttcaaccagaggtgcagcctggaacagatgtggaagaccttccagtccatgtccccactttcctgacaggtaaaccaagtctcaggagaaggtcctactcaggtcacacaaggccagggctctcccctgacctctcttgcctccctcctctctccataagtggctccttctgtcaggcccaccagggatgctgtgagcctgtcagaaggtgttgggggcgggtacagttaccgctcaccaccacccccaacggggcaccggcagccacgtggtcggaaggggcctatggcgcaatggcccggaaggcagtgacaccatcgttcccgtcctaagaaccatccggccctttggggaagactggctgttggggagggccaaggggccaggcacccaggcttagcgaccccacggcaccctcgccgcctccccaggtatctgctgccgggctctggcaggggcctgtgcctgtggcagcgcacgtgggactggggtttctgtgtggctgtgcatctgggtctgtgtgcggcgtgagggagacctgttccgttcaccatggggactctggtctgcatgtgggggttcctgggctggtgagatccagggctgtagatgacgtcatatggctgtgtgcgcatgtggccatgtgggtgtggctgtgcatgctgtgtgattgtgtgggccctggggcccccaggcctggctgactttctattcatcccgggcaagctggaggccccacaacccctccacacctcacaccacttccctgcccagcttctgagcctccctctcctgcccagcctctttgcccatcctattctctcaccccctggttcccagagttgcctctacatcttgacatcacctccccctggaagccttccagggatgccccttctctacctgtggagatgccaggttctcagtggaccactctctctgcctgacctcctggctctctccccttctcagcatccttctgcctggcgcctggcctccccagttcccggagggcagagggtgcctctgctccccaccggcacccgtgggcagacccagcaggcgggttctggcggggaggaaggaagtacttactgagcagcgtcctctgtgtgagcagtacccccatgctgggtgcccgtgctccggcccgcgcccgctgggggtgacacctctcggctgggagccctgcaggctggcagccactttatgcccgctggggcgattggccaacacctcatgaggtgggtggggatggggaggggggagggcaggccttctgggaacatgaccccaaaaaccaaaatttccacgggcggccaatgggcgcagggcgcggtgtatgcccgctcctcctcctgttttcttcgaattcgttcttcgaggtcagccctacgcccaaggatgatgtaaaaccgcagcctcagccttcctagggtgagtggggaggaaaagggtccatgccatcttcagggaactgggccagggatgggcaggagggacttcgagctgggcctctggaggccccaggccagtcttggcccaggagccattggcctcacaggac

SEQ ID NO: 452 - DNA, 2269 bp, Homo Sapiens
agtctgctggtgtcctgcatgagatctgtctgcttctggagctggccaaggagcacgcggtactctttcgagcagctgcctatagccgccatgctcgccatgcttggaaacaggagtgcaaggaccagacctaaggcagagaagaggggtgtcacctgacttggtgaggaaagccacagatgggagcctcggggagggggttcaagagggccttgaaaggtgcctccttcatcccagactttgtgtagtggagggcgggggctgggcactgtgtggcacggtgtgtgcccaggtgtgcccaccaaggccaccatcatctccccagtaagtcactgcccagggcctgacacagcaagcagtgggagggactgagacagtggctgcgatttaccaagtaggtctttgagcaaaggctgcagtgcctggccggatcccagtcctgcctacagcacggttctaacctcgggagctgactctctgcaaggtgggactggctccctgcaagaccactgggctaaagaccggccactgccctaggacctgccttgtcagctgctctggccatccaggtagatgggcctgagagggcttcagggcaggcagcccgggagcagcttgtgtcctcagctctgtctagaaccaggagaggctgccttttcaaccagaggtgcagcctggaacagatgtggaagaccttccagtccatgtccccactttcctgacaggtaaaccaagtctcaggagaaggtcctactcaggtcacacaaggccagggctctcccctgacctctcttgcctccctcctctctccataagtggctccttctgtcaggcccaccagggatgctgtgagcctgtcagaaggtgttgggggcgggtacagttaccgctcaccaccacccccaacggggcaccggcagccacgtggtcggaaggggcctatggcgcaatggcccggaaggcagtgacaccatcgttcccgtcctaagaaccatccggccctttggggaagactggctgttggggagggccaaggggccaggcacccaggcttagcgaccccacggcaccctcgccgcctccccaggtatctgctgccgggctctggcaggggcctgtgcctgtggcagcgcacgtgggactggggtttctgtgtggctgtgcatctgggtctgtgtgcggcgtgagggagacctgttccgttcaccatggggactctggtctgcatgtgggggttcctgggctggtgagatccagggctgtagatgacgtcatatggctgtgtgcgcatgtggccatgtgggtgtggctgtgcatgctgtgtgattgtgtgggccctggggcccccaggcctggctgactttctattcatcccgggcaagctggaggccccacaacccctccacacctcacaccacttccctgcccagcttctgagcctccctctcctgcccagcctctttgcccatcctattctctcaccccctggttcccagagttgcctctacatcttgacatcacctccccctggaagccttccagggatgccccttctctacctgtggagatgccaggttctcagtggaccactctctctgcctgacctcctggctctctccccttctcagcatccttctgcctggcgcctggcctccccagttcccggagggcagagggtgcctctgctccccaccggcacccgtgggcagacccagcaggcgggttctggcggggaggaaggaagtacttactgagcagcgtcctctgtgtgagcagtacccccatgctgggtgcccgtgctccggcccgcgcccgctgggggtgacacctctcggctgggagccctgcaggctggcagccactttatgcccgctggggcgattggccaacacctcatgaggtgggtggggatggggaggggggagggcaggccttctgggaacatgaccccaaaaaccaaaatttccacgggcggccaatgggcgcagggcgcggtgtatgcccgctcctcctcctgttttcttcgaattcgttcttcgaggtcagccctacgcccaaggatgatgtaaaaccgcagcctcagccttcctagggtgagtggggaggaaaagggtccatgccatcttcagggaactgggccagggatgggcaggagggacttcgagctgggcctctggaggccccaggccagtcttggcccaggagccattggcctcacaggacacggtggttgggggctgaggggagcgagacatcttccttcttgagt

SEQ ID NO: 453 - DNA, 2496 bp, Homo Sapiens
tctgtactttgctccttttaggcagtggacaaagcactttttttgttgttgtttttttgagatagagtctcttatcgcctaggctagagtgcagtggcgtgaccttagctcattgcaacctccgcctcctgggttcaagcaattctcctgcctcagcctcccaagtagctgggatcacagacaaccactaccccacccagctgatttttttttttttttttgagatggagtctctctctgtcacccaggctggagtgcagtggcgcgatctcggcttactgcaagctccgcctgtagctgggactacaggcgcccaccaccacgcccggctaattttgtttttgtatttttagtagagacggggtttcactgtgttagccaggatggtctcaatctcctgacctcgtgatatgcccacctcggcttcccaaagtgccgggattacagacgtgagccaccgtgccaggcccaaagcacttttttatagcccctagtttgctgttgtgtctgtttcctctacggcccgcacagcctgggtttgaattctggctctccatggccttgggcaagttggttaactttttgtgtctcaatttccccacttgtaaagtggggctggggaaaaaccctacctcatagggaacattaagtgagttcatgaaagccctcggtgtgtggcatgcgataaccactacctaagcataaggtatgtttacatgcactggttgtttaccacgacgcaccagcattcattcaagttattttcttccagagtctgcctggaatgtagaaccggccagctctcctcctcaaacagttcctgcaacctctggttatctgtgtgggcagaggcgggagtgtgggtgtgtggccctgccctgggacagggatgacgagagagcatgtgcttgtgtccagagctgtccccttccctgctcaggggccaccaaatatgtccatggtctctgctgcctggtcaacggccaccccgggctgccgtctcctggccagacctggagctcacaagctaattttagaaatgactggtcgactcagctgctgctatcacattggcccagaaggagggtggggggaggacgggtcggggaggggcagtaaggggaagggatgtgtgtcggtgtgtgtggagagggtgctccttcgctcctgctttcccggctcggtggggtcccttcgcggccacccggggagacgtcttagacagtcgtggttcctgtgatctgtgtcctctttgcagaaggtactattgggctgggttttagacgggcaccttgcgagcggatcggcgagttttaattttccggaatgcgctgctgggggctgcggtggcaggcctccggtcttttggtctattttaggcctttctggtgttgagagcttccgaggcctgattcctttgcctgttgcccgtgctgctcactttgaaaacaagagtgtttcggtggaaggatttgagaacaaaatgctggggcaaatggacattcgtaagaatcactctcctcaggccccagctgttcgctaataatttttaaaaatgtgtttagaatcatgagttaatctccactgtgaatctttgcccgcagacgtcagggtttatatttttcctcaactaccagtaatttctgcttcactggtgttcagttatggtcggggaagagccaggcttcccctttcgtgttaacaacgctgttgagtcgaaatgttaattttaatgttcttttttaaactgcaaattaagcatgtatgagtgttgggggaagggcaatggaagttcatggctgaaggtttcaatttcatgccaccttccttgagctctgtctgagggaaggtgtcttatctggcaccccggatagcaggcatttctctgaatgaagaagattcacaggtcccagtggccccatagtggggcagaagggggctatgctttgacatggagctctctcccaggagaggagaagacctcaccagctacaggcctctgggctgctgccttcctgcagcttttccatggaggaggccaggagtggggaggcccggaatggggagcccagtcggctcccagtcggctccaagctgtccagtctggcctcaacccgcaagtgtggggatctgggcttctatcctgtagggcctggaatacgacgaggctgttactttcactttgtggctgtccaaaaagatgctgcctcattcagtgcaccagctcatggaggctgagtgtcccactagggcttctagactccaacaaggataatggtggccttgggtgctgtatccattgctgacctaagttgtattctcctatgcctgggtaccatgtccagtgtgtaccttgggagcagaaaagagaggggtctatatactcttaggctatggatgagttctagaaaataatagtggagaggagagagagaaaagaaggaagaggaggaggagaaggagaagaagagaaggaggaggaggaaaaaagcagga

SEQ ID NO: 454 - DNA, 2285 bp, Homo Sapiens
ttagcacttgacctgtggcatgtgtcaactcattactgctaattgcagggactcagtgacctctccgaacttctgtcacccctgtcacggcccctgccctgtggaggcctgtggaatgggaagtggggaggggaaggagaagggggcggagtcagccggagcctcctggccaggcctggagtcaccctgtcctgccacagctctcatgggtttagagtgggccctggggcagagggtttgcaaggataggggtgggtggctctgccgagggcggtgttctgagtaggtctcattccccagtctgcccagcctggccccaccccagctctgctgccctgttactttgtccccctgtgttcaccctccacttcctgccggggacactccaaggcctgccaaggttggagcaggggtgggactcagccattcaacaaacgcttccttggttatgcagggctgggcattggggtggggggctgacctggaccctccaagacatcagattgtccaactgctcagttttcattggggcaagtgcctcgctgagggtgaagggggctgtgagtgcccatcagggagcctggacaggtcccgcctctcacagctgtcccactctctggagctgccttggtggcagatggcactgtcctagaaaggtgaggctggagctgtctcttccaccaggggtggccaaggacgcttccagggtcttccatgcaggcctccagggtcaccctgggcgtggctgagggcatgcagaccacgctgtgctcccccccaccccccatgcccgtcgcttgcctgacatgctcctcagctgtcttgccccgcagaagctgtgtggtctcccctgtgagtagagtcgggctccatgatcctccggagcagcgccagggactctccccaggcacaattttaaagggggccctaggacctgccaggtccacggaagtggtccttgtaactctctccctggtggcagcctctggtgcattccggcaggggcagcccctcctcatcacagggaccctgtgtgccaggccccagctgcgttgccgctgaattatggatttaatagcagagaagccttgcaggccgcctgtgctggctcgggaaaccggggcccagccggggcctgtcacggtcctggtgccgccctgcttcctgtcggcgccacggagcaagcggagagatttatcttcccggctttaagaggtactaacggaggaggctgagaggcaggagctgaataattgatggccttctctggctcaggatctgctgaaaatgacacggtgcaaggcagaggggctgagagtgctgaccacaaaatgctgagaagccactccagggcggtcacggccagaaggaggacccccactcaggacggggtcacaggcatttggggcgggtgtcagaggctcctgccctgggtcattccagggggccaggatacccagaagctgggcctagaggcccacagggctggctcacccccacttccctctcacacgcctgccatcaccggtgcttcagcccagcaaccccatggctcgttggccccgtccacagcccccactgcctcctgtgtgctgggcgtgggcctctgagctctactctcagcctccttagccccaggagaggagtggaggacaggggtttaacgtggggtgtggtgcggagcggggagggctgtggcgccccctcagcccctcctttcctaacagcctcagcctcccccctggagaatcccctacctgctgggcacatctggcctctccccaccattctgtctccagccgggagatctctacccagtgaaacagtgaaacaggaagggttccctggttaccccgcgcagggcgcagggcatgcagcgggggagtggctcgcttcttcagtgccccaccgctcacacctctaggggagcatacagacgggcaggctgtggggctctgaccccatggcagtgtctgggggtgaatgtttacagctcttgaaaccccagtgggagtgcgttaccgggtggtcttttagtctagcggtctgtaggtggctggtgagagtgagctcaattagacccctgccttataacaaggacagaggaatttctgtatcccagggtttcttgccttggtgtaccaaaaaattggatcacacgtgggcttggagaatgagtgcaaggttttattgagtggaagtagctctcagcagatgggggagccagaggggagatggttttcccctggagtcaggcaacattctcgggatgtccagcagcttgt

SEQ ID NO: 455 - DNA, 2448 bp, Homo Sapiens
tgtgacattcgctgctgaacgaaatgggggcccgcccccaactctcggcaggagctggtgggccttttccctgttgcagcctgggaacgccttggagaaggccatacccacggcaaggtgagtgcagctctgaacgttgcagggtgaagccagtctgcacaggacgtctctactggcctctgcttcatgtcccattgtgtctgggctcgggtcatgtggctcaggacaggggtggcccttcatgaaatcccccaaatttagatggaggagaagccaccgccacgaaggcaagtgccttccaggaggttggtggccgcagcccccagccaggccagtgctgacccacctccgggacactgcatgtggccctcacagttgtgccaggcagtgcttgatggggaggggctgtggggatgtgcacgaccccatccaggtcctgctctcagaggggtctggctgcccttacagactttcaaacatcttatgtatttatttttcgcatagttaaaattcacataacaaaatcaaccctgttgaagattgcattctgctggcatctagtgcagccaccatgctgtacaaccccacagtagccgagttctcgtttccgtcaccccacaaaaagccccgtgcctatgaagcaatccctccctctgcagccattctcccagccccggaagctcctgctctcccagaccttcagaagcaaaggctgcagaggcctttccagactgggcactcggacgtccacctgaggtcctctctctcctgcccccagcagggaagccaaagcaactgctacagggcccagctggcacagactccaggcccagccagcaccagcagttgctcagcatgccccattctccccaggtcccaggtcctgggtccctgacttcagagggtcctggccactgggacggctggcagatgcaagatgggaagcagccctgacccccaccacctcctcctgggacacgcccatgccctgcctctgctatccttcctcagctgcctgagggctggctggtgtgagcccaggctcctgtagggtatgccaggagcaagctgtgacctggccccgggctgtggagcccatgctactctccactgaggatcctgggctgctctgtcccgcgtacgggcatccgggttctgatagcccgccgggccctgggccaccagaggccttgaattgcgtcctggtgacagtcagccccttgcatggggcacgcacagacctgggcctaggctggggcaccgagatccccacatccagcagccgcggtgaggctggcctgcctgcttcccggggccacctctgccgtgccgtctcctccctctcccctgccccctctgttggttgctcctcccccgccctctctgggcaggcacggccgggtgggggtgaggttctggcaaagccccctctgttttccagcccagtggcgctcacatgtgacggtgcgggggcagcctcgtgaaaagcccctttgtgtctcctccctaattaagaaatagcagcaggctccgggggcccaggccccacgtcctctctgaacgctggccgtggtcacaggcggctggatgggcaggcctagcagtggacttcaaggaagaatcccccaggcccaccaggcagccctgctgctttccgggggctcctctcacattgtcaggccacccggtaggtctgggaggctttctccaccctcgggtcccaggagctgagatggtacccgcaggagcccacgtgggatctgggtgtctggacctggggtttcagacctgattctccctcctgttctgtggggcctccctgaggctcagccctcccctctgtgaaatggggagaataaggcgctctgccccccagaatccacattcagagagctagaagtccttccaggcctggacaaagaggtgcccgtcctccccaaaccaaggcagagggacatctgagagggtgtcctgagtccacctccccctgtcccacctgggatgtccgtctgtgtctcctccgcatagctgcccatgccctcaggaaaacgagggctcttgtctcttttccagaaccccagattctgaggcaaaggctcggaaagaacccacagttctcacggcattattgtcactgagcgggtcttaccctccagcctgggaggcggactctctcagagcaggggtgctcagcagggagggctgaccgaggggagccctgagagacccctgacgagaacagggggcctgcagaggaaacaggtcccctaaggtcacggtcacgcccagtgagactccagcccagctttccggagtgctgtgcccagggtcacgctgggacaggcaagcggtgtcacctcttttcctgaagacactttacacccatgtggaaaaggagaacggtacttttcactcacctggaggagggacagaggcaagggctgcccc

SEQ ID NO: 456 - DNA, 2374 bp, Homo Sapiens
gggctttggggacctactgcatgctgggtgctgggatgggggcagacattgcctttcttccctactccctgcctgacccccctttcccctactttgtcccaccaccccagtggtctcaagcctgcaaggagatccacaggcagtaggagacatgggctgtagagtgggatgggggtgagcatgggtgcggtgtgcacacacacaagttgtcagaggcaccacctgttacaagctctcagatgagcactctagcttaagaggcaggataccagggtggcaacagccccagagctgccatttcgagtgtgatattatcctcccatgtcccctctctgggcctcaatttccctatgtgcagagaggaagcagtgacctacacggtcttcccagttttgccattgtgatgatctcactatactggaccctccaatgactcagggatgttacccgtgttttgctaaggctacagcttgtagccagagaaagccctaaacccatgtcccagggtctcccctgagcttcagatccccattgagaaggaaaacataccagtttctgggtttggcccctccccccatcgccatatcttcatcctacttcgcttgtgccttccccagcctcgtgggttgaaagtgtccctcaaatacctaggtagtcctccaggcaggactccaggggtgttccttaggaaactgaggaactctcaccccttgaacaccacgagcttgctcacacagtgacactcagcgatgactttggctctgctctcccctcctccatctcccacgagcttccagcccagaacacctggccagacccaggtcgggggagttagatcccggggtcaagcaaccagaactgggggctcttgcctgaggattccagcttctcttcccaggtgcccgtctgatggggagatggctgatgcccagaacatttcactggacagcccagggagtgtgggggccgtggcagtgcctgtggtctttgccctaatcttcctgctgggcacagtgggcaatgggctggtgctggcagtgctcctgcagcctggcccgagtgcctggcaggagcctggcagcaccacggacctgttcatcctcaacctggcggtggctgacctctgcttcatcctgtgctgcgtgcccttccaggccaccatctacacgctggatgcctggctctttggggccctcgtctgcaaggccgtgcacctgctcatctacctcaccatgtacgccagcagctttacgctggctgctgtctccgtggacaggtgcgctgtgcctggggcctggctgggcagggctgtgggggcgggggttgggggaggagtcctgaacagatcctcactggccttaggaaggagagagtgggggaccagaaagggaggtgggtgggaggaaacaaaagctccctgacccctcgcaagcagcctctgggcacctgcagggcgtgcttgaggggactgtcctgcccttcccctcctccactgtgaacttccagaggacgcctctgagtctcaagtggcagcacagggtctggcacatagtaagtgctctgtaagcgcgaaatgaatcgcaaaagaagctcacgaatgcgttcatcagtttttttgttttgttttgttttgttgttttttttttttggatcttggctcactgcaacctctgcctcctgggttccagcgattctcctgccacagcctcctgagtagctgggattacaggccaccacacctggctaattttttgtatttttagtagaaacggggttttgccatgttggacaggctggtctcgaacccctgacctcaagtgatccgcccgcctcggcctcccaagtgctgggattacaggcgtgagccaccgcgcccagcccagctattttctaactgcccacacctggccaagctgtgcacacatctgcttccacagcttgaaacttggggtcaaatccaggctcactccagctgatgaccctgggcaagtcacttctctctggacctcatctgacgcatccataaaataatcctagaaataacaagtcaccgggatcgggcccttgctaggtgcaagggcctaagcaccttgcgcgttcacacccttaatccccgccacgtcccccacggttcacaggaggcgcactgggccgcagggcccgggcgcgggacgtggcgcgggcccctgcgggagggcacctgcccgccccgctgaccaggcgccctccgcaggtacctggccgtgcggcacccgctgcgctcgcgcgccctgcgcacgccgcgtaacgcccgcgccgcagtggggctggtgtggctgctggcggcgctcttctcggcgccctacctcagctactacggcaccgtgcgctacgg

SEQ ID NO: 457 - DNA, 2500 bp, Homo Sapiens
ccgctgaatcaggaggcccacccagcccggccattccacccaggatcaagcccactgcccaaggcggaggtgggtgttgcccatcctgggctttggggacctactgcatgctgggtgctgggatgggggcagacattgcctttcttccctactccctgcctgacccccctttcccctactttgtcccaccaccccagtggtctcaagcctgcaaggagatccacaggcagtaggagacatgggctgtagagtgggatgggggtgagcatgggtgcggtgtgcacacacacaagttgtcagaggcaccacctgttacaagctctcagatgagcactctagcttaagaggcaggataccagggtggcaacagccccagagctgccatttcgagtgtgatattatcctcccatgtcccctctctgggcctcaatttccctatgtgcagagaggaagcagtgacctacacggtcttcccagttttgccattgtgatgatctcactatactggaccctccaatgactcagggatgttacccgtgttttgctaaggctacagcttgtagccagagaaagccctaaacccatgtcccagggtctcccctgagcttcagatccccattgagaaggaaaacataccagtttctgggtttggcccctccccccatcgccatatcttcatcctacttcgcttgtgccttccccagcctcgtgggttgaaagtgtccctcaaatacctaggtagtcctccaggcaggactccaggggtgttccttaggaaactgaggaactctcaccccttgaacaccacgagcttgctcacacagtgacactcagcgatgactttggctctgctctcccctcctccatctcccacgagcttccagcccagaacacctggccagacccaggtcgggggagttagatcccggggtcaagcaaccagaactgggggctcttgcctgaggattccagcttctcttcccaggtgcccgtctgatggggagatggctgatgcccagaacatttcactggacagcccagggagtgtgggggccgtggcagtgcctgtggtctttgccctaatcttcctgctgggcacagtgggcaatgggctggtgctggcagtgctcctgcagcctggcccgagtgcctggcaggagcctggcagcaccacggacctgttcatcctcaacctggcggtggctgacctctgcttcatcctgtgctgcgtgcccttccaggccaccatctacacgctggatgcctggctctttggggccctcgtctgcaaggccgtgcacctgctcatctacctcaccatgtacgccagcagctttacgctggctgctgtctccgtggacaggtgcgctgtgcctggggcctggctgggcagggctgtgggggcgggggttgggggaggagtcctgaacagatcctcactggccttaggaaggagagagtgggggaccagaaagggaggtgggtgggaggaaacaaaagctccctgacccctcgcaagcagcctctgggcacctgcagggcgtgcttgaggggactgtcctgcccttcccctcctccactgtgaacttccagaggacgcctctgagtctcaagtggcagcacagggtctggcacatagtaagtgctctgtaagcgcgaaatgaatcgcaaaagaagctcacgaatgcgttcatcagtttttttgttttgttttgttttgttgttttttttttttggatcttggctcactgcaacctctgcctcctgggttccagcgattctcctgccacagcctcctgagtagctgggattacaggccaccacacctggctaattttttgtatttttagtagaaacggggttttgccatgttggacaggctggtctcgaacccctgacctcaagtgatccgcccgcctcggcctcccaagtgctgggattacaggcgtgagccaccgcgcccagcccagctattttctaactgcccacacctggccaagctgtgcacacatctgcttccacagcttgaaacttggggtcaaatccaggctcactccagctgatgaccctgggcaagtcacttctctctggacctcatctgacgcatccataaaataatcctagaaataacaagtcaccgggatcgggcccttgctaggtgcaagggcctaagcaccttgcgcgttcacacccttaatccccgccacgtcccccacggttcacaggaggcgcactgggccgcagggcccgggcgcgggacgtggcgcgggcccctgcgggagggcacctgcccgccccgctgaccaggcgccctccgcaggtacctggccgtgcggcacccgctgcgctcgcgcgccctgcgcacgccgcgtaacgcccgcgccgcagtggggctggtgtggctgctggcggcgctcttctcggcgccctacctcagctactacggcaccgtgcgctacggcgcgctggagctctgcgtgcccgcctgggaggacgcgcg

SEQ ID NO: 458 - DNA, 2419 bp, Homo Sapiens
agcgctcgggggtagttcagcttttagccctccctacagccccatgaggaggctctagtatgcctcctttttgccaaatgaggagactaagaaacgggtcaacctctcacccaggcgagaagggcatagagctgggatttgaacctggtcaggtgcagttcggggcccctgctgccatcaggggtatatggtggctggggcagggtggtaaagcaggagctcgggagcccatggttcatccaacttgacctctgaactcaatggggcctatgtcccctcgtcctctctggccacctccacctgccacccccctgctcccatacacagtgcttgtctcttgctatttaacttcaggggcttctccagctgggtgcgggaccctggctgtgggggaaggaaggggacccttggggatagctcagctcctcactccacctccctcccccgaggtgctacaaacacagttaagagtgggaggcttcggcccccaggagaggagagagcatgagctccaggcagccccaaagatagggtcccatccccaatgtccggagatgcttctgacctgtccagtcatgcagccaagggagggacaaacccagactcaaacccagggctctgcctccagcctggggctcccagaggcctcgcagcaacttcacttcatagatggctctccaaggggacccttctgtccccacttactccacaagcctcctgatgagcacgcaacacagggctgcctcccccggtatatgggccccactccacagaggtcaggagggggctcccgcctgtcccaccccatatcccgtaccctctccgggcacccaggctatccacccatcccttctccacctctccgggttgggggcccagcacacagagcccagggaagcccctcatcccacagcagtccctagcctcccctgaatgggttgggaaggagagctgacctgggactggggaccgctttttcctccagccaggagccatgagagctgggcccaacccctccctaggggaattctaagacaaagttgggggatgggagttcaggcagaaactgctgggggaactgagtcagagctgaaagtcttctctgtgactttcactcccagccctctggctggtccacaggggccgggagggaggcagggggacatcacctggctgagacatggggcggtggcagcgcgcgctctccagtcctccccggtgctgggaccgtggccatctctccagggccctgctgagctctggctgctggggccgcaaagactaaaagcccagagccagcccacttcctgtgcagaggatagaggggcaaggcctggggtggagaggcggggagacgaggcttatgagaaagcctgaaactcctcaagcacccagggccagataaagatctgcctcctacgctgggggcggcacacacacacacacacacacacacacacacacacacacacacagacacacattgtcaaataggggcctagctgcacacaggagccaagggaacgcaggccctccctctctcccctcctacatcacccccacgccaactcacacaggctacccaacacctctgacgcctccatccggtcacacacatacccactaatacgtaggcttcacacaagcaggtccctctaggtgaccccagcgtctcaccctcctcccagcctgcaacacaccatctttccgagactcccatttcacccagccttccaggaagccccttactccgtttagcattcagagatgactgttttttttagtttttaattttgtgggcatgtggtaggtgtctatattcatgaggcacatgagctattttgatacaggcatacaatgtataataatcacatcagggtaaatggggtatccatcacctcaagtatttatcctttctttgtgttaaaatccaagtatactcttttagttatttttaaatgtacaataaattattgttgactaaagtcaccctgttatgctatcaaatactagatcttattcattcgatctaattctgttttcgtacccaacaacaatccccacccctccaacccccactgcccttcccatctccatcactgcccttcccatttccatgaattcaattgttttaatttttagctcccacaaataagtgagaacatgtgagctttgtctttttgtgcctggcctgtttcacttaacataatgacctccagtttcaaacatgtggttgcaaagacaggatctcattctttttcatggctgaatagtactccattgcatatatgtaccacattttctttattcattcatctgttgatgggcacttaggttgcttccaaatcctgggtattgtgaacagtgctgcaacaaatgtgggaatgcagatgtctcttccatatactgatttcctttc

SEQ ID NO: 459 - DNA, 2483 bp, Homo Sapiens
gtggacggaactgggtggcaggctgtggttttaggacatgtggccagattggctgagggtaggagggtgcagtattgactgcaattgtgaaagcgtagaattttctcgtggaaagtggcttggaacatggtccaatcgaacatcatcatcctacaactgaggaatgtgaagtctgagtttctaagctcccaaacccgtctgaaatgagaacacagacacacacacagacatgcacacacacacacacacagaccacagacacacacatagacatgcacacacacacacacagaccacagacacacacacagacatgcacacacacacacagaccacagacacacacagagacacacaagatgcacacagacatgcacacatgcacacacacagacacacagatgcaatatagacagacacgcacagacacatacagacacacacacagacatgcaaagacacacacagatacacacagacatgtaaaaacacaaagacacacaggctcacacagacacagacacatacagatgcacacagacacagacatgcaaaaacgcacaaacacacacagacacagacagacccatgcacacactgacacgcagacacacacactgacacacagtctcagggaggctgagccgggtgctgggttagctcacagacttgcttccaccatggcttctgacacatgggggtggccatgaggatgggggaggccgtggggacagaagcacagccggcctgacccaggcgggccagagctcaccgggctctggtccttcgttcccaggtgggcggctccagcccctccatcccctcgggtctgggcaggctctgtcccaccgggcactgccttggcccccctggcacccaggcaacccctaggcaggcctggctgggcactggtgtggggcctggctcataccggggggtgggaagaagggtcctgccccgtctccctgcatgtgggctctgtcttctgcagaacaacctcaggcctgcaatggtgttggcatctgtcagagcaaagcagaacctccctcctcccagactccagtggctgagctgggccgtcagggcagggatggtgagggttcaaatgccagggcagagcaggccacggcatcccgtccacccacaaatgtctccgcagaccctggtgatggctgtactgggggtgcagcccccagaaccactcgaagctcacgtagactgctcccccaagcacgggggtgggggaggctggccccctgagcagggcccggcctctgcaccagtgcagccccacctccctcccagcccaggtccaggctgctgggggtgcagagagggcgagctgcaagtggaggtgagaagggagctcgtgggacgcaggctcagagagaagcctccgaggaacctctctgttcccttcacgagcggagccttggggcagctccgtgtttctgccacagttatctcaggagatgatggctgtgggctgtgtttgtgggtgtgtgcatttgtgcacctgtgtgtgtgtgaagagggagagagacagaggggagtgagacagagacctggagaggggatgggagagagagattggaaggggaaggaggaggagagaggcaggaaagcagagagggacagggagagtgcggagggacaggaccattagggaaacagggagagggagggagaagagagggagagaggaggtgtgagaaacagcaggagagagagggagggcgcgggagagagagggattccaagaagggggaacctccctacagctttctcccactgtctctcagagacatccctggggccgcctctgcagagggggttgctgcgagctgctggagggagtgagggtgatgcgtctcccggtgccccaaaatgaggcctccgcctgcactccagcaacccagacccagggaaaacaccaccaggacccctcaacagcaagggaggctctgtcagacaggcccaagcctccaggaagctgggccctgcccctgagctgggggtcttcaggcccctgccagagccacttcctcttaagacacctacaagccggtccccagtaaattctaaacgccacggttgttcccatggcgttgctctctcacttctctacctctaaactgtaggattcctaattctattcaaaacagcggatgtttctctgttttctggggcaccaggatgtgttgtgagtgctgagggcagacgtgggatccggaaggcccagctgggaacccacgctctgcaatgagctgccctgagtccttggacgaggtggaaaattactccagtctcagtttcctgtaaagacagatcagcagttacacccctccacgggttctttgtgatgtcactgaggcggtgaaaggagcacctgcctctaatggcacccaccattaagtcggatctcagcaaccatctgcgtggcaggagctatcacactggagcctcgcagtagccaaggagag

SEQ ID NO: 460 - DNA, 2439 bp, Homo Sapiens
tagctgggattgcaggcacgcaccatcatgcccagctaatttttgtatttctagtagagacggggtttcaccatgttggccaggctggtctcaaactcctgaccttgtgatccacccgcctcagactcccaaagcgctaggattacaagcgtgagccactgtgcccagcctcgagcaaagttttaaaagtggaatgggtttcccgttcccaacgtaggctccccacatggcagctttattaaacggagtagattttatctttatgtatatgaaataatagcatcaagccactctcccccttgctcacaatattttagctaagttggccccttttccatttctaagacactgcaaactctttcccacattggagtcctctatgctgttccttcggctgagatgcttgtccttgccctcttcaccggccaggtcccgctcctgcaagtctcagtgtaaatgctcctgttaaagttgtccatcttgacccctccccaatttaaatcaggtcctcttgataaccttttatcattcctgctcatttgttttctttctagaacttaccatactttatttattatttttcgagatggagttttgctctttttgcccaggtggagagcaatgacctgccctcacctcaccaaaacctctgcctcccgggttcgggattatcctgccgcaggctcccaagtagctgagattacaggagcctgccaccacgcctggctaatttttttgtatttttagtagagacggggtttcaccatgttggccaggctggtctcgaactcctgacctcaggtgatccgactgcctcagcctcccaaaatgctgagattacaggcgcgagccaccgcgccaggcctatgctttgtaatcacataacgtgtcttgttatttttgtaacctgtgttgccctcctttacgaaggcacaggcacatctgtttagttcctggccacgtgggcacctggcgctgagtacttacttgtccgtgctgattgatgtcctcccccagcccccatcttcttttcagaagtttcctctttctgctccgagaggggctgagccagccgtggctcccttccatcccgattccagtggagacaagccggggaagtttctgggagctgcgcgggtgagcagagctgagacccggcatggctgtactggccgggtcactgcagggtgactggcggctcggcttgataacacgtttacctgagtcatctttggcaaaggttaccaggctccaggatggaacacgcatgggggaaatgcctcttccgtgacacgcccacctcgctctaaagtgagacgagggagggagggcgcggctgccaggtaatgaagtctagagtttactagagttgagggattgatgtgttgcgtatgggctgggtctcatttccaggaagctcaggacaaaaccctgttcatgttagagggctttggccaaattctgtcctgtgtgtttgggtgaagtcctgtcttcacaagtggttttagttccttcagagtaagaattatttgtattttatttatttatattatttatttatttattcatttgagatggagtctcactctgtctaccaggctggagtacagtggtgcaatctcggctcactgcgaactccacctcccgggttcaactgattctcctagctcagcctcccaagtagctgagatcacaggcatgtgccaccacatccagctaatttttgtatttttagtagagacagggttttgccgtgttggccaggctggtctcgaacacctgacctcaggtgatctgcccgccttggcctaccaaagtgctgggattacaggcgtgagccaccgcgcccggcctgttttttaaaatttctatttgacagatgaggaaatggaggcccaggcctcgctgcactaagaagagggctctggatcctgacccaggtctgggtgaagctcaggcctcttgacttagggtggaggtataaacagggtaaacaggtaaaaacaagcgaaacaaacaaaaaaaaagcataatcactaatgccattgaaaagaattacttaagactttgaggccaggtgcggtggctcacgcctgtaatctcagcactttgggaggccgaggcaggcggatcatgaggtcaggagatcgagaccatcctggctaacacattgaaaccctgtctctactaaaaacacacaaaaaattagctggtgtggtggcacacgcctgtagtcccagctacttgggaggctgaagcaggaggatcacttgaacccaggaggtggaggttacagtgagccgagattgtgccactgcactccagcctgggcgagagagcaagagtccatctcaaaaaaaagaaaaaaaaagattttgaaatgtaaagctgtaaaatcctgtacccttctctacagccccaggcttgctgacaggcaga

SEQ ID NO: 461 - DNA, 2450 bp, Homo Sapiens
gatcttggttcactgcaacctccacctcccaggttcaagcgattctcctgcttcagccccaccgggtagctgggattgcaggcacgcaccatcatgcccagctaatttttgtatttctagtagagacggggtttcaccatgttggccaggctggtctcaaactcctgaccttgtgatccacccgcctcagactcccaaagcgctaggattacaagcgtgagccactgtgcccagcctcgagcaaagttttaaaagtggaatgggtttcccgttcccaacgtaggctccccacatggcagctttattaaacggagtagattttatctttatgtatatgaaataatagcatcaagccactctcccccttgctcacaatattttagctaagttggccccttttccatttctaagacactgcaaactctttcccacattggagtcctctatgctgttccttcggctgagatgcttgtccttgccctcttcaccggccaggtcccgctcctgcaagtctcagtgtaaatgctcctgttaaagttgtccatcttgacccctccccaatttaaatcaggtcctcttgataaccttttatcattcctgctcatttgttttctttctagaacttaccatactttatttattatttttcgagatggagttttgctctttttgcccaggtggagagcaatgacctgccctcacctcaccaaaacctctgcctcccgggttcgggattatcctgccgcaggctcccaagtagctgagattacaggagcctgccaccacgcctggctaatttttttgtatttttagtagagacggggtttcaccatgttggccaggctggtctcgaactcctgacctcaggtgatccgactgcctcagcctcccaaaatgctgagattacaggcgcgagccaccgcgccaggcctatgctttgtaatcacataacgtgtcttgttatttttgtaacctgtgttgccctcctttacgaaggcacaggcacatctgtttagttcctggccacgtgggcacctggcgctgagtacttacttgtccgtgctgattgatgtcctcccccagcccccatcttcttttcagaagtttcctctttctgctccgagaggggctgagccagccgtggctcccttccatcccgattccagtggagacaagccggggaagtttctgggagctgcgcgggtgagcagagctgagacccggcatggctgtactggccgggtcactgcagggtgactggcggctcggcttgataacacgtttacctgagtcatctttggcaaaggttaccaggctccaggatggaacacgcatgggggaaatgcctcttccgtgacacgcccacctcgctctaaagtgagacgagggagggagggcgcggctgccaggtaatgaagtctagagtttactagagttgagggattgatgtgttgcgtatgggctgggtctcatttccaggaagctcaggacaaaaccctgttcatgttagagggctttggccaaattctgtcctgtgtgtttgggtgaagtcctgtcttcacaagtggttttagttccttcagagtaagaattatttgtattttatttatttatattatttatttatttattcatttgagatggagtctcactctgtctaccaggctggagtacagtggtgcaatctcggctcactgcgaactccacctcccgggttcaactgattctcctagctcagcctcccaagtagctgagatcacaggcatgtgccaccacatccagctaatttttgtatttttagtagagacagggttttgccgtgttggccaggctggtctcgaacacctgacctcaggtgatctgcccgccttggcctaccaaagtgctgggattacaggcgtgagccaccgcgcccggcctgttttttaaaatttctatttgacagatgaggaaatggaggcccaggcctcgctgcactaagaagagggctctggatcctgacccaggtctgggtgaagctcaggcctcttgacttagggtggaggtataaacagggtaaacaggtaaaaacaagcgaaacaaacaaaaaaaaagcataatcactaatgccattgaaaagaattacttaagactttgaggccaggtgcggtggctcacgcctgtaatctcagcactttgggaggccgaggcaggcggatcatgaggtcaggagatcgagaccatcctggctaacacattgaaaccctgtctctactaaaaacacacaaaaaattagctggtgtggtggcacacgcctgtagtcccagctacttgggaggctgaagcaggaggatcacttgaacccaggaggtggaggttacagtgagccgagattgtgccactgcactccagcctgggcgagagagcaagagtccatctcaaaaaaaagaaaaaaaaagattttgaaatgt

SEQ ID NO: 462 - DNA, 2481 bp, Homo Sapiens
ggcacaaagacatcaggctgaacaggtccttcatctggggggcctgtggtccccgaaatgcatcttagacactttgcacaggtgtgcgtctctatcctggctgctgtgtgagctgaggacaaaatcctggctgctgtgggagctgagcctgtgggcaggctgagccaggggtgggagtgagagggaggggtgagaggggcctgagcacctactcagcgcatgcttcacagaactagcctgctccaggaagttccggtgcccagtgccacaatgcacactccagccctgtgcctgcacaccagaccccgggcccgctccacatgggtgccttgagctgattccctctgctggagttgctgaagggttctgcaggcctcaatctacagtcagcccccaaccctgtcatcagcaggggccccagcttacagcaacgcagctgttttcactgcaggctaactctgccacagcgttgccaacctgaaacatccagcccagagtgagtttttggggaggcgggaggctgtccaagcatcttacctgctgtgtgggcaagaagcggcctgcatctcatcagagtttggggatccaggacccagatctgctgctccgcagttgtgtgaccttgggaaggtcaggtcccaccctgggtgtgctcttctttcctgaagattcaatccggcctgtgtgctaggagtggagggcctgctggagtctgaggaagatggcagctgggtcggtagcagggtgagcagggtctgagtggggccaggcttcccacactggacaatgatgtccactgtaaagcccatgtcctggatttttgacaaacatcttagcaatcgacctgacactccactatgtccaagttgatttgtttccatgctggacatgtgtctaccaggacgtgctcttggctgccactggcagggcctggaatgaggacacttgttgtgcaccttgctttggagccccagacaggcaaaaaaatatccatgtggcttcacccaggtcatctctttgcttgtatgaacctcaggccacccttagaaagggtctcatagccccggtgtctcactctctgacctttgccaagtcgtcttcagcagcagctggaactctttgaagtggctgccacagatgttggcaaagcccggcctgggatgcctccaccctgcaccaggcacggggctgcctctgctgcatattcacctggaaatcatccacatgccaagcaccgcagaggcaaggggagtctgccattggactgcgttcaacacggctgcagggatacagacaagcacattccctggcagaggcacgggcccggctggctggagctgcagcagctgtgtgtggtcacagagcttccaaatgagggagatggatggcctcgcttcacagtgtgcccagagcatgtccacggtgcctgggaagaccagggactcaccatgcccggctctggtttccctcacagtgaagcctccttgctggtaggatccatggccaagcatgggggcaggggctgggggagctctgtcagtgacttctcgcaggcagcaaggcctctgggagctggccaggaaaacagaaactccatcctggagcaggtgcgcaaaccaacagctcagaaattaacaaggttcccaccaaggaccatgagccacctgtgctgtcctgtttgttctggtacttgcgcaggacacggggtggggggcgggggaagcacatgtcaacagggagctggtggccgctctgagagccagctcctttctcataacttgcttgaaatccttctctttgcagaagatggaacccagcacatctcgagagcccactgcacaggtcaggtgcatttatgtttactgtttctatcagcaaaagagcaaaaccaaaatcaaacaaacgaagactctggcaagattgcttgatcctgccttgaggtgagcacacagcagcatcgggaaagtgcgtaactcataaagatggtgcagcctgcaggtcaggaggggctggggtctgtcgagggcagctggggctttgcagcctgatccacaacactgcactcagagcggggaggtgctgtctccaggcccacctgtgactcctgaggtacaggcagagggtcgggcgtgtatgacactgcataggagtcctctccgcagtgtggaacccacccacgtcgcctgctccctcagtccccaaatgcatctggggtctgagatcagaaacagcagaagctctggtggttagtggaatagttacctaagtggaccctcatctcctgggcattctttgagcacctccctgctaggcactgtttcaggggctggtgacgggaagcccaccttgcccatgaggctctttcggcacagaggtggacactgagggaccgctggctcacacgcatgttgaaatatgtgctcagctgatgtcttcccaagtgagccctcctgcaggacaggaccacacagtgtcctcaaa

SEQ ID NO: 463 - DNA, 2223 bp, Homo Sapiens
gctttcacatcggccgtgatctcttccatgttcccttcattcattcattcattcattcatttgttcattcattccacacttgcacaccctctatgtccccagcattttaccacacaccagaacacaaaaggtaaccttgccctcatggggcctggagagtaatggggaaacagatgaataactctgcatgtgtcctgaagttatagggaattcacatttaatttatacctgtttctttacagcaaagctttttgcagaaaggatttgaaccaacctgccagaaaaggcacaaggaataacatgatacattttaaccaaagaagataattaaaatcaaaggagaaagtgtttattgagcacctactatgtcccaagcatctccgacacatcctctcactccatggtttccatatccccgagttagtgttattcccctttcagagataagcaaagcgaggctgactagccctagctgagagtcaaacagctgagtcaggccccaaagttcacatgacatcatagaatagctgtcgatgagctttggatttgacgatgagtttcccagcagcctgggggagaaggaaagtggaacatattacccgattgttcactagacaagaaaaagccagatatttctttgaagggaagcaaagcccttcctagcagtgaattcatttgtctcttctcaagtgggagttggaagagagcttgtggggtggaacacagggggccctgctaggactgtccaagttgggcgctcctatggcatatatgtgaggaggctgccacgtgaatgcccatggtcccctggaaaatgttcgtcctcagtgaacatcgccctcggtgtctgtgcatgtgtacgtgtgtatgtgcatatgtgtctgtgtgtttctttctgtctcactgtctttctcttttttatctggccctcccctcacttcatctgtttgtttgtttgtttgtttgtttgtttccacctctgtccctccctggcaaaagtccctgctgctcaaaactctgccagtttttaggaagtgctgttttgtcaaaagcctgcacacgagacccccgtgggccaggactgacttcctccccacacagggctgggcggggcaagcaggaaggagcctgttacagtcaaggtgacgcatccttgccgggccagcccgaacagcagctgggtcggcaagcgacaggagcacgggtcatcttttccccagaggcgtcggaatggacctgtgccacccaggtaagcaactgccgtcaacctctctgggcctcagggtgctctcttttagaatgggacagcagcccctgcctcacagggtcctagataaaggaatacagcgcaggtgggaaatgcagctgcaagaagcaaacatttgtgggctcagcctgtgtgtccagttgcgttctaggggctggacacacagcagtagcaaagcagacgctgtttcccccttcataggcttgtgctctagatgaggagaccggcagtgactctaatgtgattccatatgtcagttgatggcaggtaggatgaagaacagtaaagcagggtaaggaagacaggaatgcatggtggaaaaggccccaagaggagatgctgtctgatgagggacctgaggaagatgtcagctaaggggctttctaaggaacaaacattccagccagaaggaacagccagtccaaaggctcagaggtggactcagaaaagtgacttgcgattaagatgatgatgggatgttggtgatggcgatgcttgtctgggtgatacaagggccttgaggcccctttttggcccccgggggttggggtggtctttggggaggctgaggacgctgcctagagccaggggagggccaggagtgagcaacagaggctctggttgaaaccctccccagctactaagacaatgtgtctggggagaaagaggagaaaggaggctgcaaagatggtgaggaaaagaacatcagggtcgtgttttgggaggcaaattgaaggcccggtagaggggccaagtttctgcaccctggatgtcagcatgctccagagctgcaacagttctggtgaacacggctgctggaattccagaacctaagggctcgtgggagctgtctgctccccaggtccagatgacctcagccttgtccaggagcacccttgcttcaaacgcacctaatgtggagcagcctggccccgcccactgggcatcccccttcc

SEQ ID NO: 464 - DNA, 2495 bp, Homo Sapiens
cccccgatggacactggagtcattattctcaacataatggaggatcgctcccgagtgctggagactcagaggcatagggagatgcctcgtttttcgggggatgtctccccttcttatcaccatcatcctagcccccatggggaccctctcctcaaggtcccctatggcatcccattgctaagtccaagttctcctacaggatctggtctcacccctccctgctctccccgcactccttcctctgcacccttctcctggattttgggttcctcaggacccagtcctggccccctctcttctggccatttcctataagatcctgactactcccgtggcctcctgggccacctgtgtcactgccagtcacccctaagtccccgatcaaagctcaggcctctctccttgtggcccctgccctctagccagctctcttgtgtaccccacagaacctcatgctcaagtgtttccaactgaactcttcatcctccccctagctggcttcctgccctcgatccccccatgtcacccagcgagccccactgggtgtcctggaggagcccaggccggtggctcctctccctctacctgtcctcagtggcctgggttcagctgctcaccctctatctctccctgtccactccctccctcctcccagtcatctcctgggctcctattaccagtgtcattgttggaaacaggggtctctcatgtctgtcttgctgcatggaccgaagtccgtcggccgcctcgggggtcctctccattgggacattaccctacttcctctccaccagggcacacctggtacacacctccactggggacctaccacacctcttcttcctcctcttcaccagggcacacgtggctccctcccactgcagggcctttgtctgggttgatccagagacgcaaggacacagtgcccagggatctttccttgggggcctgtccacctccctcctgtaaaatgggaagctgcgtgtcggtgactgcctcgcccacaggctctttcttctctgggactggccagactccctccagatggccccacccctgccatggctgattggtccaggctggacacgtgacccaagtgaaacccaatgggattctctcctgtgattctgaacccggggaggagacctggagcctggaggtggcagcgacttgggagccgcgtgggcctgtctgttccacacactgccttcttgccccttccttcaacctatggccccctcagaggacaacctttttccttaaactcctcggacgaggttcctgtggcagccgagagagtcacgcagcgggggtgccttccccgcctgtgggggagccccaggcggcccgcacagtctcgtggtggtcgggcctggccacgtgtgctcctcggtccccatgtggccccagcagggcgcccgcctccctcccagggcttcctcccccaggagggatagcaggaaggcaggcaaggacaggacctgagtccacacctcgtccgcggtcacctgcctgaccaggaggaaggggaggggacaggagtgattccacggaggtcacctgggagctggggctgggcgaccccagggctggatgacctcagggctgggtgacctcagggctgggtgatctcagggctgggtgacttcaaggctgggtgacctcagggctggatgacctcagggctgggtgaccccagggctgactattggcggagcacctggggtgggtgccatgggcacctgagagggaactttgacctgagcggaggtcagaaccctcctctgaggaagtgccccaccccactgagctcccagaggctggtggcaggttgaacaggggactatgccagcagagggactgccttccagagactttggatcatcaccacgatgggttgattttacaaatttagccactgtcaccggaggcctggctgaacttcagagtttcttctccagcgtcggtttcttggtttgtaatggggagggctggatccccctgcactgatactcccatggcatggctgcgggaggggcgcccatcctgctggcctggtggctgtggagcggccggaggtggcgtgtgccaaagctgctgctggtgctccctctggctgccttggggtgatgacaggagctgacggcttggcagcagctcccagggaggcagcagccgggctggcggcgggtggtggcggtggtgggagggggcttctggagagaacaaagcactgaggatgctgggctccaggggcgacagaggagtgggggatgggggcagggttctggagtgtgtggcccacagggaggccatggcacgggtgtgtgtgcgggtgtaggatttggaacccacctcgtggttgtgtgagcccaggcaggtcacttagcctctctgggcctcagtttccacagttgtgcaattggaacaataccatcattacattattgtatccccagtgctgagagtagtgagtggcacagagtaggcattca

SEQ ID NO: 465 - DNA, 2390 bp, Homo Sapiens
acagactagacctactgacagtcaagcagaggtaggaagtgccttcaggagaggaaagtgaggcatctgccttcatgtaggagactgcacaggcccatgcagatgctccatgttggttaacagggagctctgcacacacaactctgaacactttctgcctaaagtgggtgggatcactcctctctaagccatgagaaacagatcccacagccatcccagcccaatctgaccctcatcacccattcactcttctaattcatttattcattcaacaaacactcccgtaggcctgttggggaccatgtcctgggctgggtcctggctgtagcaattctcaggcctgtttgtaactctcttgtcagtctgttaccccactgctgggcccttctccacccaagttcccttcccccagatagctcgaagggcttgtgctcatcctaggtcactaagttttctcactgaaacacaggagaccttctcagttcaccaggtgaccttgagcaagttcccctcccaaaccacacccagtgaatactggagagaagaaagctgacagaagccgggctgggttaggcctggctgtggggacatctgagggcagctaggtgtctgcagaagaggaggggctggtgctgaggcctgagatgggaaaagactgcagtggctggagcctgagtgtctggttctgggttgggaagaatagagcctgggactggcagtaggagtggagagggtggcaccaagacctgaaaatggggcaagggtgggggccggggcaagctctgagctggcagggagccaggaaggtcacaggatcagggcaagaactcagttgtctctgaggccctggagagggtgcagacctctgaaccacctgtcctaccttaaggcaggtgtgttaatgcccctccctggagcaaagggctgaccaggcctacggcagaaaggtgaaggtagacagacagcctccttcctgctgccagttgggacctgggccaggcagatgggtacactctcccctccccactccatggctgttccagcctcagcagccagtttgaaggattcccagggggtagccaccttgcttcggcctcttccaggctgggaagtgggagcctgtgcctttaaattctcagcaggttgaaatggctgatgacatcactggttcccgggagcggtagagctggagccggagccaagggagtccaggctgccgggggctgcagacatggagggccagagcagcaggggcagcaggaggccagggacccgggctggcctgggttccctgcccatgccccagggtgttgcccaaactggggcaccctccaaggtaagacccctgagacccagtgccccccgctttcctgatccctggttccacacaccccccccacatacactgcaggctccctggtgctcctgactgaggggctggtactttcctctgctcagcgagcaggggctaggtgaagagagcaccctgggggctgaggggcagtgacaggatgcccggagacagatgaagttagccatctccaggagcccttgggagagtcctggactgggtatcagaggacccagctgtgctccacctttgctgtgtgaccttggccaagttgcttttcctctctgagccaatgcaaaatgagggggcttgtcgctgaagactaaaactgtgacatctgggatggctaagttgttagtactggaggcggtgtgatagttggggggaagccggcacacagtgtgacacttggagccaaggagggtgcctaaaatgccacctcaaagaactgagtttgagaagggaggtggagatggagttttaggtactctgaactgagaaggatacgggacagaaacagaagtgcgtctccagaggcagggcctccctgcgccctgttaccctacctagggccatcctggggcaagtatagacattcttctgccctccttggtgaaggacactttatcctgtcttctggagacaggggacatcagagagaatagatggggaaggaggataggtctctacaggactccgtgactccccacccctcccacctgccggacataaatgggatacctgcttgcctgtcctttcaggtaggggagaaagtggaggatgtaagagggcacaacctgggcacagagagatgtgacaccaggatcaacttagaatcctggacttgctctgaatgctagattcacacttggtgaggatggactattcaacggggctagatggaattctagcaaatgttgggctcataaatgcagacaatgggagatgaagattccccagaatataatgtggccaggaaccctagaccccatcccttcattttacagacagagaaactgaggcgctgggcagagaggta

SEQ ID NO: 466 - DNA, 2497 bp, Homo Sapiens
aatctccacggccaagtgctgagacaagagccctggggctcaaggcccctcaggcagggtgcggtgagggcccgtcggaggaagggcttcctcctgcccatcctggctgggcgctgtgcgggactgcaggagcctgagttggggtaaaaggaatttcaggggagacagtcagatccaaggtcaactgcccagctcagcccaggactccagcctcttgcaacaagatgggccaggcccctcgctggagtctgctcagcaaggggcctgtgggtccctgggcaagcactagccgggtcctaccctcagcctggggcctccttccagcctcctccctggcgcagcccagctagagtttgttcatttcctgggggctcccgcctccccctcccctggccctgcactgcgtgagggcgcatctcctagaaccagccccccagagtctgctgagattaggagacctggaggttaccccagggacaccctgcccctgtgccccagacaggtgtcccccccactatgggtgatgaatgtcgaggagctgccattataattagtgtggaatgtgccgcctctcccagggaggaaaatcccatcttggaaatacacctcagatgcaagttgaatttcacccacggggccataaaaccattttttcaatcacctggtgctgttgggggctggcaccattaatcctggagatgttatttagagccaagacatcacttggggaaaaaaatcaggtccgcactccatgaggaacccctctctatgccctgcagaggcctcaggagatggacgagactgctcgggcaccaggcagggaggggcagggacgcagctaccctcacagccaccctcacggcccaggagccatgcctcacttcatcagctcctgccagaccctccctaccagagatggccccatcggcataagggaagactgaggccagagaggaatggaggaattggagggctggaacagctggtgggctggacggctcagctccacttgccctgcctgcccccagcagacactgccctcctcttcattcccaaagcccccacccggcccagatcctctcctgagatcagtatcatccaacagccttttataaaaaattgtttccttgattaccgagggtaacaatgaaaacacgtaattgaatctccaagaaattaccatttttataacttgcgcccagttcccgagataaattaaacgcctcccctgtatggtgagccgctcactgcgcatcagagaggggctgatactgccctttatcatcgatgcgggacttactaagaagaatgcctcacactgcctcccgggaggctcctggcacctccagctcatggccctgagcgggcagagttggccagctggaggcgccgggcgggtggtcaggtgggccccctcctgatcactcctggccctgttactggctagctgcgtggtggtgtgggtggtaagtgggagggccagtcagaatcttagcccagactcccaagaaaatcaggcctgtgcgcagccgggcagcgacagctttctgagaagtgcaaccctggagccagagtggggaaaaggcagggaagccgggtaggaggaaggaagtggagatggcagagagggaggatttacccacctgccccccacttgctggccaaagctgaccccacccaattgcgccagtgcccagaggacccaagatatcacaaggtcaggcagcagagcggctctgggggaggcgaggccccgctgaggcaaggcaccgcctggcacagggtccgggagcaggtgggggcagcagggtggccacacccacccaaggagctgctgggttggtcagcagaggggcggggaggtggggccagctaccgggatgggctgtccatctgtgagcagctggtagtgggtttcctgctggcagttgctagtggctggattctcatggctctctggctggctggaggccgtttgggttgtggggaagcagaagcctccagcctgtggactgagtttcctgaaaatgtctgcaggctgcactcagcagagccaacttcaagcaaaggacccgagtgacactattcacgtgcaaaccaccgcccctcccagcgtggctgtttgcctgagggcccagagccaccccctggggaacactgcctagtcagaaacctggcagtggtggctgcacagcgaggaggggtgctgtcaggggacagaggacctgctccctgggaacgggagaactgaggcccaaagagtggcctcccacttgatctaggcaaactcagggtcaagggcaacaggctgaggtcaccaggagctcaaaggctggctctgaaggtgagaccttcttctgaggaagcaagtggcctcaagcagcaccctctggcagccggcccagaggactggagtggggtgggccgggaggaacatcgttcgggacggggtgggtgcctacacccacaactgtgctcctgccttctctccctccct

SEQ ID NO: 467 - DNA, 2349 bp, Homo Sapiens
ctggttctcaccccagccctgacacaaacgccatgagggtcctcagaccagtcactctcccttctgtgggactctcagagtttcaaagctggaaaagagaagccaagctgcagcctctgttgggcaactctaaatgccaggtagcccacccataaatacatggaaaggtcttcctcaggggaattggagtctgcctccagagttcccaagcccacgccccaaataaaactccaaaattatgaatgtgtgtatgatggaatggcaaacaggcagggtgcaacctttctcactggcacaaggaggtgtcgccaggatgccaacctactctgactcaggtgccaagccctcccccaaccctgcacacaaacgcacagacatctgtactgatagtgcaagaaattcatctatgtttattaccatctaaaaaatagcactctttactaagcatttcccacatgcctggcacttcccacatccaggttcacagccagccctgaaagggaggtatcaccttcattttacaggtgaggaaataagtccagagaggggaagtgacttgctcagcttgtatgtgctgagttgggatttgaacccaggcctttcgtctcagcatccattccactgggcaccccgtgcccacaaagcctcctcctgggtaatggctttttggctcagttgaccctggatcctcccccagcctgcccagtccctcggatggcatttaatgaggactcccaggtttgaataagactttccccaaccgtgacctcatttaagcaccccatgatgagattcgtgattgcccccactttacagataaggaaattgaggttcaccatggtcaagtcactcccccagggacacacagcctaggagagtaagggctggggctgaagaaaccttgcttccccgatcggaccccccagcccacacacccctcatggctcacccagctccgaggagttcccagcagaatctccaactccacaccacagtgtgccaggcatggtccatcctctcttctctcgctggtgccctccaccagggactccactctgccctgctgctcgcttcttcctggcccctgctggactctcctcaagcgctcggcatgcctcccactgactctgaagagtggccagtgctctctgcagctcgggtccgggggtgtggatgaaggagccccaggcagtctcatgagcacagagagcaccgtaggctgcggtgagctccggctcatcctcccagctacatgactgcagcctcctatgcgcatcccagcgggcatggatcagggccagtccctgagcatccttggccaggaagctcaggtaccccagtgggttgccagggacggccttggtcaagtggcaggaggtcctgtaccagcggagggcaggggagccccccagggccacccccaggaagcccagcatcccaaacagccctgcctgaacccccattctgcactggcccagtccagtcagacaaagcccctgggatgcctgcccttggtggccccaccaggcggcagctgagcagtggaacggaagcggagcccagcaggcccggtgcggcgggaccaatgaatggagctgcgggaggaggaggaaagaggctggagtatggggtgatcttgggcttgtaaccgaatccaccagccgggcaggacgctgattggctgaggagtgcacttgccagggcccacgcccccattctgcctgccttctcagcaccatccagtcacctgctgccagccctgcctagattgggactatgggagccaaagccctaagctgtgggatggggaccaggctggggctttcacatctccttgaagggaaggaaaagggttcaggagcttggaggagtcccttagaacccacccttctcacccttaccacagcggtggctgccacatccacctccatcaggctggcagggggccatgggcctctgccagggctgggtgaaggaagggctggggctctgaagctaccaccctgggagttcccaaggcttctgggaaagggagtgccacctggggtgctcccctgccaagtcctggttcttagaaaggctctcggcatactcaggggacagagccccagggctccccgcttcctaggactccaagcatgggcctggccttgcagcaaccctcctggtctgataactgggggagacgcagcgggaacaggccttgagagccacacagggcagggctgatgctctggatttgaaagaactatggtccctagagtggcagagagtggcccagggtgtatgtctgtggccacctccatccctggccacctggggggacacagcaggcatcatgtgtgcctc

SEQ ID NO: 468 - DNA, 2355 bp, Homo Sapiens
atgcccccctggtaggaagagggcagagacctggttctcaccccagccctgacacaaacgccatgagggtcctcagaccagtcactctcccttctgtgggactctcagagtttcaaagctggaaaagagaagccaagctgcagcctctgttgggcaactctaaatgccaggtagcccacccataaatacatggaaaggtcttcctcaggggaattggagtctgcctccagagttcccaagcccacgccccaaataaaactccaaaattatgaatgtgtgtatgatggaatggcaaacaggcagggtgcaacctttctcactggcacaaggaggtgtcgccaggatgccaacctactctgactcaggtgccaagccctcccccaaccctgcacacaaacgcacagacatctgtactgatagtgcaagaaattcatctatgtttattaccatctaaaaaatagcactctttactaagcatttcccacatgcctggcacttcccacatccaggttcacagccagccctgaaagggaggtatcaccttcattttacaggtgaggaaataagtccagagaggggaagtgacttgctcagcttgtatgtgctgagttgggatttgaacccaggcctttcgtctcagcatccattccactgggcaccccgtgcccacaaagcctcctcctgggtaatggctttttggctcagttgaccctggatcctcccccagcctgcccagtccctcggatggcatttaatgaggactcccaggtttgaataagactttccccaaccgtgacctcatttaagcaccccatgatgagattcgtgattgcccccactttacagataaggaaattgaggttcaccatggtcaagtcactcccccagggacacacagcctaggagagtaagggctggggctgaagaaaccttgcttccccgatcggaccccccagcccacacacccctcatggctcacccagctccgaggagttcccagcagaatctccaactccacaccacagtgtgccaggcatggtccatcctctcttctctcgctggtgccctccaccagggactccactctgccctgctgctcgcttcttcctggcccctgctggactctcctcaagcgctcggcatgcctcccactgactctgaagagtggccagtgctctctgcagctcgggtccgggggtgtggatgaaggagccccaggcagtctcatgagcacagagagcaccgtaggctgcggtgagctccggctcatcctcccagctacatgactgcagcctcctatgcgcatcccagcgggcatggatcagggccagtccctgagcatccttggccaggaagctcaggtaccccagtgggttgccagggacggccttggtcaagtggcaggaggtcctgtaccagcggagggcaggggagccccccagggccacccccaggaagcccagcatcccaaacagccctgcctgaacccccattctgcactggcccagtccagtcagacaaagcccctgggatgcctgcccttggtggccccaccaggcggcagctgagcagtggaacggaagcggagcccagcaggcccggtgcggcgggaccaatgaatggagctgcgggaggaggaggaaagaggctggagtatggggtgatcttgggcttgtaaccgaatccaccagccgggcaggacgctgattggctgaggagtgcacttgccagggcccacgcccccattctgcctgccttctcagcaccatccagtcacctgctgccagccctgcctagattgggactatgggagccaaagccctaagctgtgggatggggaccaggctggggctttcacatctccttgaagggaaggaaaagggttcaggagcttggaggagtcccttagaacccacccttctcacccttaccacagcggtggctgccacatccacctccatcaggctggcagggggccatgggcctctgccagggctgggtgaaggaagggctggggctctgaagctaccaccctgggagttcccaaggcttctgggaaagggagtgccacctggggtgctcccctgccaagtcctggttcttagaaaggctctcggcatactcaggggacagagccccagggctccccgcttcctaggactccaagcatgggcctggccttgcagcaaccctcctggtctgataactgggggagacgcagcgggaacaggccttgagagccacacagggcagggctgatgctctggatttgaaagaactatggtccctagagtggcagagagtggcccagggtgtatgtctgtggccacctccatccctggccacctgggggga

SEQ ID NO: 469 - DNA, 2475 bp, Homo Sapiens
ccaggatactggctcctaaaaccacacaaccacagtcctattgctgcacctaagaaaatgaatcttccacaagtccccactcatttcttgaattgtcctgtggaagattttataagcctcccaacctaggacaccataagggttcttgtgccacatttggttttatgtttctttaatctctttaagcccagaaccactcatgatgctgagctgcatcaagggccagttatcctgcagcagaagaattattgttattgttactatttgttttgtgaccactatttaaatccgctaacagagttcccgaatccatttaactgggcacaagcaggcagtggcacatggtcacctccgtggagctccgggatgctgtggggccccttgcacgttgagccacacaaatagggagctctatgccagctgcagctgccagcaccaacatacgtgttcaatctttttctaaattttaggttcactctcctgcctgaggctccaatggagtcactgagctgcacttggccattaaagcccacccaggacccttgccattctcacaccaagcatgaggcccccagtccccaactctgaatgtgctgtcatcccactcagaatcatgtcttctcttcaaccaccagtgtcaggaggacaagctaccaggataattatgctctatgaggcaaactttgactctggggcctggaaacccagaagccattgattagtcaatagcaatctaaacaatgcactcataaagccagggaatgcaaatgtggctggggctctcaggagggcactggtggtcatgagaacagggtggcatctgtcctgagcaggatcgggacagcaggtgtggccccagtctgctgggctctgcagcccccacctctgctcctgccctgtcccagcagccaggcatggccccgcctctgtggggccctcttttctccagggaagccggccacccaggccttgacccttttcaaccctgtccccaggcccatcactcctcatttatccttcttagagatacttaagacatcaacagcaggactgggatgtgtttacgaaaagaacccaaatcctagctcaagccacaggcacaaagtacagcccaacagacagggaaggggcagggcaagggagtgtgaccctggcggcagctggagaaggcactgctggagtatgtccaggaggagctcgccagtgccagggcaatgggacaggaagggcaagccaagtccgagcccagggaatgtaaaggaaacagcagccatgtttcctttacgtcgtcttggtatttccaagcagctccgcataaaatctttgcgcacacacacacatgcatgctcactctctctctctctctctctctctctctatctgcctgatagtttccttcaggtctggattctacgtctgacctttgtcctggcaagcttgtcctcccctccagcctgccaggggcacactctgcatgctcatttttatactccaaggtctttaacttcaaaaggaggcgggggacaatctagaaagctggccaaagtgagatgcaacagagggttccagagacagccaccgcccaatgcagggcctgatctgcaggctgcactggccccatgaccgcagccctccctgcaactggggctcacccactccctgcacagcacccctacgggccaggcagcactgggtaagagggaggaggggaggccccgaatcagggtgactctgcccagcttcaaacactcccacacaccagaagggctcacctttgaatgccacctcccagcgaccttccaaggagcggttccggccagtgataacatactgatagccaacccacaacctgcagggcacagagacagagacagagatctcagcggcaggagggatgcaaccatcaatgactgtgtgttttttgttttttgagacagagtctcgctctgtcaccaggatggagtgcagtggtgcgatctcggctcactgcaacttgacttcctggttcaagcaattctcctgcctcagcctcccgagtaggtgggattacaggcacaggccaccacgcccagctaatttttgtatttttttttttttttttagtagagacggggtttcaccatattggccaggatggtctcgatctcctgacctcatgacccacccgcctcggcttcccaaagtgctgggattgttttttaatagctatactgacctccacaacactgagcttctaacatgagacactcatgttagaatgcattaaaattcaaaacaagaaagttcacagggcaggaaaagttttatctcagggaactcttgccaagactgtttctatgagctaaaccggtaaagctttcacaatttaagcaagaacaatcttattcttggtagacatgaaaccccatgaatacaactcggtgactatgctaaaaccataggacagggcactccacaggggagattttcatggca

SEQ ID NO: 470 - DNA, 2223 bp, Homo Sapiens
aatcaggctcaaaaagattgtcttaaaagagtgaaccttggcaatttaccataaaataattgcaatgcagattgtgcatggaaatgattggagatattttaaggtcatagtgtcttcacaaattgagctgaaagggaactgttaggatgatcttgcctaaccctctcttctcacacaggaagaactattttaaactcgagaggttaagtgacctggccaaagtcacacagccaccactagttaactcgtatacattgattctcctgtggggctgggcagatgaggaatcttttgttctcttccctgtttgcagagattttttttgaggttactttccgagttctggcaagtacccctgcttctggtagctttgtgtctcgattcaatctcattctttttattttattttatttttgagacagggtctcactttgtcacccaagctggagtgcagtggtgtaatcttggctcactgtagcctccacctcttgggttcaagcgatcctcctgcctcagccccccaagtagctgggattacagacgtctgccaccacgccaggctaatttatggttttttgtatgtgttttttgtgtttttgtagagacagtgtttccccatgttgcccaggctggtctccaactcctgagctcaagtgatctgcccgcctcagcctttcaaagtgctaggattacaggtgtgagccaccgtgcccggacttaatcccattctttaacttgttttgttttgtcctctccaggaggctcccagccctttcggattggttgagaaaagtggcctggctggtctggggccagcggcacccaccctcccctcaattgcccaactccccccccccaccgaactgcccaactccccctccccaactgcccaactcccccacccccacaatcccctcccgccacaactgagggaggcggtgctgaaaaacagctgactccagcaatgctgctcacgtgaccactgcagctgcagctcccgttccactccttgtcctgggctaggtgggcactaccaggggctcctttggtaaggagtaccgggtaggcacccggtcctgccaatccaccactggaacagctggggggacagcagacaggcacggtcggacagacttgacagatcaggcatcaggccctctgcgctggtcccgggctctttaagcaggaacgtgaatggcctcaagatgtctcacatggtcccactagccctcctcctccctttgttccctacctccaggagggctgctctgcccttccttcctctgttctttggccttatgttccccgccaccacagaccttcccccgccccacccctctgcagacttagccgtgcattgcaggcatggaggattaatcagtgacaggaagctgcgtctctcggagcggtgaccagctgtggtcaggagagcctcagcagggccagccccaggagtctttcccgattcttgctcactgctcacccacctgctgctgccatgaggcaccttggggccttcctcttccttctgggggtcctgggggccctcactgagatgtgtggtgagtaactcgcctctatcctgtgcctctttcctcctgggtccttagtggggtggctagggcataggatgagggaacttacctgcccttctaagctcccatagcagtttgggcttagctggacctcagcatttaacacatcctattgtgattgattatatgtttgactcctcaccagacaagatctccgttaattcagtcattcgttcacacattcattcagcgcatactgagccttttctgtgtcaggcccagtgttagcctttggggaacgtgcaaagcatgagacaagtctaatccctgccatcctagagcttatgttctagggaagggggacagacaaaagaaatggttaggtgctcccacctgaaatctcagcattttggaaggctgaggcgggaggggaggatcgcttgagctcaacagttcaaggtcagcctgggcaacatagggagaccccatctctacaaaaaataaaaaaaattaaaaaatagctgggcatggggaagactttctgaagaccaagaggacacatgggagctgaaactcgaaggaagaaaaggagctggcaggaaaggagtgggggacacacattctaggcagcaggaagtgagccttcggaggtcctgcctgctccagctctgtgccccaaggggtctct

SEQ ID NO: 471 - DNA, 2448 bp, Homo Sapiens
ggtgtctacagggcatccaagcagacataggttgaggaggcagaatatatgtgaatctggagccaagaagagaggtaagggctggaaatagggatctaagacccctggacagttgtgagtgtgcacaatgagggtcagatgcagagaaaattaggagactacagagagcagaacccagggtggggatctgggagtcagcagttgggcatgggcctggtagaaagggaagccaaggaggaggagagggggcagtctcagacaccaaggaggggagagtgactagaaagaaaaccttcttgcagagacataggggatggggaagaactgcagactgaactggggcaaaggactgttggccttaaccagagagatttgagggagagatgaggctgagagccaggggatcctgccatgtcccagcataaaaacagtacctgacacagatgggtgcttgggagctgttgtcggatgaatgagtggacagatgcatggatggacggatggatggaaggatgatagattgatggacaaacagatgaacagatgaatagctggatggacaactggatggatgggtagacagaatgatctcagagatcagaaaaagcttcatgcactaagtgggactgaaccgcgtctccatgggtagaaagcagaggaatctccacttgagtcaggaatgacccagtgctctcaatccagggagaaagccagcctggcttcactggggacacttgtgtgggggactcagaggccctttaaatgaggccagacgaggttggacaggtccaagccaactcagcactcctctgccacactgcacaggaggggatgtgtcactcagggagttgctgggacctatgggtcccagtgttgtcatcagcaccgacagcctcagagaggaaagacacacactggggtaactccaaggctgtgtgtggcacttgccttggacagcagacaggcacagggacacctctagggggctggccacccccctgcctcatgtctaggtcccagccccgcccactgcaaccctgtgcccgtcatgcccagcaggctcctgctccagcccagcccccagagagcagaccccaggtgctggccccgggggttttggtctgagcctcagtcactgtgttatgtcttcggaactgggaccaaggtcaccgtcctaggtaagtggctctcaacctttcccagcctgtctcaccctctgctgtccctggaaaatctgttttctctctctggggcttcctcccctctgtcctcccagccttaagcactgacccttacctttctccatggggcctggaggaggtgcattagtctccgggtaaccggcaggaagggcctccacagtgggagcagccggatgcagcctggtcccggggcctgagctgggattgggcagggtcagggctcctcctctcttccagggcagatgtctgagtgagggacagaggctggttctgatgaggggccctgcagtgtccttagggacattgcccagtgactcctggggtcaaggacagaggctgctggggtgggcctgggagctgctgagtctcatagtctaggggagcagccccaagaacagctgagggtctaggctgaggactggatgccaatccagcctgggagggccacacggcctggtgacacagaggtcaccccaaggggagaccaatggagggcacagagagggctctgggtctaggctgcagctctgtggcctgtgctgggtcatgaggacatggggacacagagggacgggtgagactgggtgaggtgccagaatccaaccctcccaggacagtcaccagaaaggagacagtctcttagggcagagatgtgtctgtccctggagccccgtcacctctggggcccagtgtctctctgttcacggatcggcctcctgccttcctcaaagggcatgttagactcaggaaatgaccagaggggagtgaatgaggggtgcagagaactccatggctaccaggtgaagtttggggtcatcacaggctgctggggtgggcctgggggctgctgagtctcatagtctgtgggagcagccccaggaacagctgaggtgaagggttctgtggtcgggcttgtggagacaggaaacatctcagagcctcagaggagccctgaggcttgtctaggtggagcccactccttgccaggagagccaagtgggctgggctggggcagagcccggtgcctgtgagggataggaagctccagttcaaagcaggcttgggtctccccacacactgcctgccaggacagtcctacaggatgagcaggggacccacagttcacggaggaggctctaggtcctggaagaataaagtgggtgatggaggggggtatagggatggaaatgagggatccaggggtcaaggccagattctaaactcagactccagagatcagagaaga

SEQ ID NO: 472 - DNA, 2383 bp, Homo Sapiens
agagagtcgggcatatgggcaggcgcttatcaaggaagaaagcagagtgttgaggctgtttttttaagccacaggtaagaagaaattgctgagtcagcttcagcattcattaacagccaccgatttcccgggaaggcccgagggagatgaataagcagcagctgcgattccatcaagcttaatttaaaatcctggtggaggaaggcatggaaaccagtgctgctggtcccaggagaatgctggagttgaatatctctgcattcagatgcgggctttacctaggagtaagaaagcctgtgtaattagacctaatgacaaagaggctccacacctccctcagtcccggggcaccgggctgcagccgacagctccaaccagacacctcgcagttcccaaggccagcaccccagagaagggatgtagggatcttcttcagagcagaaggtcttcagggatctcagcacatgtgctccaagcagacatctccctagtcccgaggggcagggccgtggacaagcagctggaagcccacccggccagccttgatccagaagatgacccctgggtgacccctggtgaaggccggcatcagtggctgcagagacgagggggcccttctcacaccccaagagtcaattcaaccagatggtcggccaccaggcagagacggggctgcccaaggagatccacagcacatcccataagacacacactcggccctggccctgtgccctcctgtctgcccctctagccacccactgcccgctgcccaccaccaggcctccagagcaggctcagctggcgctaagggcccagctgtcggggatgctgagatagagcgagggtcaagttccctctggttctcagaaggccctggccaggatgtacaggtggccgcaggcgtcagtcttggaggtggccgcaggcagtgggggtgcaggcggcagatcctcggtatgaatttaaatcatttcagcccttcagccagccagaaaacagttccaatcccatcctgctggcccagaagtaggacgaggggagagacaaagccaaacccttgaccagctccccctgccctggtcaggaagccagagtgtgagagtgtgcggggctcggcatccggccccactcggccatccgtgctgaacaggatgccctgaaggacgacaaggctgcctcggatcctgatgccacgcttgtttcaaatccttgacggggagaaacgcggggcgccacgcggcacctccaggtcaccggttcccactctgggattcaggtgagaagccagggtctcggggtcccctgtgacctcttggcctttgcccatggagggcagtcgtttgactaaaacaggacctttctctcccaaggcacatttccaagccgtttctcacttgttcaagatactttttactttaaatggaacgcagtcaagaagcaatgtacggccaccatgcacgtggctgctcctctctcctgggcctgggcaccctgggggtgccccaggaagaggcccccacaccatggaggtgagcgaggggctctggccggcccgagggggctgggatggcgaggatggccagattgggcggctgccgggtctcggggcccggtgggtccctcctcggtggcttgacccgtttgcctttgagcaatgactcggtgggcagcagagccccacccgtaaccagcctgcacagcgcagccccacaggaatctgttcaggcaaaggttctaattatcaagacatttttatttcaagcagagctcaatatttcaagttcattctgtgcctacgtttcagaaaaaaaatcttccagcaagaacgcaataaacaagactgagagcctcattaggagcctgtgagccccacatcaccagacgcgctgcagctccccgtgatgaccgctcctcctccgagccccgcacacggcgcgggttacatggaaaaggcaccgcagctccccgtgacgtcctctcctcctcggagccccgcacacggcgcgggttacatggaaaaggcactgcagctccccatgacgatcgctcctcctctgagcaccgcacacggcacgggttacatggaaaaggcactgagtgcggcccacaggagaggcggggatggaaccaggaccccaatgcataggctgggggacgcaccttggccacctcccgtggcgggatggttttcccaatcggagatcccagcagggcccatgctggcggctctgcctgtccctggcacggaccactcctcacctgtggatgacacccccatcccaggtctgtctgcaggactcaggcccctccccaggtgcccccctggtactcagggactttccagcagcacatggagctggggttgcatggaggtgtgtggggg

SEQ ID NO: 473 - DNA, 2293 bp, Homo Sapiens
ccctctgcaccaccccatggtgttaccaaaagttgaaccatgggttggttcaactttgcagagaagagaccacctaacccatctgtggaaattcactccttagcgatactgatgctccctaagaaattcaatcctgggcctgagtgatggttggtgcaaaaaacaaattcaagatcccagtgtcctccagaagcctggatttccagggatcctgctgtgagtcacaggacgtcaccggtccccttctctttgtgggttgagtgtgggggccatgtggactccctcatgagcagatgccaccagggccactggccccagcttcctccttcacagctgcagtgggggctggggctggggcatcccagggagggtttttgtatgagcctgtgtcacagtgtgtggtattcggcggagggaccaagctgaccgtcctaggtgagtctcttctcccctctccttccccgctcttgggacaatttctgctgtttttgtttgtttctgtatcttgtctcaacttgtggtcagcctttctccctgcatcccaggcctgagcaaggacctctgccctccctgttcagacccttgcttgcctcagcaggtcactacaaccacttcacctctgaccacaggggcaggggactagatagaatgacctactgagcctcgtctgtctgtctgtctgtctgtctctctgtttgtctctctgtctctctgtttgtctctctgactgtctgacaggcgcaggctgggtctctaagccttgttctgttctggcctcctcagtctgggttcttgtcggaacagctttgtccttgggttacctgggttccatctcctggggaattgggaacaaggggtctgagggaggcacctcctgggagactttagaaggacccagtgccctcggggctgatgctcgggaatcacagagctgggacccagagccaggatccagacccagaatgaggtaggaggtggaggggctgccctgggcgtctgggggctgccagggactgagccctgagccagcctgagactcaggaaaccccgtcaggagggagaagggagaagcagactctggacaccagaaagccaggggaagggtcacaaaaggagtggatgtgacggaagggcgggctcctgggtctcttcagaacatatcccctgtgcccagggggatcagaggggcagagtccactgcgtgaaagccccactgctatgaccaggtagccgggacgtggggtggatgccagaaaagactccacggaataagagagagcccaggacagcaggcaggctctccgatccccccaggcccttgccccatacacgggctccagaacacacatttggctggaacagcctgagggaccaaaaggccccagtatcccacagagctgaggagccaggccagaaaagtaaccccagagttcgctgtgcaggggagacacagagctctctttatctgtcaggatggcaggaggggacagggtcagggcgctgagggtcagatgtcggtgttgggggccaaggccccgagagatctcaggacaggtggtcaggtgtctaaggtaaaacagctccccgtgcagatcagggcatagtggaaaacaccctgacccctctgcctggcatagaccttcagacacagagcccctgaacaagggcaccccaacacctcatcatatactgaggtcaggggctccccaggtggacaccaggactctgaccccctgcccctcatccaccccgcaggtcagcccaaggctgccccctcggtcactctgttcccgccctcctctgaggagcttcaagccaacaaggccacactggtgtgtctcataagtgacttctacccgggagccgtgacagtggcctggaaggcagatagcagccccgtcaaggcgggagtggagaccaccacaccctccaaacaaagcaacaacaagtacgcggccagcagctatctgagcctgacgcctgagcagtggaagtcccacagaagctacagctgccaggtcacgcatgaagggagcaccgtggagaagacagtggcccctacagaatgttcataggttctcaaccctcaccccccaccacgggagactagagctgcaggatcccaggggaggggtctctcctcccaccccaaggcatcaagcccttctccctgcactcaataaaccctcaataaatattctcattgtcaatcagaaatcttgttttatctcattttttcttttctcacatataattcctagcctttcctgggttctcaatttgtggtggaaag

SEQ ID NO: 474 - DNA, 2388 bp, Homo Sapiens
gcttccaccgcttgatgtcgcagacatcgcagtccctgatgtagggtctggccctatggggcttagtgggtgttctccccgtgtgtggagatgagaaatcgtaaaaagtaaagacacaagacaaagagataaagcgaaaacagctgggcccgggggaccactaccatcaagacacggagatgggtagtggccccaaatggttgcgtgcactgttatttattgcatacaagacaaggggggcagggtaaggagggtgagtcgtccaagtgattgataaggtcgagcaagtcacgtgatcataggacagggggcccttcccttataggtagccgaagcagagagggaaggcagtatacgtcagcgttttcttctatgcacctatcagaaagatcaaagactttaagactttcactatttcttctaccgctatcttctgagaacttcaaagagggaccaggagtacaggaggaaagtggacaaggagcgtgaccattgaagcacagcatcacagggaggggtttaggcctccggatggctgcaggcaggcctggatactatccagcctcccacaagaagctggtggagctgagcgttccctgactcctccaagaaaagggagactccctttcgtggtccgctaagtaacgatgccttcctaggcactggcgttaccgcctgaccaaggagccctccagtagcccttatgcgggtgtgacagagggctcacctcttgcattctcggtcacttctcacaacagcccttcagcacctgaccctatacccaccggttatttcttggttatattagtaatacaataaagagtaatattaaaagctaatgattaataatatctacactaatgattgataatgtccatgatcatctctgtatctaatttgtattataactattcttattgtaagtatattctttattatactgaaacagtttgtgccttcagtctcttgcctcagcacctaggtaatcctccgcccacatctctgaggggctgaactgccccccaccttctggaagctgggaggttggaagaggggatgcgtgcgatggactcagcacacagctgggaactcgaggcacacctaagccttcgcttgtgctgtgcggagtccacacttccttccccactggggtctcaaaacctcccctcactcaacagggtggtgctgctcaaagctctgggcacacattagggctggggagggggtggtggagagggggctccagcctgcccaaccaccaggcaacggggcacctgcccctctctcagctgggtctggacccgcgtcccaggctcaggctgcaatgcctttctctttctctttctcttctttttgcagttccgttgggtcctgcccaggacagataaagacagagcagcctgtctttatcggaggttcctctgccagtaggaggggcccggagaaaaccagaaagagggccagagccagagaaacatgaagcaccccggggcctcccacaccagtgcctgagcaggaatggggaggggccatgattcacaaggccctgggaggtcactttaaagagggctgctcaactgcaaggacgctgtaagcaggaagagaagccacagcgcttcagaaaagagtgggacagggacaagcatatctaagaggctgaacatgaatccacagatcaggtacctctgcacgctttgtccgccaggcccctcctgccacttcctgccaggcggtcctgctgggcctcagccctggcctccccctgccccagccccacctctgggctccctcccccctggttcccccgctgcccccactcccagccaagctccttgccctgctgtgtggtcccacgactgctgcttctgaatgggccaccttccccacttgccccagcccagtccgcctgctgagactctcccccgaaaatcatgcccgggctggtgcttcccgccctgggagggtgcttcctctgtgtgcttcccactattcctgggagctctggaactgggagaattgaaccaaaggatgatttgagcaatcaggcattttgttctcagcgctttggtgcaatttctgtaagatttactttgtttcaatacaaagtcttaggagagggtgtgggggagggaatggtctctgtaccagaaaataagtcacttcttccaaagatgcctccactgtgagcagagtaggatgcacacgaccccagacacaggctcctcctctgtgagcaccgttcacctttcagaatgacacctgcaacatggagtgtaggaaaaaatatgatgatcaggagaaatgctcttattttaggccaggcacggtggcttatgcctgtaatcctagcactttgggaggctgaggcgggcgggtcacttgtggtca

SEQ ID NO: 475 - DNA, 2267 bp, Homo Sapiens
ctctatctgtcctttttaattatatttacttctctctctatttctgtcttttctcactctctcccctctccctctccctccctttcttcctctctccacttccgtctttatctccatggccctgctctctgactctcatggcactgctatctctgcctccctctctctgtctcccttttctcttcccctccccttcagctctcagctgggctgtgggttccctcttacctggggacttgctacttcctgctggaggacaggcaggcgggcaggtgctatgggtgactagagtccgaccccccattttatagtctggcagacatcaggccctatagtctgtggcacaaaggggaagctggctcagcaggcctgggcagggagtgggggactggggccctgacctcgcctggatcactgcagacagcagcactttcctttgtgagaccagcacacacagcagaaaccctggccacagcagcttcaccttccaaccctaccctgactcctttctcaacaaccccagccagggatgggcccccaaaagggtccctgctggctgccaacatggggcagggaaaaggggagaccctgggaggcaggagaccagagtttgaatcctgactcagccactgcgcgctgtgtggcttttggtaggtctctacccctaggggggcctctgtgtctgcaattataaggtgggcacgtgtccctgttggatgccatatagaaaagaaggtgacaatgagcacagaagcgttttgtaaaggcagatgtgggtttgatatggacagccttttttacggagtgcttactgtgtgccgaacccgtgttatctcggtcagtccccgggacaatctgccttatttggtactttcattatgcccatttcacagaagaggaaagtgaaggcacagagaggtcagagccagcccaggccagccagctctgggcctgtgtgctttcttctcctgctgtccagccttgaccttggcctgaggccccctggcctgacttcctctttgtaggttggggtgggaatgggagagtcgcactgtgctcagctgggttggatatcggagacctgggtctttttcttttccccacattgggccccatcctttcctgacctatcgacagtgatccctctcgccaccccagttccccgcctctacccaggccacgttatctgacctggaggacagtgctggtggccagaaatatgactgcctgtcccagagcctcctgccctggcaagccccagatgcccaccacatcttgttcaccactggccccagcacctagctgggcctggctaggtagagcttggcacatcatgggttctcagtcaataactggtgactcaatggtggttccaatggatcggaacagaaggtagggtacggaggagatagggaaaccaaggcaaggagagagaagtaaggaggcagatagaagtaacagacaaagagagaggtggagacagagacacagagaggcacaggggacatggacagtgaaggagcgagagacggagagacagaggtcaagttggggtgatcaagcctcaggacggaggaacagacgccagaaatcacagggcccaatcctcccatttcacaaatggagaaaccgaggcccaggtggaacaaatgacttcaacatagtcacatggcgggaactcacagtacagctggggtcagaaggagcctggggagctgctcagctaggtcacctgcagtcggctccccagtcccaggcagggtatattgcgggggcatctggataggctcctgtctcttctttttcggggttctaggctccccgtggagcccagctctgtcttgaactctccctggcctggagccagctttgcctctgtccctccaccacccagcaccccctcgcttcctagcctctccttggcctttcatcctgggccaagacttggtgggtggggtgtgggcaggaactgcaagatggggtagccactggaactggggccaagacgcctgtggtgagggcccacccaccagtctaggcttcaaagccaggtcatctggggcagttccgtgccccccctaaagccccaggaatgggctgtctgccagagggtgggggcagagaagggggatggcccaccatgttggtggctccactctgagcatttattattattattgtatccttcattatatctttttcttttttgccctgtcttatggagccaatttattttcttttctttttttcttttctttttttttttt

SEQ ID NO: 476 - DNA, 2408 bp, Homo Sapiens
attacaggcgcccgcgctactcccggctaatttttgtgtttttagtagagacggggtttcaccatgttggccagcctggtcttgaactcctgacctcaggtgatccacccacctcggcctcccaaagtgctgagattacaggcgtgagccattgcgcccagcctaaagtcatgcgtttgatagagctgcatttcaccctcttaaaaggaaactggtgtggccactttacaggtcatgagcaggactcaggtgtcctccaggtcacacggatggtaagaaagaagcagggctggatttcatctcagatgatctggtttccagtcatgctgttttcctatgcttgttacacccattttacacacaagtatgtatgtatgagggacctcttaggtccctcatacgccaattcagagggcagggtttcgggacaagaggcacacagcaaattgtacaagtcctggatatttggcaagtgtgccacagtttgcaaagcatgtttgcaactaacagctcctctatgctgcccacagtgccatccggattcatcttcaggctttgtggacccagcaggccctggcctagccctcttctcctgcctcacttcccttcaggtcccctgagctccaggccaattgggctaccagctctttcttgtacatgtgccccaagttcccacctctgaactttttcttagaatgcctctccttccatctcactctgtacatatcttcctcatccttcagagtctagttcaaatgcctcctctaacggcaagcctatctggattgcttcaactggaagagaaaggggaaagagagaaggaaaggaataggcatttcctgaatgtttactctgtaccaggcatgttatgtaacctcacaacaactctgtgatatggtttgtttctgccccattttataggcagaaattgaggggaaatgactcgctggagctcacatagctaggaaggatgcttctggactcctcatctagtgctcattctcctgctctagtcaggaaccttgtggggctgatgagggccaatattccacctctctccttcttcgtggctgatccctgggggtggtgatctggtcctttccctccctgctaaagccagagctgctgacggcttgccattggctcttcagccagggctggcttttgtttctgtggcccagttgctgagtcggggctttgtctcccaggggcccctcttccctccctgcctataagagcccgacctcggctggtctcagatctgacatgttccctgggcctatctcggtaagtcccaggtttggaggaggggtgggatcagagttctgagtgagcattctgggaggcgaggaacccaggtccccagtcctagggatgtcactgtgtcatcctgaatgccatcctcatcctaaccaaggatgagccccaaccatcaagaccagcacctgcttccctcatttaaaaacaaattattcctgtagccctattgcctaaatttccaccatcagagctacctctttgagctaggtgctgtctttggaagggctctcttatgctgagcatttcagcactcgctggggtgatgcacccacccaccagcagccacaaaaattttcccataacaagcagataagagaatacagagtggggctcagagtcaatgagacccagcaagggtgagttttgagatggggataggatggaagatggcattggtgacagatggaaaggacaggagagggacaggccaaagccatgcattgcccctagcccagtcactcctggactccctatgtggatcctgaccaggtccaagccagccatctgcataaagaggagagcagagggtcagggtggaagattataatgttcttctcttctgcaggaaggggccacaatgaccctgcaatgcacaaagtcagcgggaccctggaaggtaggaagaggcatggggagggggtgttcagggggtatggggagggttcaggtccccatgaatcctaggaggggggcattataaatgcctatttcacagaggtgcaatcaaggctcagagttgagaagggacttgtatgtcacatacagggaggttgaatgtgaatttgggtcttctggttcccaaagttgacctgttacactctttggcagaggttgcagtctttgggcatgatttctttgaccatctctgtgtgtgtttgtttgttttataaagcttttggatttatcatcagcctttaaaagcctggaagaaccacataaaagtccagatctagtgattgtcttgagaaattggaaggtctggcctgcattcccacttggcaaccattggtggcactgggaagaggccacccatttacctggcacctgtgctgtctagtgtctcacatttatcactgctcttgccttcc

SEQ ID NO: 477 - DNA, 2432 bp, Homo Sapiens
ctggctcagcacctgagcgtccacttacaggacactcacctgcagaggtgccctgagcgccattgtgggttaagggactttctcccctctggagacagtccctgagaagctgaaggtcttgggggcctctcaccaaatgtctttgggaggtgggaaaacatcaaatgcgggtgtggcttccctggaacagctctgtgtggggactcaggagccaagtcccccagcacacgcctctaacactttcagtaggggccacctctctggagccacgggtggctgccaacaccctgtggttcccagcaggcaccacccaggcaagagagagaacaggccggggaacaatgggctggcctggccgcaagcgctggggcagatcacagaccggatggcctaagctcatgccctggggccacctctgactccctgcaagtgtggcaagggtcccttttggacaccttgagaagctgcagctgggagaggaccacccgcctgtctggatgtccagcccaggtgtcagggtccaaatgaccagtcccaggccgcagcccttaccacccgccctggctgcaggggctcccagaagccaccaagggcctggctcggccttgcctatccgcatctgagcttcagtttcctcatctgctcaagaagggaggtgaatactgattaaattatgcaaactcttagcggcaggattaggtgtggctgggacagccaaggctccccagggtggtggcatctctggagcccggggatgggccctgtctcccttccgggccccccgctgggcttgggtaccttctctccccttcctccttcctccctccagaggggacccctgcagagctgcctccgccccagggctcagcctgtgtctgacccaaacagctcctgcctccccctgaggatgagttgggtgcacctccttcctgcaggaagatgagggctagagatggaggtctatgtcagggccacagagtctggaatcctccctggagctaaaacagccctgccttattcaccctgcgcatcccatcctctgcttcagccccgccgggctcgccctgcatgcaaggcggggctgggacccagggtctgagcttcgccctctggacatccggctcatcgcctgccaaaggtcctgtggctggaggctccggcctcctcaccctcccacagggtcccagggccgatccaggcctgcgggccaggaatgtgctaacggggcaacttgggccttgctggtccacgcaggcacctgtggactttgagaggggactgggtggggaggggcggggaggggcggggcggggcggtgccgcagagtgcagggcgggcggggccaggccagcagggagtgagcttgtctggccgcctcgcctcggagccactgcactgctggctgcagacacaggctgcaccatgaagccagccctcctgccctgggccctgctgctgctggcgacagccctcggcccgggccccggacccacagcaggtatgcctccctgcccttctgtgtccccgtctgtctgtccatctgtctgcagccaggcctgggctgacatccctctgggctcagcctctgtccatctgtcaggccatctgtggctgtgctaggggtgatgggaagaaattctgagggtccatgtggaggggcagcccatggggatgggaggtctgagccgggcccaccctaaacctgctggtagctaggagggaggcgggggagaccagcagaggcctccgcctgtgtccccagccctgacagggcgggatcacggagggggagccaggattgtgggtcctcatcagggtggggctgaatccaggaaagtctagggaaagccccgaactccagaaccaggacactggtcccaggctgccccccgtcccccaccccatttcccatcgaccctcttgccacttatctcacttgcaagcatctctcggcctcctcccccgacccctgtgcgccaccaaatccttggccagtacatatttattgttgcttttaagtgccaggcactgcacttggtgaagtggggccagcggggtggctcaggcccaggcctggccctcgactggcctcttttgatgggggatggggaagggccagggaagtgcaattccagcctgggtgcatgcacctgccccagtccctccctgcaacccttccttcatgccagcccctggaaatatggccttgcccaccggtcttatggcccataggagaagttttgggcccggcgcccacagccccttgtggtgtgcacccccacttccctttccccactgctgggacccctgcttgaaatgtccctcctctccccagaaaggaggggagcggccctggccttctgccctgagcacggagctctctttggggtctcaattgcagcccctgggagagcgagaagtgtcacgttcag

SEQ ID NO: 478 - DNA, 2359 bp, Homo Sapiens
aggacggacacctcggaccctcccctgcacccagtgctgtagggagcaacttcagccctgggcctgggatgaatgccctcgccagcctggggccaggagacaggctctccctggctcagcacctgagcgtccacttacaggacactcacctgcagaggtgccctgagcgccattgtgggttaagggactttctcccctctggagacagtccctgagaagctgaaggtcttgggggcctctcaccaaatgtctttgggaggtgggaaaacatcaaatgcgggtgtggcttccctggaacagctctgtgtggggactcaggagccaagtcccccagcacacgcctctaacactttcagtaggggccacctctctggagccacgggtggctgccaacaccctgtggttcccagcaggcaccacccaggcaagagagagaacaggccggggaacaatgggctggcctggccgcaagcgctggggcagatcacagaccggatggcctaagctcatgccctggggccacctctgactccctgcaagtgtggcaagggtcccttttggacaccttgagaagctgcagctgggagaggaccacccgcctgtctggatgtccagcccaggtgtcagggtccaaatgaccagtcccaggccgcagcccttaccacccgccctggctgcaggggctcccagaagccaccaagggcctggctcggccttgcctatccgcatctgagcttcagtttcctcatctgctcaagaagggaggtgaatactgattaaattatgcaaactcttagcggcaggattaggtgtggctgggacagccaaggctccccagggtggtggcatctctggagcccggggatgggccctgtctcccttccgggccccccgctgggcttgggtaccttctctccccttcctccttcctccctccagaggggacccctgcagagctgcctccgccccagggctcagcctgtgtctgacccaaacagctcctgcctccccctgaggatgagttgggtgcacctccttcctgcaggaagatgagggctagagatggaggtctatgtcagggccacagagtctggaatcctccctggagctaaaacagccctgccttattcaccctgcgcatcccatcctctgcttcagccccgccgggctcgccctgcatgcaaggcggggctgggacccagggtctgagcttcgccctctggacatccggctcatcgcctgccaaaggtcctgtggctggaggctccggcctcctcaccctcccacagggtcccagggccgatccaggcctgcgggccaggaatgtgctaacggggcaacttgggccttgctggtccacgcaggcacctgtggactttgagaggggactgggtggggaggggcggggaggggcggggcggggcggtgccgcagagtgcagggcgggcggggccaggccagcagggagtgagcttgtctggccgcctcgcctcggagccactgcactgctggctgcagacacaggctgcaccatgaagccagccctcctgccctgggccctgctgctgctggcgacagccctcggcccgggccccggacccacagcaggtatgcctccctgcccttctgtgtccccgtctgtctgtccatctgtctgcagccaggcctgggctgacatccctctgggctcagcctctgtccatctgtcaggccatctgtggctgtgctaggggtgatgggaagaaattctgagggtccatgtggaggggcagcccatggggatgggaggtctgagccgggcccaccctaaacctgctggtagctaggagggaggcgggggagaccagcagaggcctccgcctgtgtccccagccctgacagggcgggatcacggagggggagccaggattgtgggtcctcatcagggtggggctgaatccaggaaagtctagggaaagccccgaactccagaaccaggacactggtcccaggctgccccccgtcccccaccccatttcccatcgaccctcttgccacttatctcacttgcaagcatctctcggcctcctcccccgacccctgtgcgccaccaaatccttggccagtacatatttattgttgcttttaagtgccaggcactgcacttggtgaagtggggccagcggggtggctcaggcccaggcctggccctcgactggcctcttttgatgggggatggggaagggccagggaagtgcaattccagcctgggtgcatgcacctgccccagtccctccctgcaacccttccttcatgccagcccctggaaatatggccttgcccaccggtcttatggcccataggagaagttttgggcccg

SEQ ID NO: 479 - DNA, 2436 bp, Homo Sapiens
tattgggtgggtaccattaaaggatcatttttaaataaaggcaaaatcacgactctcgtgcaattacagaatgaacacccatcagagattttatttaaagcattaattaatgacagaacaaggaaaatggcacaactggttcaaaggagaatttaagcaccacacatagacatgcaggcaaacacaaatgctggcattcatttacaagtagatacgaaatcggtcaataacttgaggataataatcaattgcattccactggacacaattcatttgcatttctatggcaccaagcatttgtattactattggtttttttcttaagcttcgagagttaggaaatagctcaaagatgatgaaaggcatagatatcctggagagttatgctagacagaacattcagcaatctttatagattttttggcccatatcaacatcttttataattttttctgacagtacagtgcagccaccaccatcccagagaagaagtgaggggctatgttgtgtttcctggacctctgtttcttaatctgcaaaatgggcatgataagagcctttgacaatccagagacatgaggtcctgctgggacaagtaccgtgggaaacgtgaagtgctaagggacagtgtcccaaacctcagtgtggccctccttcctgatttagttcacatccttgttctaccttggaagatttattttttttcctttataccaactttgatttgataatacccttgaaatcagagaatgaggtgctgattctgtatgttttttttttctaatacatatgaatatagacaaaaagccattgagataagaaaggtaagttcattcttgtaccaactaatccagtgctctgtgggaagtacaggattaggaagaaattaaatgatagcctacaaacacacacacacacacacacacacacacacacacactccactaaccaccaccaccaccaccgccgccaccaccaatgtattctgcaaattcatatacaatttgcaaacctcctcctgaaataagagagagagggcaattgaaactatctaaggcagcacttggaacacgcaggccaaagactgagccagggagggattgttatcacatgggctgtggggaggcagagctcccctgtgtccccgagagcacccctccccggggccccaccagcccccaactcgcctctcgaattcccacctctccccttgctctgcgcctttggaaacccagacagcggccccactcccgtgattcatccagcaggaatgtgggagttctcgaattgctccagctaaagccttttaattccccttcggtgatgaatgggtgaggccctcaaatgaaatgtggaggctcccagtcccagcccgcggccctccccctcctcggcgtaattatttctgtgcagaacatgtcaagtgccctgcttcccgggaacttgtttcgcatgcaaacatttggtgattaagcgaggcttacttaattaagcactttgtaatgactcttaaaccaaagaacagtggattaggagtccagttcgtgctggtgatgggaaaggcagcttcatatcacaaggaggcagacagtgatctggtgtggggaggcggccgggccaagcggggcagagtaggcgctctgggaactctgctagaatcactcattcattcattcaatcaatttatttttggagcacttcttggagccagagtagctggtgaacaataataataataataatagggccaggcactgtgctaataagtctgctgaataacaagagtgaggaggagccagagatagttattgagagctgactctactaggcatgaactgctagtagtagtgacggcaataataagcattttcattgcagcagcaaatccttgaataggattttgctgtggccctgcgtgccctgaaactgctgggtttctgccatggacttggcctttggaaacagcccccatctttgttgctgtcttactgactcactggcttctcacccaccagtggctcacttcccacatctgtgtaatgggtagttggatctagatcttctctaagatgcttttgggtcttaggagcctagggtgtctcctctgcttctgggggccacaggaatggtggcgccactttgggggcctcagctgcaatattgcagaaggcttcagagcccagccctacacagctccaggacagagcaagggtgactctcagctcagaccttcataaattgtgggaccttcaccaggtagcttgtcctctctgacggacaagtccttcacctctcaattgaaataacccttccatctgcttccagggctcctgtaagggaatcacacagactcatggacatagatgccctttgaaaaccatctacctggtggcagaagccatcatgtctcaaacttggacccacgaacacacccca

SEQ ID NO: 480 - DNA, 2391 bp, Homo Sapiens
ctacctctggcaccctcagggctgcccacgttgcacccctgtcctgcctgcctccaccatgagcagctgcactgttgagggttacctgggggaacaagctggctggcggtcaggtacttcttatctgagaacatggcggtccaaaatttaatcatgatgcttatgtcttcacgcagccgcttctctccttgagtaggaaactttgggggacagcttcaaacaaccataagaggacaacggctgagtgtctggagtcagggactagaggccagtcacacaaagcagtgagaaggtgatgcagacaatttcttaatgacaaaaggtcagcccaaagccagtcattagcaaggatgatctggcccattcccatgggaaggtgtggtggctcgggagccctcttatgccctcctccctcactgcccacagcagcccctacagctttccactgaagctgcacttgtggcagatcagggcaaggaagctgcactcacacaacagcacagcctatgggtgcagagccccaggcagtgggtgtttgcaattcttcgtgcaataagccttcacattaacagggaaattaaatggacgcacttaatctcctaaatcagttgaactgagggaaaatttgcctacatctcgctgggaggctagctctaagtacacgggacacatgcacagggctgaaaggtatttaaatccacagggccagggatactgaaggaggaggttggtgagcacaactgggcaactgtgtattcctgtgagtgacttcctgggggtctggggcgatggagcacttggaggggctgggccgtccctggatgctgcacagcacatcttgggggagtacctgaagtagtcaaaggcagtggagtagatcttctcgcgaagcacattgcggatggttgcatttggaaccacatcggcatgcaggagggacagccccagggtcagcagcctgtgagggagccccggacccggtcagagcaggagcctggcctggggccaagttcaccttatggactctcttccctgcccttccaggagcagctcactgaaatgtgttccccgtctacagaagtaccgtgatacacagacgccccatgacacactgtacacaccaggggccctgtgctccccaggaagagggccctcacttgaagcggggcccgatggccgccacgtgccggttcatgctccccttggccctgccgatgttcagggacatggagcgctgcagcaggctggagaagatctccacttggtcagagctgcagtacttggcgatctcaaaccgctgcaccaggaactgagcgaaaagaggaagacgctgtggtggtggggctgagccgggctaaccctggggccggcagagacagctgaggaggggttctgggctgactggccgagcttgccgaaggccttgggctcggctacccccaccccaggaacagtcctggccccccaggtggagcaccccacagccttcgtgggggaacaggcacgtacgtcgatccagatgtagtggggggtcacttcggggggacagggtttgggttgacttgcttccgaggcagccagggggtctgcttcctttatctcagcagaaaacaggccaaatttctgctccactgtcatgtgccagcccctgccatctcccgcatgaactacaggtacagaaggaatgttagctcctctgtgaaacacaaaaaggggctactgtcaagttttctctaattaaaaaaaggaacacgtgctcactgaataagatttagaaaccaagaaaagtatgaagaaaaaattgaagatcgcctatagtcccacatcccagggtcatctgtgtcagtgcttggtgtattttctccagcctctcgaggctgcattctgttcaacccggttcaccgtgtggacattgcaggtgtgaggtggcagcacccgggatgtacctgatgccctgacaggcactgggtaggtgactcttctctataaccctgataaccctctgtggctgtgagcgggaagacccctctgtgggctgctgagctggcaagggcagaagagggttctggatccagggcctggctcctcctctccaccccacacagaccctacccgataccttcatcccgctaaccagattaggaaggcccatggagccgaggcgagcctgcagccaccatggccaggcctgggagcccagggtcaggctgctcccatggcccagtcatgctcagccaggtccccattccgtgggggggcatgaggggtgcccagagggagcagcatggtgcccgggagacacctgggtgctgcagagagtaagaggtgcagctcacacatggaaagcccccatgatttctgggtgtttttacaaggagaccaacaaacagc

SEQ ID NO: 481 - DNA, 2258 bp, Homo Sapiens
ggctgaagtgcaatgacatgatcatagctcattgcaaccttgaactcctgggttcaagtgatcctcccgactcagcctctcaaagtgctaggattacaggcatgagccactgcatctggcacgtggacatttctgacttatctcaactagggaaggtactcaataaatgctaattcccttcttcctccccttaattatttgacttcagtaccccaggaaatgaggactgggatattggatggtttgggagaggaggaaagaggtgtccagggaaaaggaagaaattgggaaatagaagaccacggacaaataaaagaggaggggttaattcagaatagggaagacgggccaggcgcaggggctcacacctgtaatcccagcactttgggaagccgagacaggcggatcacgaggtcaggagttcgagaccagccttgccaatatggtgaaaccccgtctctactaaaaatacaaaaattacctgggcgtggtggcactcaactgtagtcccagctgctcaggaggctgaggcagaagaatcgcttgaacctgggaggcggaggttgcagtgagctgagatcgtgtcactgcactccagcctgggcaacagagcaagactccatctcaaaaataaaaaaaaagaaaagaaaagaatagagaagatgattttaatcatcagagctttccaataaaggcaggctctggctgcttgggggaggttgagagcctcctgtcattagaggtatgcaagtagaggctgagggattgtgagccacacagatgtgtttgtgaggactcgcaatggccaggaggtagattccttcactcagcaaactttgggagagggctgtccttgcctggtcctgtaatggggcagggaagccaaggtgaataggacaccatccctggccccagggagcgcccagcccaggaaataagcaaatcgctgagatccttttactctgcagttctgtgctttgaagcatccaagccttggagggagttggctggggattttcagtgtgcgccttttggtattgatccactgaagttggagctggctggggaatggcaggaggacgccgcagtgttattagtgcggaggacacgctgtaatctgtcagtgtcaccccggttgcagctggccaggaaccatcctgctgttaacgcctcccttcccagcagccatggagcacacaacttgtacagcacctgccagtgcctccacctctccttgtaggagggagagtgtggatatttattctttttctgcatctccctagcatgagtcctcgtctccaatcacactaatttattcagtgttttccaacacaccttgggcattcctacctctgtaccttcagttaccagaattccctaccagcggtggtcactcctgtccattcatccatccacctgtccatccatccaatcatccatccatccacccacctatccattcaatcatccatccattcatccgtcatccatccatccccccattcatccattcaatcatccatccatccattcatccatccacccacccaccttccatccattcaactttgcaatccgcttcagttcaattcaattcaattcacctttattcaactcataaggttactgggctttgccatgtaccacacacatgtgataagtgaggcatgcctctgccctcaaggagcccatgggaagaatcctccccattctccatggccagctttgcatctcacctctgttaatcctttgccatgcccttcagcagaagcaacggactctgaagggctgtcctgtgaggagagttcagttctggctttcatgaattgcagaggacagagctcagacaaggagagaggcaaagggtggggaggaggtgagagtgagatgagctagtgggacggggattttggctttgtggagggagctgcttccagttagctgtgagtactcagcagtgtattgggggatgaagggaaagagaagggggcaaggaaaccactattggagaagtgggttagtgtggcggtgaggaggtgagctctgcagccaatggactacctggcttattgtctcagctccaccatattcctgctgtgtgaacctgggcacatatcttaacatctctgagcctccatgtcctcatttgtaaaatgaggataataagacctatctcacaatgttgcctttagcattaacacatgcagtgcttaaattaatgcgtggcacaaagggagagcttaatagattccagcttt

SEQ ID NO: 482 - DNA, 2486 bp, Homo Sapiens
agaataatagcaagatagtttgaatttgtcttcttctctcacaacaatctaaaaattaacatgatcccatttatatgaaatatctagaaatatatctgtacatgtggacattcccatcgcacacctcccatccaggctgtcctaaagtggcatctcctcttcttctgctcatgttctccccctctcctcacctctcctgctgacacgtggctcctccctgccttcctctccagtagccccagcagatcaggcccaaccagtcaacaagctcctggacttggggaacaaaagtacatcttcttggatttctgaggacttgccctgccagggtgtctttctcaatccaatctctccttcccggcagtccacttctcctagatcctgtaatttatctaatcttattcatctgtatctacttcgtggacttccttacatcttcacctgaacaccaggaatcttcaggtcatgcccatatgcccttggttctcctgtagtcccttcttccttcttcccctgtgatgccaccaagtcgaagtctcttctcagaccctggagtgcagcagggacttctctggtctctgccccagggattaagggggtggaagagtggactcctgtgcccttcctatgcctgtgttttcatcagggttagctgcaaaaggtagggattaggctgtctaggtagggattatggcattaggtagggattatggcatttccagagctgagctctatgcccagcaaaagatacgtgctcagcaactacttgacagagacctacctcttatcacatgggacacattatactggacccaggatggggctgaactgggagaggtagctgtggacctgctcctcgctctgccctcaccctaagagctgatggggcatccaccaggaagagcattcctgggcagggagagggccatgagcagccttgtcctgtatgtgagacacagctcagcccggtcacaagatccagatgactatgactgcaattcaggggaagtagagaatgaagattgaccagaataaccctctgggaatgtgccctgggcctcctagagggaagagcttcccttctattcagcgctgcaggatccacagaggaaggagagccctggccaccagggaggagccacatgagaggacccggtgtccccacaaatgggaacgtgagtccatgaaagtcggtccctgctctgggtttgattgtgacctatgaggacattgtgtagtcaccacctgagtcctctacaataaacagtgagagcgccacggacagattcactcccgaggagcccagtaaagtgggaggactgaggtcacagggagaagacacaggcaccacctggcctggccctgacagggggcagtggacagaacagtgcggaggcagtggggtctctagaggctctggtcaccttgtcataccatggtttgtctcggtctggacactagagggcacttggggatcattcctgagaagactgaggttgatcagagcagaaccagccacctgtcctgcctagtgtcctctgctcagggctcacagctgcgtcctttacacccgtgggaccacacagccccacccctgccaccccctgacatcctcaggcatagggacctgacccagggcccagggtgggattagaaagctgggggtctgatttgcatggatggaccctcccactctcagagtatgaagaggggcagggagagatttggggaggctctgcttcagctgtgggcacaagaggcagcactcaggacaatctccagcatggcctggtctcctctcctcctcactctcctcgctcactgcacaggtgactggatacaggtccaggggaggggccctgggaagcctatggattcttgctttctcctgttgtctctagaagccgaataatgatgcctgtgtctctcccacttccagggtcctgggcccagtctgtgctgacgcagccgccctcagtgtctggggccccagggcagagggtcaccatctcctgcactgggagcagctccaacatcggggcaggttatgatgtacactggtaccagcagcttccaggaacagcccccaaactcctcatctatggtaacagcaatcggccctcaggggtccctgaccgattctctggctccaagtctggcacctcagcctccctggccatcactgggctccaggctgaggatgaggctgattattactgccagtcctatgacagcagcctgagtggttccacagtgctccaggcccggggggaactgagacaagaacccacttcctcctctgccaggagggtgagccccggcagctgctgctcaggcctggcctgtggcttctgcggctgctgcttccctcatggtcccaggggcatccagggccctgcctgggagtggaggctcctcctccccttctgtcctcagagtcaggaacagggaatccaggaagcagaatatccctctcccttaacttg

SEQ ID NO: 483 - DNA, 2411 bp, Homo Sapiens
tgtggacattcccatcgcacacctcccatccaggctgtcctaaagtggcatctcctcttcttctgctcatgttctccccctctcctcacctctcctgctgacacgtggctcctccctgccttcctctccagtagccccagcagatcaggcccaaccagtcaacaagctcctggacttggggaacaaaagtacatcttcttggatttctgaggacttgccctgccagggtgtctttctcaatccaatctctccttcccggcagtccacttctcctagatcctgtaatttatctaatcttattcatctgtatctacttcgtggacttccttacatcttcacctgaacaccaggaatcttcaggtcatgcccatatgcccttggttctcctgtagtcccttcttccttcttcccctgtgatgccaccaagtcgaagtctcttctcagaccctggagtgcagcagggacttctctggtctctgccccagggattaagggggtggaagagtggactcctgtgcccttcctatgcctgtgttttcatcagggttagctgcaaaaggtagggattaggctgtctaggtagggattatggcattaggtagggattatggcatttccagagctgagctctatgcccagcaaaagatacgtgctcagcaactacttgacagagacctacctcttatcacatgggacacattatactggacccaggatggggctgaactgggagaggtagctgtggacctgctcctcgctctgccctcaccctaagagctgatggggcatccaccaggaagagcattcctgggcagggagagggccatgagcagccttgtcctgtatgtgagacacagctcagcccggtcacaagatccagatgactatgactgcaattcaggggaagtagagaatgaagattgaccagaataaccctctgggaatgtgccctgggcctcctagagggaagagcttcccttctattcagcgctgcaggatccacagaggaaggagagccctggccaccagggaggagccacatgagaggacccggtgtccccacaaatgggaacgtgagtccatgaaagtcggtccctgctctgggtttgattgtgacctatgaggacattgtgtagtcaccacctgagtcctctacaataaacagtgagagcgccacggacagattcactcccgaggagcccagtaaagtgggaggactgaggtcacagggagaagacacaggcaccacctggcctggccctgacagggggcagtggacagaacagtgcggaggcagtggggtctctagaggctctggtcaccttgtcataccatggtttgtctcggtctggacactagagggcacttggggatcattcctgagaagactgaggttgatcagagcagaaccagccacctgtcctgcctagtgtcctctgctcagggctcacagctgcgtcctttacacccgtgggaccacacagccccacccctgccaccccctgacatcctcaggcatagggacctgacccagggcccagggtgggattagaaagctgggggtctgatttgcatggatggaccctcccactctcagagtatgaagaggggcagggagagatttggggaggctctgcttcagctgtgggcacaagaggcagcactcaggacaatctccagcatggcctggtctcctctcctcctcactctcctcgctcactgcacaggtgactggatacaggtccaggggaggggccctgggaagcctatggattcttgctttctcctgttgtctctagaagccgaataatgatgcctgtgtctctcccacttccagggtcctgggcccagtctgtgctgacgcagccgccctcagtgtctggggccccagggcagagggtcaccatctcctgcactgggagcagctccaacatcggggcaggttatgatgtacactggtaccagcagcttccaggaacagcccccaaactcctcatctatggtaacagcaatcggccctcaggggtccctgaccgattctctggctccaagtctggcacctcagcctccctggccatcactgggctccaggctgaggatgaggctgattattactgccagtcctatgacagcagcctgagtggttccacagtgctccaggcccggggggaactgagacaagaacccacttcctcctctgccaggagggtgagccccggcagctgctgctcaggcctggcctgtggcttctgcggctgctgcttccctcatggtcccaggggcatccagggccctgcctgggagtggaggctcctcctccccttctgtcctcagagtcaggaacagggaatccaggaagcagaatatccctctcccttaacttgggacacaaagtctctacactgaagttc

SEQ ID NO: 484 - DNA, 2386 bp, Homo Sapiens
ctgatggagaaatcctacccgaaatcccaaagcagggcagggacattcccaccagatacttttgcagcctttgtcctgtgggacgaagcaagggatgatgacacactcgcctgcccacccggaagtgagtctcaggtcattgcatcagaagggtgacaacctaacacaagtcattgctaagcaactctcgcgtgctcagtattcacattttcttgcttcattctgaccactacactgcacaggagccattattctcaccccccgcctccatttacagatgaggacaccgagacccagagagttttttgttttgttttgttttttgagatggagtcttgctctgtcacccaggctggagtgcaatggcacgatctcagctcactgcaacctctgcctcctgggttcaagagattcccttgcctcagcctcctgagtagctgggactacaggcacctgccaccacacccagctaattttgtattagagatggggtttcaccatgttggccaggctggtctccaactcctgacctcgtgatccacctgcctcagcctcccaaagtgctgggattacaggcatgagccaccgcgcctggcctgttttattttttgttttgtttgtttgttttgttttgttttcagagatagggtctggctttgttttccaggttagggtgcagtggtgcgaccatagctcactgtagcctcaaactcctgggctcaagcaatcctctcgcctcagcctaccaggaactggaactacaaatgcatgccaccatccccagctaatatttttcctttttggaaaaatgaagtctcactatgttgcccaggctggtctcaaactcctgggctcaagtgatcctcctgcagtgctgggattacaggcatgagccactctgcccggccaatctcagagagttttgatgaagttacaaaattctgaccatggagccagaactcaaatctaggtatgtgaggtctgagcccaggcttccaccagggccactgtgctgcaactgccaccacttcctggcacctcaagtgacacccgagcatcattcaagggaaatggcccatatcccggcaattcccccacccgccccactttcttctctgaattagggacttcggcagagacagagccccagcagcctccacccgtcccctcgtgtcggccttgctcacccacggatgagtcagttggaatgtttggacatcccagctcagcggctgtggtaccaggagctgtcaggaggcgggaatgcagagaatgtggctcactgtgctcccgcccgcccaggctgaatccgcagagaggtttggaaggtgaatgacacaatgtttgtcaagggtttgggacgacaggtgcatgtgaagatgaggacaaagactgattcttttcttggggctgccagcacagtttcgcatccctcccacacatgtccgcattccaggcccagacactccgtgccctgggctcctatgaagggcaagaaaccactgattaggaagcaagaagaagaaaaagaaatgtcccaggctcttaaaagaaagagtgtttgacctctttacccaaatgccatcctgaaacacagcttttttgtttttcgttttttttttcttttagagacagggtcttgctctgtcacccaggctggagtgcagtggcacgctcacagctcactgcagcttccaactcctgggctcaagcgatcctcccgcctcagcctcccaaagcactgggattacaggcgtgagccactgcaccaggccctgaaacactgctttgattctgtctctctcctactcagatgcctttgtgcaggccgacaatcttttctggtgtcttctctgtgcggggctgtgtctgggcactgagtagacagtagtgaagaagatgatgatagtccttccccagggagtttcctttctggagagaggttcagataattaaaaagtgagtgcgctcacgcctgtaatcccagcactttgggaggccaaggcggatggatcacaaggtcaggagttcgagaccagcctggccaatatggtgaaaccccgtctctactaaaaatacaaaaattagccagccatgatggtgggcacctgtaatcccagctactcaggaggctgagacaggagaatcgcttgaactcgagaggcggaggttgcagtgagccgagattgcgccattgcactccagcctggacgacagagcgagactctgtctcaaaaaagaaaagtgagtgtgtgattacagatgagcagtgtgggggaggaaacaaactaggtctatgatggaaattaggggaatggggttcctttaaaatgaaatcaaactccgagagctgcgtgctgcctaaatgtgtcacctcactgcccac

SEQ ID NO: 485 - DNA, 2500 bp, Homo Sapiens
cctgaatgaggtcactgaatgtgcacgggaggctcagcgctgccccactccagcctgatggagaaatcctacccgaaatcccaaagcagggcagggacattcccaccagatacttttgcagcctttgtcctgtgggacgaagcaagggatgatgacacactcgcctgcccacccggaagtgagtctcaggtcattgcatcagaagggtgacaacctaacacaagtcattgctaagcaactctcgcgtgctcagtattcacattttcttgcttcattctgaccactacactgcacaggagccattattctcaccccccgcctccatttacagatgaggacaccgagacccagagagttttttgttttgttttgttttttgagatggagtcttgctctgtcacccaggctggagtgcaatggcacgatctcagctcactgcaacctctgcctcctgggttcaagagattcccttgcctcagcctcctgagtagctgggactacaggcacctgccaccacacccagctaattttgtattagagatggggtttcaccatgttggccaggctggtctccaactcctgacctcgtgatccacctgcctcagcctcccaaagtgctgggattacaggcatgagccaccgcgcctggcctgttttattttttgttttgtttgtttgttttgttttgttttcagagatagggtctggctttgttttccaggttagggtgcagtggtgcgaccatagctcactgtagcctcaaactcctgggctcaagcaatcctctcgcctcagcctaccaggaactggaactacaaatgcatgccaccatccccagctaatatttttcctttttggaaaaatgaagtctcactatgttgcccaggctggtctcaaactcctgggctcaagtgatcctcctgcagtgctgggattacaggcatgagccactctgcccggccaatctcagagagttttgatgaagttacaaaattctgaccatggagccagaactcaaatctaggtatgtgaggtctgagcccaggcttccaccagggccactgtgctgcaactgccaccacttcctggcacctcaagtgacacccgagcatcattcaagggaaatggcccatatcccggcaattcccccacccgccccactttcttctctgaattagggacttcggcagagacagagccccagcagcctccacccgtcccctcgtgtcggccttgctcacccacggatgagtcagttggaatgtttggacatcccagctcagcggctgtggtaccaggagctgtcaggaggcgggaatgcagagaatgtggctcactgtgctcccgcccgcccaggctgaatccgcagagaggtttggaaggtgaatgacacaatgtttgtcaagggtttgggacgacaggtgcatgtgaagatgaggacaaagactgattcttttcttggggctgccagcacagtttcgcatccctcccacacatgtccgcattccaggcccagacactccgtgccctgggctcctatgaagggcaagaaaccactgattaggaagcaagaagaagaaaaagaaatgtcccaggctcttaaaagaaagagtgtttgacctctttacccaaatgccatcctgaaacacagcttttttgtttttcgttttttttttcttttagagacagggtcttgctctgtcacccaggctggagtgcagtggcacgctcacagctcactgcagcttccaactcctgggctcaagcgatcctcccgcctcagcctcccaaagcactgggattacaggcgtgagccactgcaccaggccctgaaacactgctttgattctgtctctctcctactcagatgcctttgtgcaggccgacaatcttttctggtgtcttctctgtgcggggctgtgtctgggcactgagtagacagtagtgaagaagatgatgatagtccttccccagggagtttcctttctggagagaggttcagataattaaaaagtgagtgcgctcacgcctgtaatcccagcactttgggaggccaaggcggatggatcacaaggtcaggagttcgagaccagcctggccaatatggtgaaaccccgtctctactaaaaatacaaaaattagccagccatgatggtgggcacctgtaatcccagctactcaggaggctgagacaggagaatcgcttgaactcgagaggcggaggttgcagtgagccgagattgcgccattgcactccagcctggacgacagagcgagactctgtctcaaaaaagaaaagtgagtgtgtgattacagatgagcagtgtgggggaggaaacaaactaggtctatgatggaaattaggggaatggggttcctttaaaatgaaatcaaactccgagagctgcgtgctgcctaaatgtgtcacctcactgcccactgaacacaccatatttttctgcctcactgcctcagttcctgtaatctccccatccgggtt

SEQ ID NO: 486 - DNA, 2340 bp, Homo Sapiens
gctctatcaagttttttagaggggaaaaatcttaggctgggaggggaggtgacttgcccagagtcacacagctcttggagggcagaggggaggccaacatctgcccttgtgactctgatattgaagcaaaaatgggtgattttaataatccaacagtgtccaggtttgattctgcttctacaaacacagagacctaagctctcactcctgtagttatactcacaattccacagtgtggcttttgaatctcatgattgcaaagctggcatcatgccacaggtaccattctgcaatgcgaccttctcactcccctgtctcagccatgtttcccattagggacacagcacagcctgtttcttctctatcagctcagaggtctgaacagagggacagaggtgagggccagagacgtgaagtcctatgatctgcctgctcagcctcctgacacgggaccctggcaagtcattcccctcccagggcctcagtttccccacagggcctggcacaagtaggtgctcagactcagggtgagtgagacaacctctgagttccttgtgtctcaaaagaaatctgttgttcccattgggcttcagcagcagcaccctggggccagcctgggtgtggcccggccacaaggacatgccgggctccaggtcacctcccctcctccaccttctttgattccttcaaatttcccaaagagatgggcacccccaacacctacctttcttctggggtcagctggccgtgtctgagggtgtcagaaccagagctgagcccggggagctttgtgaacccatctaagctgttttccccacctctctctacagtttacccgcccagcaggagggagggagcaatcagactcaagcctgggtgcaaatcccggctctgccactgctttcctgtctgatctgaaccagctacctaacctctctgagcttatctacaaaagctgaatgatccttcccttatagagctattgcaagaataaggacatgggggtagatcacactatccccaacttaccaagggatcttcctctgacagagactgagcaagatccaactgttctgagctgtgtggatcccacgtccagctgtgcatctgtgtaataaccagacacgtcctccggcctcccagatataccctggaattcgaaagggaaagtgaaagtcacaacttcccagcagctcatgaccaagcacagtaaacacgctgctccccagcaccacctgcagtccaggcccagcctccttgctgctgcacttagaggagcagccgcagaccagacatccgggtccctctcatccaacccacctgcctcacatcctcaggattcaaggtctgctgtgtcagctgcccatgtctcaggcagtcagaaccagagttgagcctggggagttttttgaacccatctgagccgcttgccccccaacccccgccccgatctctgcagtttaagggcacagcaggtgggggagagaagtcagactcaagcctcagtgcaattccaggctctgcccctgttttactgtctgatctgaactagttacctaacctttctgagctcaagaaagacctgccactgactgaccgtggggctctccagattactccccgtccttccgttcccccacattcctcagatgcctgccttactcccacacatgccatcagcatcagcacagtcccccacacatgctgggtggatgcttattgcatatttattgtaatgcttctgaggttatgttttctgttatgtttttgatatagagtcttgctctgtagcccaggctggagagcagtggcacaatcatagctacttcaagtggcacaatcaagccatcctcccatctcagcttccgagtagctgggattacaggtgcctgccactacacccagctaattttttgtaattttagtagagatggggtttcaccatcttggccaggctggtcttgaactcctgacctcaagtgatccacctgccttggcctcccaaagtgctgggattacaggtgtgagccacggcgcccagcccattgtatccttcttgtgactttgtgtcttcatagcttagctcctactaataaatgagaacatacaatatttggttttccattcctgagttacttcactcagaataatggtgtccaacttcatccagattgttacggatgccattattcccttcctttttacagctgagtaatattccatggcatatacatatataggggtgtgtgtgtgtgtgtgtgtgtgtgtatatacacacacattttcttcatccacttgttggctgatgagcatttaggttggttccatattttttcggtt

SEQ ID NO: 487 - DNA, 2495 bp, Homo Sapiens
ggtcctatgattagtcctgttttacatgggaggaaaccgaggctcagaaaagtgacctggttagtccctttgcctctgcccaatggctcagtgaggacttgctgactgtgagaatgactccagttcagagcatgttctcaggctgtggtgaggctctggtccagggtaggctcggaagcagcctgtcctcagactgatatgatgccagctcccaggtggcaggagcataatggtaccccccagaaaggagggaggcatccagtccgggtccttgagtctttttttgtttgtttgtttaaatagagacaagccttgctctgttgcccaggctggagtctggagtgcagtggaatgactatggcttactgcagccttcacctcctgggctaaagtgatcctctcacctcagcctcttgagtagctgggactacaggcacacaccaccacgcctggctaattttttaattacttctggtagagacagggtctcgctatgttgcccgggctggtcttgaactcctggcctcaagtgattgtcccaccttggcctcccaaagcgctaggatgatagatcacctcccctgcccagctggcccctctgttctcagcctgtgtcaggcatggcctctcccccatcgctgggctgttccccggcccccaggagcctccccctcgctgctcactggactatcgtctgttttggagtctcctttgggtcccaggctccagcccctgcgttggagttggtggcttctccagagcctgtggtgaaggctgtgcctcagggcaggccagggaggggacccatggggacagatcgctgaagcgacaagcattcataatgcagggaccactgctgggctctcagacaagccccagaggaccagttcctggcagtggccacattgccacgtgtctcagagcccaccttgggagacccccttcctggagaaccccaggaagtccccagagcccctgcccgccagcctctgagaggcccagagggggcagagacttacctgaggccactgagctgctctgaatccccccttgcaccatcgggcccaaagactcacccctccatgccgcctggaactgctggtccagcctggaggcgcagcgcagggacaggctgtccccgcctggcaggagcccccctccacggcccgcaggcctggcagctgggacagggctgaatgggaggcattgtcggcagaccaggcaagccaggcttccccaggctgaggtgaagaaggggcgggcggcgggcgggagcagcggctggagttacagggcctcctgcctgccccagccgaggactgaggccccggcctgaatccttgggccagcccgacagggagggggcaccagcagctggcccgggagtcagcagtcctgggctccctcctgccatgtgggctgccctcccagaggctgcttcctagtctctgaaaaacacatcccattaataagtagctctgaggtcacagtgggggttcaggcccgcacctggcacacagtgggtgcttcagaacaggtgaccctttccttccgtttgtgcttacacattgacataaatagtttaatactggacacacaggattctagacactcatttttttcacttaacctcagattactgggagttatccaaattgactcttccgaatctcattattctgtggtatatagtattccattgtgtaaatgtatcacattgacttagccattcatcttggacattggctacctccaattttttgctatttacaaacaatattgcaaagaatatccaaatacgcatcttcccaagctcgtgtttgttttttaaataatacatccagaccatggccaatgttcatgtatcttgatttttcagattcctgcttctgatggaattgcatcttctactgtttgttcctttaattggaaacaggggtcaggcacagtggctcatgcctgtaatcccagcactttgggaggctgaggtgggaggatcacttgagcccaggagtttgagaccagcctgggcaacacagactctgtctcaagagaaaaaaaaaaggccgggcgcggtggctcacgcctgtaatcccagcactttgggaggcggaggcgggtggatcacgaggtcgagatcaagaccatcctggctaacacagtgaaaccctatctctactaaaagtacaaaaaattagccgggtgtggtggcaggcgcctgtagtcccagctacttgggaggctgaggcaggcaaatggcatgaacgcgagagccgagatggcgccactgcactctagcctgggcaacagagtgaaactgtctcaaaaaagaaaaaaaatatatacatatatatatatatatatatatatatatatatatatatatatatatatatgtatgtgtgtgtgtatacacttatgtgtgtatatatttatatataataaaaatataaatgtatatgtttatatatatttatatatgttaaacaatgaac

SEQ ID NO: 488 - DNA, 2492 bp, Homo Sapiens
caaaaacccctcagagcctcctcctttgggcccaggaaagtgccaatcaccctgagcctccctgccccccaccccccacgcagtggaggtcctatgattagtcctgttttacatgggaggaaaccgaggctcagaaaagtgacctggttagtccctttgcctctgcccaatggctcagtgaggacttgctgactgtgagaatgactccagttcagagcatgttctcaggctgtggtgaggctctggtccagggtaggctcggaagcagcctgtcctcagactgatatgatgccagctcccaggtggcaggagcataatggtaccccccagaaaggagggaggcatccagtccgggtccttgagtctttttttgtttgtttgtttaaatagagacaagccttgctctgttgcccaggctggagtctggagtgcagtggaatgactatggcttactgcagccttcacctcctgggctaaagtgatcctctcacctcagcctcttgagtagctgggactacaggcacacaccaccacgcctggctaattttttaattacttctggtagagacagggtctcgctatgttgcccgggctggtcttgaactcctggcctcaagtgattgtcccaccttggcctcccaaagcgctaggatgatagatcacctcccctgcccagctggcccctctgttctcagcctgtgtcaggcatggcctctcccccatcgctgggctgttccccggcccccaggagcctccccctcgctgctcactggactatcgtctgttttggagtctcctttgggtcccaggctccagcccctgcgttggagttggtggcttctccagagcctgtggtgaaggctgtgcctcagggcaggccagggaggggacccatggggacagatcgctgaagcgacaagcattcataatgcagggaccactgctgggctctcagacaagccccagaggaccagttcctggcagtggccacattgccacgtgtctcagagcccaccttgggagacccccttcctggagaaccccaggaagtccccagagcccctgcccgccagcctctgagaggcccagagggggcagagacttacctgaggccactgagctgctctgaatccccccttgcaccatcgggcccaaagactcacccctccatgccgcctggaactgctggtccagcctggaggcgcagcgcagggacaggctgtccccgcctggcaggagcccccctccacggcccgcaggcctggcagctgggacagggctgaatgggaggcattgtcggcagaccaggcaagccaggcttccccaggctgaggtgaagaaggggcgggcggcgggcgggagcagcggctggagttacagggcctcctgcctgccccagccgaggactgaggccccggcctgaatccttgggccagcccgacagggagggggcaccagcagctggcccgggagtcagcagtcctgggctccctcctgccatgtgggctgccctcccagaggctgcttcctagtctctgaaaaacacatcccattaataagtagctctgaggtcacagtgggggttcaggcccgcacctggcacacagtgggtgcttcagaacaggtgaccctttccttccgtttgtgcttacacattgacataaatagtttaatactggacacacaggattctagacactcatttttttcacttaacctcagattactgggagttatccaaattgactcttccgaatctcattattctgtggtatatagtattccattgtgtaaatgtatcacattgacttagccattcatcttggacattggctacctccaattttttgctatttacaaacaatattgcaaagaatatccaaatacgcatcttcccaagctcgtgtttgttttttaaataatacatccagaccatggccaatgttcatgtatcttgatttttcagattcctgcttctgatggaattgcatcttctactgtttgttcctttaattggaaacaggggtcaggcacagtggctcatgcctgtaatcccagcactttgggaggctgaggtgggaggatcacttgagcccaggagtttgagaccagcctgggcaacacagactctgtctcaagagaaaaaaaaaaggccgggcgcggtggctcacgcctgtaatcccagcactttgggaggcggaggcgggtggatcacgaggtcgagatcaagaccatcctggctaacacagtgaaaccctatctctactaaaagtacaaaaaattagccgggtgtggtggcaggcgcctgtagtcccagctacttgggaggctgaggcaggcaaatggcatgaacgcgagagccgagatggcgccactgcactctagcctgggcaacagagtgaaactgtctcaaaaaagaaaaaaaatatatacatatatatatatatatatatatatatatatatatatatatatatatatatgtatgtgtg

SEQ ID NO: 489 - DNA, 2354 bp, Homo Sapiens
aatacccatacctgttaggagctgcagtcactgactggcagcgtttcattcattcactgaatattggttgagcacttgcaatgtgccaggcacgctgctagccaaggaggcagtcattaaacatacagataaacaaacaaatgtgagatgacaatagttatgagtgctctgcagtagacgtgcagggacctgtgagagaatgtagtagggagggccttaatttagggtgtgtggtcagggaaggcctcgctaaagatgtagcttctaagctgagatgcaaaggaggcagtgaagagctttttccagcagagggaacaccatgagcataggccttggggcggacgtcttagaacattctagaaacggaaaggaggccagtgagaaaaagggagctcaggagcagaggctggggaaggctgcagggcctcaggggcattggaggcaggcagggcaaggactctggactttatcctgagcacagggtgatggggcaggagagtttaagcagggagggtgaaactcactctgattggcagccctgtgaaagaggattggctgggcatggagatctaaggatgaggaaaggatatcccagagtgccagggcgcgcaaaccaaacttcacactctaggaagacagaggccagaggaaccaggagggcttcctggaggaggtggcatttactctgggcctaagagatcacaggaaaatggaggccagcattctaggcctggggaagagtttgggcaaaggcttggcagtaagagaataaaggtggggcttgatgggccagaggataagtgactcctcaaggtcacaagacaccctgatggctgggaccccatctctgatggagcaaggcttctgatacccaactgaggcttggcgccaaggactgacatcaaggaagtggattcctgcaaacctggcacccgagggtccacttcctcaatttctgtgcagctgggaggtgaggtaagaggaagtgtgggccacaggctaggcccagagagcctggaggaggagcctctgccagactggagagaagcaggcctgagcctccccaaaggcagctcctggggactcccaggaccacaggctgagacgagacgcagggtggctggaggaagtgagaggtgaactcagcctgggactggctgggcgagactctccacctgctccctgggaccatcgcccaccatggctgtggcccagcagctgcgggccgagaggtgagtgccggggtgtggccgcccccgggccttctcactgctcctcataggccttagggacaaaggccagtccttctgcagtccctgatcaacatgagaggctggggttgagtcagaacccaaatactcagaaatgcaacctctcagaactgctttaacgaaactttgagctgtggctcaccaccctcagacacaaatgagaacactgaggctccaagagtgggagtgacttgcccacggtcacacaacgagtgaccggcagtgtctggagaggaatgcaggtgtcctgggtcccaggctggggccctttgcttcacatggtgatcagcaatgactttccatcttctgcgcaaacagaattcacagaatctggcttgttcttccgctaatcagggcttgcctcaaatgtcacctcctccaagaagccttcctgacagcccctacctcattgctgtctgaccctttgccctatttcccttttctgcctggttcttatattacaggaataatattatatgctcatttattattttttcttgaacgttggctcccccatgagaagcaagctccacgaggctgtgtccgttttgatcgctgctgtatcactaggaggtagctcatccctattgagcaccaggaccaagggctcaataaatgttgctgaatgaatgaataaatgaatgaatgaatgggtggatctttgagacggaaaaggtcttagattcttctagtccaaccttgccattgtacagattggaaatctgaggcccagggaggataagagacttactcagggtcacagagagtgactggcaaggttggggcttggagcacggcctcaccagcatctagcctcgtcgcttgggaagcattttcagaatttttcctcagtagccaggtctgagctctaagctgcgggggccctgaggacgcaaagcctggcccctgcaccccctggattggaacagcaggtgacctctgttacctacgtggaggccactcagggggtcaccagagacaggccaggctggtgtgtgcctacgcggggaacagaaggcccatgttggggcctggggctggaagtagaacctgaagcgtgggttggggcaagggcagcagaag

SEQ ID NO: 490 - DNA, 2282 bp, Homo Sapiens
tgcagtcactgactggcagcgtttcattcattcactgaatattggttgagcacttgcaatgtgccaggcacgctgctagccaaggaggcagtcattaaacatacagataaacaaacaaatgtgagatgacaatagttatgagtgctctgcagtagacgtgcagggacctgtgagagaatgtagtagggagggccttaatttagggtgtgtggtcagggaaggcctcgctaaagatgtagcttctaagctgagatgcaaaggaggcagtgaagagctttttccagcagagggaacaccatgagcataggccttggggcggacgtcttagaacattctagaaacggaaaggaggccagtgagaaaaagggagctcaggagcagaggctggggaaggctgcagggcctcaggggcattggaggcaggcagggcaaggactctggactttatcctgagcacagggtgatggggcaggagagtttaagcagggagggtgaaactcactctgattggcagccctgtgaaagaggattggctgggcatggagatctaaggatgaggaaaggatatcccagagtgccagggcgcgcaaaccaaacttcacactctaggaagacagaggccagaggaaccaggagggcttcctggaggaggtggcatttactctgggcctaagagatcacaggaaaatggaggccagcattctaggcctggggaagagtttgggcaaaggcttggcagtaagagaataaaggtggggcttgatgggccagaggataagtgactcctcaaggtcacaagacaccctgatggctgggaccccatctctgatggagcaaggcttctgatacccaactgaggcttggcgccaaggactgacatcaaggaagtggattcctgcaaacctggcacccgagggtccacttcctcaatttctgtgcagctgggaggtgaggtaagaggaagtgtgggccacaggctaggcccagagagcctggaggaggagcctctgccagactggagagaagcaggcctgagcctccccaaaggcagctcctggggactcccaggaccacaggctgagacgagacgcagggtggctggaggaagtgagaggtgaactcagcctgggactggctgggcgagactctccacctgctccctgggaccatcgcccaccatggctgtggcccagcagctgcgggccgagaggtgagtgccggggtgtggccgcccccgggccttctcactgctcctcataggccttagggacaaaggccagtccttctgcagtccctgatcaacatgagaggctggggttgagtcagaacccaaatactcagaaatgcaacctctcagaactgctttaacgaaactttgagctgtggctcaccaccctcagacacaaatgagaacactgaggctccaagagtgggagtgacttgcccacggtcacacaacgagtgaccggcagtgtctggagaggaatgcaggtgtcctgggtcccaggctggggccctttgcttcacatggtgatcagcaatgactttccatcttctgcgcaaacagaattcacagaatctggcttgttcttccgctaatcagggcttgcctcaaatgtcacctcctccaagaagccttcctgacagcccctacctcattgctgtctgaccctttgccctatttcccttttctgcctggttcttatattacaggaataatattatatgctcatttattattttttcttgaacgttggctcccccatgagaagcaagctccacgaggctgtgtccgttttgatcgctgctgtatcactaggaggtagctcatccctattgagcaccaggaccaagggctcaataaatgttgctgaatgaatgaataaatgaatgaatgaatgggtggatctttgagacggaaaaggtcttagattcttctagtccaaccttgccattgtacagattggaaatctgaggcccagggaggataagagacttactcagggtcacagagagtgactggcaaggttggggcttggagcacggcctcaccagcatctagcctcgtcgcttgggaagcattttcagaatttttcctcagtagccaggtctgagctctaagctgcgggggccctgaggacgcaaagcctggcccctgcaccccctggattggaacagcaggtgacctctgttacctacgtggaggccactcagggggtcaccagagacaggccaggctggtgtgtgcctacgcggggaacagaaggcccatgttggggcct

SEQ ID NO: 491 - DNA, 2398 bp, Homo Sapiens
cagagattaaacggaggcgtgccaagcacagtgccgggtatggagggggagctcaggagagctgccacgtgagctggggaagccaacgacatgatacatctggctccctccagccctgacagcctgcgattctgtgattccgagatcctagaatcatggcacgagattctgagactaacgcccctgcccctgcagccgaccgggaggtcacaggaaggcctccctcctgcctccctgggagtccccaccctctgcctccccagccccagcctcccaagttcatcctgggcagaggatgggcttccaggaccccacccttcgggacatcatccgggccccagcctccttacctgcccatggggtgagggcttccctccttgccgccaggctggttatcattctgctgtcccctctccctgcccagtccccaggtgcccccagggcactcctaactagggtccccacaaggcacccacttctagaccgcttgcgggctcaggttccctcccaggccctcggccacggctgtccacagagcctctcccatctggtctccggccctgacttcccaaccagagcctggtacgtcaccccccatctccaggacacatcctgggggggcaggggcaaggataggggggagaagcttcccagggtgaggaagagaagaggggagcaagggacacagaagccaatagaaatagaggggaaagggggtcgggaggaggtggagaaagagagagagagagaaagagggagggggagagagagagagggagagggagaggagaccgtgagtaggaggaaaggcagaatgagggggagtgatgagagatgcgtgacagggagaagacgagaaggaaagagaggagaggagacacgggtgagagggagagatgcagagagaggcaggagggaggaaggagaatgagggggtggcagggagagtgacagagagggactgtgccacagatggtgacatggagcccgtgaaggagggagtaagcagggaggggctgagggccggagagcaggtgtggggggtgggggcggggtgcaggttaagggaggaggcccggagagggagcaggaggggcgcagaccctgttaccggggagatttcagccacccacgcccgctggccttggctcctgcagggagttggagagaagaatgtgctcagtgctcaggggagccgaggctgccagccagtagccagagcagctcgtgaggccactgcggcacaggtcccccggggcagcagctgtgtcccaaggcaaggctgggtgtggggctggccagcccgggagtccacagtccagccctgcagtcgggcacaccggccgcagcacggaccactggggaggccgggtgggggtcattagtcctgggattggttacatctggagagccccaggcagggtgaggagtggaaggacagaacagagaaccaatattttaggctttgagggcaaaatcattgtgcagtgagaaaacagatttttactattttgtaactgacaaaactcaaaatagaataataataattgaggccagtattttgtaatgtaggtccactcatgagaagaatagagttctttttacagacatcaccttttgcttaattggagtttagagttagtgtttcatcaaaccgattgcaaatgttcatccgtaaaaaccattctcagctcctaggctgtacaaaaacaggcagtgggtgggatttgccccgtgggccatatttactgatctttggtctaagagactctgccgtacagtcctgagcacaggcccagatgtcttgggatgccgtgcccctgcctgtgctgattcctgcctcagcacaggagtgataaggaaaggaacagtcagagacggaagggaaaaggacacacgtcttggctgagcacctactatgtgccaggctgtacctaggctgctttccaaactgggccattccctgggaccagggctggacctcctttgtcactaggtacctggcactgcagagaactggaagttgaatgcatccagaggtgccaccatgcatgcggcagcacacagtaggacacacccacttccagccggagccggcctggtctcttaacgctgcccgtccctttgccttgtgcccgggacaaggcccttgctccaggtctcagcctcccattgtccttgtccgtacaagttcatgaggtgtgggtgggctcctgggagcgtgtcctcagggtcaagggtgggttttccatggcactgaccacccacccctacccacggcttctcactgccctcagaataaagctctctcgccgcagcccacctggcactgcatccttgattcctgccgcctgcgcgggcctcctcctctgctgatttcactcgctcctctgtgccc

SEQ ID NO: 492 - DNA, 2479 bp, Homo Sapiens
tggaagacaagcggacccacctcccagggttgtttgcagagattaaacggaggcgtgccaagcacagtgccgggtatggagggggagctcaggagagctgccacgtgagctggggaagccaacgacatgatacatctggctccctccagccctgacagcctgcgattctgtgattccgagatcctagaatcatggcacgagattctgagactaacgcccctgcccctgcagccgaccgggaggtcacaggaaggcctccctcctgcctccctgggagtccccaccctctgcctccccagccccagcctcccaagttcatcctgggcagaggatgggcttccaggaccccacccttcgggacatcatccgggccccagcctccttacctgcccatggggtgagggcttccctccttgccgccaggctggttatcattctgctgtcccctctccctgcccagtccccaggtgcccccagggcactcctaactagggtccccacaaggcacccacttctagaccgcttgcgggctcaggttccctcccaggccctcggccacggctgtccacagagcctctcccatctggtctccggccctgacttcccaaccagagcctggtacgtcaccccccatctccaggacacatcctgggggggcaggggcaaggataggggggagaagcttcccagggtgaggaagagaagaggggagcaagggacacagaagccaatagaaatagaggggaaagggggtcgggaggaggtggagaaagagagagagagagaaagagggagggggagagagagagagggagagggagaggagaccgtgagtaggaggaaaggcagaatgagggggagtgatgagagatgcgtgacagggagaagacgagaaggaaagagaggagaggagacacgggtgagagggagagatgcagagagaggcaggagggaggaaggagaatgagggggtggcagggagagtgacagagagggactgtgccacagatggtgacatggagcccgtgaaggagggagtaagcagggaggggctgagggccggagagcaggtgtggggggtgggggcggggtgcaggttaagggaggaggcccggagagggagcaggaggggcgcagaccctgttaccggggagatttcagccacccacgcccgctggccttggctcctgcagggagttggagagaagaatgtgctcagtgctcaggggagccgaggctgccagccagtagccagagcagctcgtgaggccactgcggcacaggtcccccggggcagcagctgtgtcccaaggcaaggctgggtgtggggctggccagcccgggagtccacagtccagccctgcagtcgggcacaccggccgcagcacggaccactggggaggccgggtgggggtcattagtcctgggattggttacatctggagagccccaggcagggtgaggagtggaaggacagaacagagaaccaatattttaggctttgagggcaaaatcattgtgcagtgagaaaacagatttttactattttgtaactgacaaaactcaaaatagaataataataattgaggccagtattttgtaatgtaggtccactcatgagaagaatagagttctttttacagacatcaccttttgcttaattggagtttagagttagtgtttcatcaaaccgattgcaaatgttcatccgtaaaaaccattctcagctcctaggctgtacaaaaacaggcagtgggtgggatttgccccgtgggccatatttactgatctttggtctaagagactctgccgtacagtcctgagcacaggcccagatgtcttgggatgccgtgcccctgcctgtgctgattcctgcctcagcacaggagtgataaggaaaggaacagtcagagacggaagggaaaaggacacacgtcttggctgagcacctactatgtgccaggctgtacctaggctgctttccaaactgggccattccctgggaccagggctggacctcctttgtcactaggtacctggcactgcagagaactggaagttgaatgcatccagaggtgccaccatgcatgcggcagcacacagtaggacacacccacttccagccggagccggcctggtctcttaacgctgcccgtccctttgccttgtgcccgggacaaggcccttgctccaggtctcagcctcccattgtccttgtccgtacaagttcatgaggtgtgggtgggctcctgggagcgtgtcctcagggtcaagggtgggttttccatggcactgaccacccacccctacccacggcttctcactgccctcagaataaagctctctcgccgcagcccacctggcactgcatccttgattcctgccgcctgcgcgggcctcctcctctgctgatttcactcgctcctctgtgccccaggcgtacccagcctcatgtattcattcacttattcctgcaggt

SEQ ID NO: 493 - DNA, 2500 bp, Homo Sapiens
tccctgggagttcccccggtgtagtcactgggatggaatgcacacaggtccctggtagaggcccagaccagcaagctgggagggtggggagtgtcttagtctttgtgtgggagtgaatgcgggtggggtgtaggatcaaggatgtggtttagtggggggcctactaggggcttcttagtccccccatttggagaggggtggtgccagcagggctggtttcaggattgggaccaggacacaggtcttagagccccctcacctcccacaaaggaaggtaagctgcaacccctgtgggaagggggctcaagggggctcagccatccgggggactcagcaccaccagacctgtccattccccttggtcagcctcagccatccgggggctcagcacccccagacctgcctgttccccttgtccaccatttccaccaaagcccacaggtgggcctgccccaggattctttttgaaatagcttgcacctctggggccacccacggatgggacctcatgggtatctctgaatccaagtgggagccggaggagggatacagggaggcccactcactgcctgccccaaatctgacaccatctcttatcctctgggccactcccagctgcacacaatccgttggctgggtgggtccaggtgcatgtggcctccacggcacagccacacccgactcctgtgtgtgctccctgcagtgacgcattggccctgcggctggcctgcatcggggacgagatggacgtgagcctcagggccccgcgcctggcccagctctccgaggtggccatgcacaggtagccggcctatgccctatgcctctacacctggggaggggccctgggcggtgggtggaggccctgaacacagcacagggctgggccctgaggaagctctgtgggggatgtgccttgacactggggctatactgaaacccttggctgcttcccgcacctctcctgggagcccccagctcctggcactcgccccctgccacctgtccctggcattcctgggcaacaaagcagagcccagggcccttttctctctcgccgtcctcattgagcccagatggtacatttccaccgtggtcttaagagggggtgctacgtgagctcggatcctagatcctgggggctgggcctctcagcgagtctccggtgggggaatagagtgggcagtggcttgtgagggccctgtagaatgggggtttattttccacgtggccagctctggaagacagggccaaacacccggtgggctggcgggcggctggctggcggaggaagcaggaagttggaatgaatttgaccacaaacagtccataccacgcggcccctgcaggtggaggcgcccacggaaagggccccgggtggctgtggggtgggagggcacaggcccctgctccccacagctgtgatggtgtcatctaagtacaggctgcccctacctgctcctgcagtaatggctttgtccccccatcctctttgtctatagcctgggtctggctttcatctacgaccagactgaggacatcagggatgttcttagaagtttcatggacggtttcaccacacttaaggagaacataatgaggttctggagatccccgaaccccgggtcctgggtaagagccttgagatccctgaccctgacttgcgctgcggccagtgggggctgtcagagccgctccttggggcgccacagtccccaccactccgtatcatcatctgtgtcacctgtgtccacatctgcctgatcccatgggcttttgggtttgagatgcctggttctgagtgcacaaaccagtgcatggtcctgggtctccctctggtccgagagccttcacctggcaggcaggactcccgtctcctggccagggcaggggcctccctgagcagccttcctggtagcctggtcccatggtgtccactcggcaccgcccaccacaagggcagctgactgccctcacctgtgcccaccgggtgtctttgcctgtgtcccgcagactggcaggcccaggccacgctggcctctctggccacgtcctcagggccactttccccctctcctgaactccttccttctctggtcccctcgagctccttcccagtccccaccctcctgggcttccccttggcactccgctgtcacccgtctggccccattgccggggcctgccccgagcctgactcctctgctttgctcccacaggtgtcctgcgaacaggtgctgctggcgctgctgctgctgctggcgctgctgctgccgctgctcagcgggggcctgcacctgctgctcaagtgaggccccggcggctcagggcggggctggccccacccccatgaccactgccctggaggtggcggcctgctgctgttatctttttaactgttttctcatgatgcctttttatatttaaaccccgagatagtgctggaacactgctgaggttttatactcaggttttttgttttttttttattccagttttc

SEQ ID NO: 494 - DNA, 2467 bp, Homo Sapiens
tcttggaggaggcggggcctggccctggccccggatcgccgagaccggccacgctgcgccgcctggacgccgggctcctccacccacagctctgcgaccttcacgagctcgaccctttctgcgcctcagtttcctcatctataaaatggagataatgcctccgcgcgctgagcccgagcgcggtcgtgctgttacactattgctgctgctatgtcgttaatgacggcacagcccttatggaaggggggccaaggaaggcacggggaccttcccgcaggacatggggtgggcaccagccctaagccatgcacataacccactctgaggtcaggacctgggttcctttcgtgtccactgggggccttagccgttgtcttcacttctctaggtcccagcccttcacaatgggcgcgcctccctgcctgagagggaggccccagccaagccccagtttccaccgcaaaaagccacacagcaaacacttaatggaccctaaatttataaaaattatcccatagagtcctatgaggcagggaatgttactgtacccatttcgcagatgaggaaacttggggcaccgacatttcccagagccaacatgtaaaccaggcatttggcctgagtgacagactggtgcaggtggccagcagcttaatttgtactgagcgcttactgggtccccacagcgatcctgaactgtgttcctgcccacagtgactcggccggtccgggcatggcagacccagtggcgggcatcgcgggctcggcggccaagagcgtgcggccatttcgctccagtgaggcctacgtggaggccatgaaggaggacctggccgagtggctcaatgccttgtacggcctgggtctcccgggtggtggcgatggcttcctgacagggctggccacgggcacgaccctgtgccaacatgccaacgccgtgaccgaggctgcccgtgcattggcagccgcccgcccggcccgaggtgtggccttccaggcgcacagtgtagtgcctggctccttcatggcgcgcgacaacgtggccaccttcatcggctggtgccgcgtggagctgggtgtgccggaggtgctcatgtttgagactgaggacctggtgctgcgcaagaacgagaagagcgtggtgctgtgcctgctggaggtggcgcggcgtggggcacgcctgggcctgctggccccacgcctcgtgcagtttgagcaggagattgagcgggagctgcgtgctgcacccccagcccccaacgcccctgccgctggggaggacaccactgaaaccgcccccgcaccagggactcctgcccgcggcccccgcatgacacccagcgacctgcgcaacctcgacgagctggtgagtcccccagcaccaggtgccagggacccgacagcacagccagtgcctgcaatctgtccctgaacctcccagggtccaccctgctatctgcagaacagtctgccccacaaaaagagtgcacatgttgagcaccaaaccgaggaatgtatacctgaccccaaggaaatgggtagcccacagagagggaggtgccggggagatgacgcagcccagccgggcctgggacaggatgcgggctcctggcacgatcttccctcactttgtgtgctaactgtgcctcaactgagcttgtgcattccttcttctggggggccgcatgatcggggcgcctcctctgtgccctccctgcagtcagtcttaggcagatgtacccacaacctcatggaggctcgaggttgagcgggtgctgtgatgctcggttgagacgaggcatggaaaaacctgggcaaggtgcctggcacacagtaggtgccccagggggctctgcaggtctccccactccccaggcacccctgggaagcctagctgggttgctgctgttgctgggagcagggatcctgtttggaattacaggattcgttctactctaagcataggcgttgctgggccctgcccccaagtctctcctctcccaggatctgggtggcccctgccacccctgagggctggaccaagagtttccttcttatcagaaggtcaggactacaatgtgcctgcctgggaggcagatagcggatggcagtgggcagagcctggggccccaccccctgtcctggaccagggtcactcaaggccccacctgcttatttcctctggcggcaccactgccgctgtgggcggggaggcgggcagggctgcccacatagccagcttggcagcgctctggctctggtggggggctgtatgtggtgcgtgctcacccggccagtggtctgtgtgtgcatgtgtccgatgtgtctgtggtacgcctccacatcagtgcccacccaggggcatggggccccctgcacctgtgtcctgtagcctgcctggccttcctgtgggccccagccttcttgtctgagaagtgggtgaagcgggagtgaggacgggctctgg

SEQ ID NO: 495 - DNA, 2385 bp, Homo Sapiens
tgtggctgtgtgggtatcacacatgtgacaatccatcaagctgtgtctacttacggtctgtcctcactgtaggtaagtcataccttcacaagaccgtttggaaagagatactatttactaggcaagaaaaaccaccaaatggctagaaaaacatctaatgaatgacatgccagacttgccagaccttctatcctgaaaaccactgaggaaagtcaaagaacccggttaaatgaaccagatctggatcatggttggaaaactttatttaaaaaaaaagtcggccaggtgcggtggctcacgcctgtaatcccagcacttagggaggccgaggtgggtggatcacctgaggtcaggagttcgagattagcctgaccaatatgatgaaaccccatctctactaaaaatacaaaaaaattagctgggcgtggtggtgcgcgcctgtagtcccagctactcagggggctgaggcaggagaatcgcttgaacccaggaggtggatgttgcagtgagctgagattgtgccactgcactccagcctgggagacagaacgggactccgtctcaaaaaaaaaaaaaatctgctgggcgtggtggctcacgcctgtaatcccaacactttgggaggccaaggtgcgtggattgcctgagcttaggagtttccaaccagcctggccaacatggtgaaactctgtctctactaaaatacaaaatattaactgggcatggtggtgggcgcctgtggtcccagctactcaggaggctgaggcaggagaattgcttgaacccgggatatggaggttgcagtgagccaagatcgagccactgcactccagcctgggcaacagaatgagactccgtctcaaaaaaaaaaaaaaaaaaggatgtccgttctccccaagatctgcagattcaaggtgatcccagtcaaagtcccagcagtttgctgttcttaagccaacaagctccaagggccagcacgcacttcctgtcctgctggccggactgggcctggtgaccctgtcgccgcaggccttttgcagcacaggctctgagagcaacggtgcggttgcctgactgtcacggaacaaacacacaccaggcgagcactagcctgaggccgaggggcacatggagctggcctgagcccagccaggagtctggaagcaagcccagctcctcccggccgtgccctcgagggcctgaccgcgaaacgctcgtacgcacgggttggagttgtttgccacgcgtggcaactgcggcaggaacctgactcacgcacggacgccagcacccacaagtgagaggcgcctcagacacgtggtgtcggctttggaagcagctggtgggtggtgaggaaatgtcacagctctggaaagacagaggcctctgtaaggtggtgtcaaaatgccaggttgaatcaacagtcatctgcggggactctgaaggcaggcaatccgcccagtgaactggcagcaccgggcaggagggtctggagggagaaccctggtggcatggctggtgtgtgaggatcaaaggcagaggagatctttcctcttcagcatggtaatttggcactgggctaagcctccagctgcctcccgctggtgacctggtaaaggggaacataaactcctttggtcggcaacattgcttacggcaacactgccctgtggcaggcagaccacgtggggactggggagtcattggtgtctgggaggccacgtcactggccttcctgagtgatccccacacctgggaatgtgccctgcgggccatagccgcgggattgctgcaggaggaacttcgcctcccgtggggcaagaggcatctccgtgagtgggtcccagcccctgaatcgcagtgggaatcagggaggcggcaacacctgcgtgccgtcataaagacccccaccatgccctcgtaaagacccccatcacaccgtcctgaagacccccacataccctcgtaaagaccccatcacaccatcctaaagacccccacacacactcgtaaagaccccatcacaccatcctgaagaccccacacaccctcgtaaagaccccatcacaccgtcctaaagacccccacataccctcgtaaagaccccatcacaccgtcctgaagaccccacacaccctcgtaaagacccccatcacgctgtcctaaagacccccacataccctcgtaaagacccccatcacaccatcctaaagaccccacataccctcgtaaagacccccatcacaccgtcctgaagacccccacacaccctcgtaaagaccccatcacaccgtcctgaagacccccacacacactcgtaaagaccccatcacaccatcctgaagaccccacacaccctcgtaaagaccccatcacaccgtcctg

SEQ ID NO: 496 - DNA, 2500 bp, Homo Sapiens
aatcttttggtctcttggagatcctcctgcaccttctaccactctaagcctctagacccaatctctacccaactgtggctggcaagggggagggcagcggaagagagccgggctcctctgacaaagccctaattttctggaacccagatgctcctcactcttgttctcatcttcttgcttccccccaacctcctgaccactcctcaaagtgtaggtgatccaccactgtcaccagggtcaggggaagtcctctggacagagagtatgggagtcctgggttctggccctggctctgctaccaacttctatgtgacctttgtgattcctttgcctttctgggcctgtctcttggtcagtctagcgagaatcaggtgactgctaccggctcacatctcctggagtccctggtctctttcagagctgctctggcactcccgggtgggagtgggggactgtcttgttccacacatccccaggaggcctggctgaaccccagacctgagtcgagggtgggataattgctccctgcgggggatgtttttcctagaggtgtgggctggtcccagggaacctgggactctgagggcccctgggcaggaaggaggccaaggtttccttctggccagagtgctcagctccagctctggggcagtggggaagaggttgctcaacgttggggtggggccctggcagggaagatggcgccgaactgggagagggaggaaagagatcagcttggtgactctggggcagggcaggagggggagccccttactgtgtgtcctctccctaggaggatgaagaagcccccaactcaaaggagggtggcgtcagaaagtcccagggaagagccctaggataggatgaggtcccgcagcagcagatttgtcccgcagttcttcatccctcactcttccaaagactctcatctgaattccgttttctttaaacctcccctgagttctccatctgactgcctcagtttccctgaatctccagccaaccctttggttctttccaagcgtttccctcgtatcctcctgaccacagcagctggtggcatagtgtgcgtatctgtgggcaggagttagtgaaggcctccttccctccctccaaagccccaggccccacggtctgccacccgcaaaattccaaccacgagggggcgccttcctgcccgccgccccgtagggagacccggcctaggccgctggagttccgagttccagggtccttgtgatggaagggcgggcgcggcccccacacctggtcttccagccctatccaaggaggactgccagacagtcccgctctgaggtgcaggaggccgggccgcctcggctaccctgaatccacccgaagctagagggcccgagcccggggggcggtcgggtgctcacctccagagcttgcccagcgtcttgctgagctcagcgttgtgcaggtgcgggtactggtccgcgagcttcctgcgcgctgcctgagcccacaccatgaaggcgttcatgggccgcttgacgtgcggcttgcttttgctggcgccgttgacgcgcacgggcatgggcaccagcgtccagtcgtagccgctgagcacctggctgacggcctcgcggatgcacacggggaacttgtcatcgtccgcctcgccgtcctgctgctccttcttgaccttgcccagctcgcctggccccgggctggctcgcaggcccgatccgccgccgccgccgtcgggccctagcgagggcgcgctccccggggacaggcagcggggctcctccgagcccacggggctcagctccacctccgataggtcctgctcctccgccatgtcgcccccggccgccgccgccgccgcctcggccgcctcccccgggccagccgccggggtcctcgcaaagagtccaacgcccacctggatggaaggagggcgcgatggagcggccgcgcgcgcagccccgagggcggcccgagacaggacgtgggcacagccccgaggtggcggcccttcctgctccagctaaacccatctggcccctggggcccacgcacatgccagactctaggtgggtgcgtcccgcctctgtgtcttcccaccacctggtcccaaccgtctcttggtgtgggtggctttttttttagcctccttttttgggtggaggtttgttgatgataaggaagaaaaaaacggagcctttattttgctctaatcccggcccctggaatttcccaccttttctctcacctttccttcttccctcagcctgccccaacggggtttagaggagagccaggtggggggcaagggcggggtgtcgcctctctccacctcacagcagggtcccaggcctgggcgggccagggaggagcaggctgcgcactcacctcctcggacctctcctccagtctggggctcgtccttaggaagtggaaaaccgtgtcccaaggtgtgcggtccagctcggggctgggaggtgacgctggtgggctgggagggaggggc

SEQ ID NO: 497 - DNA, 2402 bp, Homo Sapiens
tcctgcctcccggcctggtccccgaagaccccagaagaacccggaacttgcttccattcggaatccagggaccaccctttgcactcagtaggcctttgttttcctgcgtggaaagcggttgggtgagttctggcatcggggccaccatacttgagtgttgggggtcacggagggaggggcccagacaccacctgggaaggatcccagagtgcagtcccagcccaggccacccggggaagggagtcggtaaagtgggaccttgagtccccacggcccctccggctgcccctgctcagaggctgctcggcgtcctccctccctgttctactgaggagttgccgcctctgaacttcagccaacccctccgtctccaggtgaagaaactgaggccctggggccaggaaggggcttgcccaggctgctgatccctttgggcagcatcgagtccaggccctccttgtaaccatgcatcaggaccagagagggcagggggtttgcccaacgtcacacagcctgagtgaggaggagctggcctgggacccaggcttcctgacgcccaggccaggctctttcgttttctctggccatggccctcagcttggatattaaggggctgggagtcagttgtgtccccaccacctccatgctacagggcaggatggagtctggcatcccccgccccaggctggctgctggtgtgacatgggtggctccagtcgagtgaatgcctccgtctcccacagctcagggggctccctgctctggccaccaacttctgccatgtgactcccctacctcaatgtctgattgagtttgaaaacactgagaagacccaggggctgaaaagggaggaagagggaggccagaaggcgccagccgagccagcgaagccttcacaggagaggaagtgggccaggggaacaggaaggagggctgggctggcctctgggtctgcccctgtcccgggcatgtggtgagcccagccttctgcctgtaatgaggaggaggaagatgaacagtgcctctgtcaaccctggcccttccggtttatgggatgggagatgtcaccattccacgtatccacctcagccagccccacacaggccgaccggggaggtttcccttgagctcaacctgacaagctctgaggagtgagctgtacctactttgtcctgtctgggatagggtggggggtccctgggtagggggctgggggctgcaggagcacggtgggcggccgctctgcacctgcctgaggaaggaccacttcctccgccaagcctttgcttggctgtgcccgccctcagcttctgtgcctttttctaacccgtcaccccgcaagggttggctcaagggctctttctcacagggcccgtaccccctgcctaggctggcatgctgacgtgtccccagaacctggcttctaccctccttctgtgcctccaggtctagagaaaatgaggggctcagtgagtttggggcttctcagaccgtgacgccctctcctgcctcctctgtgcaggcttgggaggcgatggagccggagttcttgtacgacctgctgcagctccccaagggggtggagcccccagcggaggaggagctctcaaaaggtgtgtgcccacgcaggtctgagggtggagggtgaaggtctgtgtggcaagagtgagcctggccatgcctgggacttgcagcaccttcccagctgtcagctgagcgcccaattctgctcacccctgcctccaccttctgctttatgcttgacctaactcctcctcctgggaccttctacagagctagaacctcttctctccagatgagagacggtgtggattacgatggtgaatactgattgctctcatcctgtgagccttctgagtgcccctactgcaccagcacctcttaccaatagcaactcatttattctcaagggcgggcatcagtgcctgctttatacagatgaggaaactgaggcacaaggggtgacgtgccacagtaacaggaaactcttagcaagtggtggacctgggttctgagcccaaggagggtggtcccagaactgaggttccacacggaccacgcagcgatgcccaccatggagtgatactttgcagggtgtggggctcctgacgtgctcccctcacacgtgtgggtccctttcaaaagtggggtgagcataggatggagcaattcaacgactataggtcgccctttcagtaaagctctgtgtcatgagccctttggggggttggcggccacagttcctgcaacctcccttctaggagatggctcaaaagaaggacatgggcaggtacccagagctgtcaccctctctgtgttctctgaaagaaacaaatgaacaacagcttgcaaggaagcagcgagatgtcccagtggggaag

SEQ ID NO: 498 - DNA, 2439 bp, Homo Sapiens
gagatgcagtaggaggcacagcctcacttgctgctggagggagtcaggtgagacttccccacacagggagtaggcggaacagcagcgtgggaagggggctggcactggagccagccggacccggttcaaatccaggctgtgccgcttcctggctctgtgaccttgagcaagtcctttcactaatctgagtctcagagtctgtatttgcaaatgagggcttggcgtatggtgctttggtgaggattagaagacatgatgtttaacctatgtgtctcttgataataatatcaacaatggctactgatgacacaagttgtgagcagtgtgctagggactgtacatgtttgaaactgtgtcttaaactcaccgggccaggtacggtggctcacgcctgtaatcccagcactttgggaggccgaggcgggcagatcacctgaggtcaggagttcgagaccagccgggtcaacatggtgaaaccccatctctactaaaaatacaaaaattagctgggtgtggtggcacgagcctgtaatcccagctacccgggaagctgaggcaggagaatcgctggaacccgggaggcagaggctgcaaggagccgagatcacaccactgcactccagcctgggcaacaagggtgagactccatctcaaaaaaaaaaaaaaaaaaaacaacttatcaaatcctcataacccagtgtttcttggccccggccctaccgatgttttaggctaggtaattctttgctggggactgtcctgtgccctgcagggcgtttgacagcatccctggcctctacacaccagatgccaataaatccccactaattgtgacaaccagaaatatttcctagacatggccagatgtttctagggggtcagaatcaccccccattgagaaccacagtcataacccaatgaagtaggtacaccgagcactaaaaggacttatccacgtcaaagagccagcaatggtggctctgggacacaggctggctggctactacattgcaaaagctgccccttcccttgcctccccgacccatctccccagggcctaccgccagctgcaggtcacggctgcgaagtacagccgagttcttctcctcactgagctgtgccaggcgcatggcgatcatgtagttctcatccttgagccgcagcagctccaggctgcccgcctcccagtcctcccgcagccgttgacagcgctcctgagcctgctgctggtcccgcagccgctgctccagccctgcccgctcctcctcgagcacccggccccgggcctgcagttgctgctcccgctgcagctggctcttgcgagcttcccgcagccgtcgcacctctgtcatcaagaattgggtcaggccctcaggcccctcctcatctgccaggacagaacaggggacagaataggcagctcaggcaagtaaaatccaggagataacatactgtgtcaaaaaactcaaaccataaaaacactagagggaaattctggaatatatttgtagaattgggagcaggggaggtcttcctaaacaacacacaaaatccaggagttataagagaaaaaagatggacaaatccatataaaaatgtttaaacctttgaaaaatgaaagatgtaacaaagttaataagcaacagagtgggagaaaatataacaagaactcagagccgtaatatataaagagctcctacaaatcaataagatcaacaaccaaataaaaatatggacaaaaactatcaataggcaagtcccaaaataaaaatagttaataaatacaggaaaatatgcaccaacctatcaacaataattacagtagctactaatatttgttaacttcattctttgtgctagatatatcttaatctttatgacaacactgtaaggtaggtactattattgtacccatcttaaagacagaaaaactgaagcacagagcagttatttacccaaggtttaataactagtaacctgtgaactgtatcactcaatgaaatataaacttaaaacaataacattattttttacatatcagaatggtaaaaacgtttaaacatgatccccaggattcaaatgggcccttacacattcctggtaggaggtatgttgatttaacagttaaaatacacagactctttgagaaattcttctcagaacctcttcgcctgagacacatttgcacaaagacgcacatacaaggatgttcccgtatcgttgtaataatacaaaactggaaacctaggtatccatcaactggaaatgggttaaatgaattatgtcctaacttcactaatgaacagtatgcagtcacttaaaacaagtgtatgtaacagaggtgaaagaatcactaaaatcagttgttctaagaaaaagcaaaatacacacgtaggcgtgtgtgcgtgtgtgtatgtgtttgtgttttttatataaaaa

SEQ ID NO: 499 - DNA, 2451 bp, Homo Sapiens
ctgaggttgggagttcgagaccagactgaccaacgtggagaaaccctgtctctactaaaaatacaaaattagctgggtgtggtgggacatgcctgtaatcccagctactcgggaggctgaagcaggagaatagcttgaacctgggaggtggaggttgtggtgagccgagatcgtgccattgcactccagcctgggcaaaaagagcaaaactccgtctcaaaaaaaacttagccaggcatggtggcgtgcacctgtaatcccagctactcgggaggctgaggcaggagaattgcttgaactcaggaggcgcaggttgcagtgagccacgattgtgccactgcactccagcctgggtgacagagcgagactccatctcaaaaaacaaaacaaaacaaaaccatactgatctcacaccggtctttcattttatgctcactattctgcaagttctgatacaaagacaagtcttgtccccgttttgctaggattttcattcctgaatgtttaagtatgtcctggaagcttctaggggcaggaaagggtttggaaacagaccttcccctgtgtaatccttgctttagggcagatagacttcttccatcagaagccttctctagtcccaacccaggcctgtgatgcagcagggcgcgccaccacttgccagagccatggtggctcggggtgcccagcccaggtccccccagctactgctccatgtaagtcattgtcttgtgcctctttagggaggggctggagacaggtctgaggaggaggcgtcatccacggagaaaccaaccaaagccttgcccaggaagtccagagaccccctgctctctcagcggtgagtcttggcctgctgcctccccggtcccacccctcctggctggcagtagtgacctggcccttagggtggtgtggagcaggtgtagggcccggagcagccctctgcctgtccagtgatcctctgcctctcctcattgccccgtcctgtcccacccacccctgatagtgtctgacctccagtgcttttcgtgcctgggtgaagggcctgtgtctctgagctgagttgctggcaggcactctggaggtagagcaggccaactctggcatgaacttggcggtcctggcattcgcaacctgtcctgacatcccctccgtgagccaggtggtgagtcaccccacaatgcaatcttaaactgaggctttctgccctcccctaggatctcctccctcacagcatcactacatgcacacagccgcaaaaaggtcaagaggaaacatccccgacgggcccaggactccaaaaagcccccaagggcccctcgtaccagcaaggcccagcgccgccgtctcacaggcaaagcacggcacagcggggagtgagaccgagaacgaagcggtgccccagtctaggctgcggggacctgtccttgctcagcttggctgtccctgtagcccagcctgcacctaggtaatgactgcacagctcaaggttgggaagccaggacctctctggcctggggccagctgcctttgcctggggtcagctgcctttgcctggggtttgaattcccgaaggagcaggcagctgagagcaggcctcccccaggaagagccttcagagccacgtgggggcatcttcccaaatgtgcaccccacctggcactcatcagatttgtgcgcttgtgatttgtttgtccttgataccacgcacaagggcaggtttttggggtggtggaaatggccagggcccatgggtctgtctccagcagttagccctgtggctgcaataaagtacagttctccctgtgttaagatcctaaccagggttaaggatcagtgtgtccgttgctagaatccagagcccacctgctgctctgaaaagcaggctcctgaggccagtgggggagcagtgccccccatgcccttcaccgaggagcctctgtgcctgtcccttgtcctcggccccaggagtctcctcaactgacactgaagtggtggaagcagttgagtgccaggtcatcccccatcaccacactggggcagcgtccccaggcttccagcagctcccaggtgggtcccaacgtggaaggattaattaattctttctaaagcagttgcagccgggcttggtggctcacgcctgtaatcccagcactttgggaggcccaggcgggcagatcacttaaggtcgggagctcgagaccagcctggccaacatggtgaaaccctgtctctactaaaaatgcaaaaattagccaggtgtggtggcacacgcgtgtaatcccagctacttgggaggctgaggtggaagaatcacttgaaccctggaggcggaggctgcagtgagccgagatcacgccattgcactccagcctgggcaacgttgtgaccttgtctcaaaaaaaaactaaaaaataaagcagttgcatcttgactcgtacaaaagta

SEQ ID NO: 500 - DNA, 2384 bp, Homo Sapiens
ggggcccctggaatcacccaactgcagctcccacccccacacctagccctccaggaggtcctgccaggcctgtctccaaaaacggccgctccaggtccccacagccttcctgcagcagtgagcaaacagtgaaacagtatttcccagcccagaggccaccatggcctccctcctgccgagcccagagcagtgccctgtggtaatgcactgagggccactcctcatcctccctgtgacaagggccactgccgtgtgtacctctaggttatcccgagtcaaatcagtgatgaccaacctctttcttacttcaccctcccctgtggctcacctgcctggatactcccccaaatctcaccgcctgagcccactgttcccatcacgtcctgatggtgcgtcaggcctccctcaacatgtccccatgcccaccagggactcatggctacctggaagaaggcgtgtggagagatccggaaggtcagccctagcaggtcctcgtggatgcaccggtccccagccacatgctccaggggcaggccctcctggctaggagtctttctgtgggcgaaggtgcaggtccttcagtgtcacagtccctgcagggacctgccccgccccactcgggctccttaccgctgtccctcctccacgaagtagaggcaggtcactccactggccctgcctggccctgctgtgaagtgctgcgctagggaggtcttcagctctgccagctcctcagggctcagcttctggagtaagtggtgaaaagttcccatcaggctgtgctgaggcccacctaggctaggcaccctcccccagcagggcccccgttgagacctgggggtggaagtaggcaatggccatggcctggtggcggcggctggtgcgcacagtcagctgcttccagtggcctgtgtacgtctctgggtcgtatgccgagtatggagtggacctgtgggaatcacgagctggcccaagtgcccacaactgggcaagcagtccccctgctctctcctctggccacaccttccttcatctggctgaaatggcaggcactccagaattcccggggcaggatcaccaccctctgctcccacaccgcataggacttcccgggagccccgtcacaggtcctcaccggatgaactcctggaaggccttcaccacctgcttggtggcttcggggatgtgcacggtgtcaaacggggctgccacagcacacgtcccgcccttgtacttgccgagccgacagcccacggtgttatcctccccatccaccccgacgccaaccagaaactcacacttattacgatactcagtctgcagggagagagagctgcaccttaccctggctgcccagcgcttgggcctggaaaccctgatttccccacaggggctggcagtcaaacaagaggaacagctgacaactatgtgatgttaccagaagaaaacacaaagcagggagatcaacaggaagggtgagcaaaagcaaagtttttcaaaacccaggataggggtttgtggccaccgaagtctagtctgacctgctggggtgatggcctgaccccctccagcgggcagcaggccttgttgtgcttgtgcctctgctcgagcagccagggcagcaaggcacggttggtgctcccgatttccctgtaagaggagcagatcggtggttggactccacctactgcccccgacccatgccaggccactccccaaatgtccaggctcctgacccctcctttgggatgtcattgtgcccactgtgacgtgggtgtcttgctggctagctcccaaaggggccgccagatcctgtgctgggcctcccaactggtgcatggacaggctgaggaagcacaggccgggcagagccctggccaagaggggcgtcttgcgcccacactcacttggcaagtttctgcagcacctgctcgcactccagctgcttccgctcaagctgctcagcatagggcactgtccatagaggggtcaccacgtcggccactcgtgttactggtggctcactctcaccctcctgtcgcctcctcctggccatggggtcggccttgggccgggccaggcgcacactgagtgggcggcctttccagagggcaccatgcaaaacgcgcagggccttgtccctctctgcagcgctgcggaatgtcacaaaggcgcagggtggttgcccaaagagtttggttttgtggggctgcagaccaaagcggcccaggaagcgccggacgtcgctgaagctggcgtggcgaggcacgttctgcagctccagtttaaagatctcagaggtaaacaagtcatccctgatgtagctgtagagcccgggctgaggccccggccctgtagccgccccagcgccctctttctccacc

SEQ ID NO: 501 - DNA, 2499 bp, Homo Sapiens
gacctccagcccatccccagagcatggacgcttttggccttgccaccaaggtccctcctctctctaagaggctgcccttccaccaccccaaatcctttccaagacaaccgtgagacacagagggtttagaaaccaggcaagttttaaatataagtttgcacaatattaacattaaatatacatcataaataaggcttataaatataaaactgataaaaattgataaaaatcgataaattagtcatgtccctccaaggaactggcctcgcagtttctgagaccccctctaggagagcaatggctcctgcgtgagaaaattccaggatccaccaccagggggagcagccagcagcgaggacccaagacgggcttcccggcgctgggaggtgggtctgcttttacagagacctccgtgtacacctcccagcgccatttgcaccacctgtcctgatttacagatttttaatatccaccttacgtcagggaatccaagcaaccgacaggcagtgggggccttgtacagcctctaactccctagcttcacaaagagaaaacaggtccacagaggtaaagtgacctgccccaggccacgtggcgacttcggggctggcctgggacctgagctccattccctggacccccggatcagggctcctgggacaccctgccgctgttacagctgcctaaagtgaggtcacccagacatccaggtgtctggtttgggacatgatgaggcataggaggccagctcaggctgtgacctccccttcagaaacacggaaaggaggaagtctgggggcaacggccctgcaagtcatgagagggaaggaccggcaggcctcggggagcaaggcaggggggcagtcagcccggccatgagtcagcctgtgtcatcagacccctgaatcaatggaaagtcggtcccgcgtggcccgcccggccaccccactgggcctggggaacttggggctgaggtgggagcgcaacagcctgactctgtctcccagcctggaggaggtagaggggtctgcccagctcccacctcttaaagtgcacttctcagtggctagtagcagaggggaacaggtttggggacccgggagctgtcatcctgcgatggttcctctcatccacagagcacctgccgcatccttcaccggcaaggggtgctctcgaggctaccggggcagctgtcccctggtcatgagtctcttgcctttcctggagggtctggtcctgcgcacccccttcctcagggcctggtgggggctgtgtctccggctccggttcgggctctccccccacttgctgaagacccgccccactgagtgcatgaagcgatggtagccatgcaggaacctgcagccctccagcttgcgctgaaaagcatccgaggcaggggtgggggtgggcggctgagaggccccccggccagccttcgtgggctcagccgtgtctgagttgtccagcagctgggccatgcagtagatgttgttcctgagcccgaggatgttcggcctcgccatctgcagcttctccaagtcctcgatgttcagcccagacctctccaaatcctgggccttggggaggcgctgctctaagtcggccagtctgtgcaggacgcagcccagtgtggcattgagggtctgcaggaagccccgcctgcccagccccctcagggtctcctcactggggaaggccccggggcgctccctgcagtgctctctcagtttaggaacatccaggccttggatacgtatctggcgggaacaggaggatcacagggtgaatgctgaggatccggaccacactcacagacaagtaagccttgaaatgctagacctcatgcaccccaatccaatctcccactggacagatccggaaactgaggcccgagagggaagaggaccccaagatcactgcaggcaaggtcggagtgatgttggggggctggtgggatgcccgtggggaatgaagagcttcaagagggctggactctgtcttgctcactgctacgtcccagtgcctagaccagagcctggcaggtgtgcaggaaacacactgagtaagcaggtgagcatggtgatggtgtccggagtcccgccccgggaccacagagctaggaaagctggagggccagccttagctcctcagggttaaggctggaataacatagcgactcagttccccgacctggccatatggagtggggctaggcctgtcctccctgcttctcactcccttcctaaccccatagttctctgagactcagatgccacaagggcccaggtgcttacataggggtccaggagtctgctggtgtcctgcatgagatctgtctgcttctggagctggccaaggagcacgcggtactctttcgagcagctgcctatagccgccatgctcgccatgcttggaaacaggagtgcaaggaccagacctaaggcagagaagaggggtgtcacctgacttggtgaggaaagccacagatgggagcct

SEQ ID NO: 502 - DNA, 2455 bp, Homo Sapiens
gctgcttctgcaatgacattacatgaaataatctgaaatacgatcttaactgtatctggtgggtcccgttaaccctgtaagttatggacagaacatttactcaaattgtagccaagtctaggctcatgggaacacgtgaccaattcaggtgaatgaaagggactttaaaacattaatttccagcttaggtcttcctaagactgcctgcatgttccttaacaccactccagcctgagtgtcacgtggatcctgaatgcggacttgtgtgcacactgctgaaaaataagcaactgaaaaccccaggcagcggggtggagtgatgatgaaagacaccgagacctatcgggaagctggaaattcccccccagcttcggtgtttgggctgtatctcgcttttccacttccctaaatcacccccgtggtgcgagtgtgctcgcagcagatgctccctaattgtctcttgtatttgtagcaggatgagcagcaaacaaaactcctcagacaccgagttaaagaaggaaggggtttattcagccgggggcatcggcaagactcccgtctcaagagccgagctccccgagtgagcaattcctgtgccttcaactctaagtgggtgcgtgtgagagggtcgtgattgattgagcaagctgggggtaagtgactgggagctgcacgcactgctaagtagatcggaacaaaacaggatagggatttcacaatgcttttctatacaatgtttgtaatctctagataacataaccgattaggtcaggggtcgatctttaactaccaggcccagggtgtggcgctgggctgtcggcttgtggatttcatttctgccttttagtttttactttttctttctttggtcgcagaaactaggtataagacaatatgagaggtggtctcctcccttatattgacagtaaaaccccaagggcaggaatactcttatttctcaacaccatttcaacaaccaaactaaaacctctcacctgagtgtaagggagtggtgaccttcttaagccgggagctcttccatcagggggttccctaagggcatctctgttcctagcgggggagccgtcaccccactttgctctgcttagcctgagacacgcaattttctccagcttttactcttcgctgaattctcaaggcggggttggggggatgttcaggctcaggaaggaggttgggggcccggccgctggacgctgttcaccggtagcccggaccagagcaggagtttcatcaccacctgcggggacaggtgggacacatgcatttccggggccatcctagacctcctggaggatgctgattgacactgtccagtttgagaactactgtgtccccggagcagaggcctccccattgcccttgggtagcgggcgtcgggcacagggcttctccggatgagcggggcgggcatgagagcacatggaactgggggcgggaggtcggggcagccaaggaggagaaggaggaggcggagggggagggaggggaggaagaagaggaggaggagtcctttgtggccacccggaggggagagacttggttgggaggcgccaaccgagctggccgctgggactctgcacccaggtgcgccaacccttgggcgcacgctccccgcagaccctcgctgaaggagcggtgggcggcgcgccgcgaccctggcgggctacagattacaccgcttgcagggcgctgctggggcgcgcagagcggggctgccccagggtggctcccccaggttggggcgcggcgggcggcggccgcgggcgcgcgtcccatccgggtcccgagtaaccgccaccgccgctgccaaagctcgccaacatggtggacctggaggccgtggtggccgatgtcagttacctgatggccatggagaagagcaaggcgaccccggccgaccacgcctgcaagaggaccgtcctgcccgaacccacgtaccacctgccccggcccgcgccggtccccgacgccgccgccccctgcggccgccagcgaccccctgcgtccgggagaatcgggagctgagccgtcgctgtcccggagcgggtgacacagcggagcgggcgatgcggggccggcctcctggctccagtctctgaaatggggcatcggagggcgggtggggggcactccgggagagagcgctccaaagtgcctggcgccgcgccctgcgcgcagctagcaccccagcaaggggctggttatgacttggctggaccagttccatccctgtcgccccctcccccagccctgtcctctcctgtcccatccccgtggttctacctgttgcattggtgtggtccctttgggctccttgcctgtcactcgtttgcgctccatcctggtcgctccttcttcccgggctctgtggttcccctttccaactccatcctttcagctccctctgggccgattatctggggactgcagg

SEQ ID NO: 503 - DNA, 2471 bp, Homo Sapiens
ggccccatgggtgggctctgagatgtggcacacggtacccagggcagggctgggaagggtggggtgcaggggcctccctggctgcagggcccacccaccaggtgcctgggcttgctgcactgagcaggcatgggctctggcccccctcactgtcccttccaggcccagcctgtgttcagggcccaggacagggtctggccagcaggccccaggcctccaagatgttctcagcctctggagtgtgtgtgatgatgagcactcatggagcttcctgtatgctgggccctgggcttctgagagggccaccgggtggcgactgagtcacgaggtggagggccagtcccagggactccaggtgacctcgtgtcggcaccacgcccttctcccatgggcagtcctgggcgccccttcctggccttgggcccagtggcctgtggcctgaccccgtccactcctgcttggttgtcccagcagcagcaggagcccatgctggagaaggtgttatggggcaggtggagggcccggctgactcagatgatcccccaagtttcttttcaatgaacacttgtttagtgcagtttttcctcctcaaatccccctcacacaggcagacaccctcttggcccagggtaatctgctgagcctttgctcaaatatagcagctttgctgctttctaaacacaactaatccaatttgggatttggggattcgaggtgggcagcactgggcctcagatgagcccccatcaccccagacccatgcaggaagagccaggcagggtggggccctggggccacctggtgggctcagggccagggcatcgcgatgtccccatccttcacactacggggcttcctggctgcagagttggggactcagctgggaatgctggccatagaggcagagagcccccatcctgctgggccagccctgacctggcttctccagggtggcccagtgtccccttctgcccttcccctggctcccaccgtccacatccctctatctgcccaccctggacaacaaccagcacagtgcagtgtggccctgcagtgacaccacctgcagagaggtcaggcccagcctcccccgtctcctaaaaggccagcaggtcccaggagctgggggtggggcctggctgtggggcctccatgccccaggggccagggcagaccctccttagccggcaaccactgcagattcctcccctggccagcactcggggacctccctgcccctgccccgtccccctaccttgcctgctgagacatagggctccacgggtctctctcctggggccgggctgactgtggcctgcgaggggcagtcatcgtgttgggttttcctgccagaggcagaaaccacaaaattacctggaacatacacgccccaagtgacagattcaattcaattccacaaatattgacctcgcgtctaatccactcgtcctccagtgccagctcattcctgagaagcccagcctggcagccgcagatcccatttaatcccagccccacaatgtcaccagctcgcagcttgggagctgggctcatccaggccctggcaggtggggccagagctgggctctgacctctgtacccacacttaccaccatgtaaagtgctgggaagaggggtggggagtcacggcaagttgagggtccaggcttgccccagctcgccagatgctcgccctggctgccctgacctagcagctaatctctgcggggcactgcggctacatggtgactccagcacggggacatttatcagaaatggaactgatggattaaagtggaaccaagcgaattgatttttctccctgggcactgaaatgctgcgcttaatcaagcgatcaactccgtgggcagggtggctgtggggacggaggtgggggacaaggggatggtggccatggtggggactgaaaggtggctatggggacagatgaggtgagccaggtggccctggggtcgagctccagcccagcctctggcaaagaggccctgtgtgcagaagtccgggtgtgatgccctccccccaccgattgtgtgataccggccagtcctgtcccggctgagcctcggtggccttgatgtaaccctgtggggtctggtggcagggactgattcactcatttgctcattcattcatgtgtttgacacacactgcagcaaaggaaaggtgagagcagccacaggctggccagggacgattcagacttcagagtgtagcgtgcccgcccctcctcttgtgaggtccagccttggtgtgtgtggattcccaggcaccctccaggtccaccctccactctgcagtgccccgcccacctgtccacatactctgttctgtggtttgatcgccatccttctgctctgcggccaactggatggcccaagcggactgagttgggcagggtggtcatacctgtggagcctgtggctgtggttggaggccccgtgggcagctga

SEQ ID NO: 504 - DNA, 2371 bp, Homo Sapiens
ccccctcagcctggagttatttctgaggtccttgctgtcttttgaggaggaagaaaatggattccccctcccaggcccctaggcttcatgtcccaggtccctttactttttcttcttcttcttcttctttttttttttttttttgagatggagtcttgctctgtcacccaggctggagtgcagtggcgcgatctcggctcactggaacctctgcctcccgtgttcaagcagttctcctatctcagcctcccaagtagctggggttacaggcgtgcaccaccactcctggctaattttttgtatttttagtagagatggggtttcgccatgttggccaggctggtcttgaactcctgacctcaggtgatctgccctcttggcctcccaaattgctgggactataggcatgagccaccgcgcccagccccaggtccctttacttctgttcctctcttgactctctcctttcaaagaggcttctcattccaagaagcgcctggcccactggtcttggtcccgccctgctgacagccagttatcccctgagcccagccaggagactgaaaagctttactgcattctcttaagggcttcacagccaggaaaaccagcaaaggggaatatagtgtctgcagaccggtgaggtccagggtcgctccataaaaatggattcctggaaaaacataaaccagcaatttaccctgtgaattttattggcctaaaaaaaaaaaaaaggctatctcatttgaataatgaagagagataaaccattcctagctcctcttttattagtgaataaggacacaaacactcaacagaaatggaacactcacacaaagcttcaggtctgatttattagccactttagtttcataaaactcagcatttctattaaaataaaatgatgtccaaaaggtttgcttgtttttaagaaaattgcatttaatacagggcaagactttgttatggtttatttatttatttatttattttttaaacaaagctcaaattctcctgacttcacgcctgttactacagctggagggaaaccgatttcagaatctatctgatatgtcggatttctttgtggcatccacttcatcgctcagcagccagccatgatgtcataagcccatcagatttccggtagggggaaaacgctggggaattggaaagaatggatgtttcttacccgtcaggaaggcaggggaaggagctgggtatgtttgggaggagaagccgcgtggctggtgggggacaggagcaggctcaatgtttgtgatattaaatgtcaggcagaaacctgaaaaccccagctacccagatgttttctcaatatccagatgtctggcactgagcagaccatgctcccgcctcccaggaggtgctcagcatttgggctttgacctcaggtctccgggtgagcgcacactgccaggagctgtacatcctcgcggctgcccacccttgggtttgggattttttttctaaatctttacacatagatgacaggagtaactaggtccagatttttaaaagctgttgaagcagtgatttgagaagttcagtctctggaacgctatgtaagccaaaaaggaggaaaaaaaaaaaaaaaccctcagccaacacacacacaaacatatgtgactcttaagccataggacttaagaacccaaaacaaaaccagcaagtctgagaaccagggctggagaccgacactgagaagcgctgagccctcccccaggagcacgctttcccccaaatcagaaaaacaccgcacagctttgttcttcctgacaaagccccttgcttccagggagccgacagttgccaacaaaagcacagggtggaactcatttacacgcaggctgggcttcaaggagccatcaagtgcagaaatggaaatggctttgcctaggagccctgcctccctgcgactggtaatggggacccctggagcctgggggagccccgcaggtcacagatggagcagggtcctggcctcctggtgcctggctaagcatctgccccacggaagtcaccacctaggcttgtgacatcacagctaattgcccctgacaatgagccaggaactgcaggcccctcagggctgcaagcctgagacttcacagggagccgggaggagaggcagctggggaggggccatcgccaattaaaacccagtgctcagataacaagaaagaagtggttgagggggacagtatcgtctctggtggggagagggcaggaggaagtgggtgtgcggaaggggctgagggtggggtatttgtgccctcatctcctaccacaatccccacccccagcctttacagatgaggacattgaggccaggggtggctgagtggcctgc

SEQ ID NO: 505 - DNA, 2467 bp, Homo Sapiens
aggccctgtctgccattctggttgctcctcgcccaaggccctgtctgccattctggttgctcctcgcccaggcacgcctgccccccacctcagcccctctggcaggctgcggatgttctcacatcttcctgtcttggcacctgtgtcttcacctgaatgtctttcccctttgtctgaatgttgccaactcatcttccaggcctcagcttaaacaaccctcccctggaagcctcccctgaccctagctgggcaggagcctcctctgtgtctccactgttcctgcatctccccatccatgtcagctcttaccactgtctgtctcccccgagaatgttctctcttcatccttatgtacccttcccctaaccccacgcctggtacgtacttggtgctcagaaagtgtcattgagtgactgaatgagtgaaggaatagtgaatgaaccagcctttgctttgccatgaccactgccatccccttgggtaagtcactgttcctctgagcctcagtttccccatccttaaaatatctctgcggccccgcctgcttccagattgtaagtcactgtacacatttttgaagccaccaacactaacgctgcagggcatgtctgtaggtttgccagctgggtctgtgtccccaaaactgtgcggtggccgccagggactctggtcagtgaacgtagaaaggggagagaccctgtttctgagagcagtagcaggaagagcaggggctctggaggcagccagccctgggttctaatctttgctccagtcctctctggctgtgtgacttacagcaacatgtctctgagccttggtttctccatccataaaatagggccacagcatccgcccgtagggctgttgggtggattatatgaagtcaagttcccctaaaatccagcctggatgtggaaagtgctagtaattaagagccttccacccttgcagcccaaggaacagcaggtggagcttgcacgtgggcagtggcgtcccagacctgcccctttgccccacacataacgcccttccagaaggaagggaagagctaggaggggaggggcaggggcctacaggccgcattaaatggtggttttctaccgtaaaattcagcccaatttgaatcccagcactagagggcctatggggtggagccccgggacccccagccccgcccttctccaggccaggtgttacggcgcagatccgcacggtctccctccgcctcccgccgcaagtccccgctgctcaccgccctcgcgcaaggcgccccagcccgtaatccagcagtgcaggccgggctcgaagaagtgggagcgcgcgggcaggcagacggggcgcacggcggccgagcgcaccaccgggtggtcgagctgcagcagcgccacgtcgtagtcatggctgtcctcttcgtggtacgggtgcaggagcaggcggctcaccttgaaggacacctctccaggccagcgcgagttctgccacaccttgcccaggaacacggtccacagcaccgtggaggccatgctggggtggggtggggtggggtggggtggggtgaggtgaggtgggaggaagctgcctctccccatccagggaccctcaagatagccagatccccgcccgggacagtgccctccacacccagccctcccttccctccctgaaggtcgcctagctggtggtacagcgttcagccttcacccactcggcctgcctgggttccacgccccagcttcatccctccctagacatgggtgtgcctctctaagcctctgccacctcatctgcaaatgggaatggcattttctactcgaatgttcttgagagaatccaataagaccgtgtatctaaaaaatgtagcacagtgccaggcccccgacacagatttcttttttcctgtgtgctttacagacccaggctgctctgaattccctgaggctggtgggtcctagtggggagcgggtgggagttgagcgtggaggaattggactgcggcagtcagctgcctgggtggcagatgggcagccttcgggtctctaccctctacctgagggcagtggggagcctgagatggggttaaagagagctaggtggtcagagcgccctgcgtcccagagaggatacaaaaggggatccctgtgcagggcctgggggcgggatctggagcccagatctgtctgggggtggattgggggaggtttcagcccaccaagcagatgggaaagatggccatgaggcctgatgagatgtcccctgggggctccccagccccacctgctacctcgtgtcacacctcggggagtgtcatagcttatgaccaggttgggcagttctgtcctttactgaatccccagcatctagcacagccctggcacatagtaggagcacaagtgttgctgaatgagtgaatgagatgaatgaatgaattactggcccaacttaaagcaagataccaaaagtagatggc

SEQ ID NO: 506 - DNA, 2340 bp, Homo Sapiens
gatggcggcgatcggcggcgttgaggcgggatccgggcgagccgagtgaaggtagcggcgagcggagaccccaggagaccgggctgggcccccaccctgaggcggcagcagccccgccccgtcgccacccgccgccctgggcccgcgacatcacctctggggtgccccaggcccttcgcggcctagcccaggggccgagccggggactggagtagcggccgcagccgcccccaggaaggggctggagcgggcagaaggaggagggcgggcgggagctgttcaaacggggaaggcgggaaagctgcggggccgggagggggcgtgcggccgccccgggggcctgcggacccgggccgcccctccccctgcccgggccgtctccgccctcgggggcgccgtgaggccgccggagacgcgggaacccgggttcaggtcgagctgtgcggctcggaacccgcgatgcgggggtccctcgggctgtcagggggaaagggctcgtggccgcggccacgggagggctggggctgcggctggcaggagaaagtacgaggagctttcttcttttcctcttcacagagctttgttgagctagctgttgccgcaaaactgccgggagaatcccactggtttgccttggggaccacaaaaatggtggtcctgggggctgtttgtgtaaatcacctggtattttgtgtgtttcttgcgtgcaacccggcttggccgtgccttcgtggtgggcgccttctccatgcaggcccattttccctccaccaactactacttgtagattcactttatagcgtgcaaaagcggagaaacatctctgtcccctcttttggagggctaagctggtggctgattatatttcctcctaatagaacaaagtaaaaaactgaatcccaaataaagcctgttgattggacaaggcttctcaaaattcgattgctggtcttatggaatgtgtgttgtcagccaatctgtgcggtggtcgtggttccgcttaattgcactgcaatgagaggattcaatccccatccccgactgtcgggatctctgcagcttccagagctggcaggggctgggagtgctgcctaggtaggtccctggagaagggagtggcaagaggattcggagtcaccgtgttcggagattggaagaaacctggacgaagttgagaaggcatcacttgtctgtatcgtagaagtaacaagaaaatttcagaaattggcaaccggcggatgtgcatcttcctttacctgcactgactggcattttgagttcttgaaaggagtggttggaagaagagaatgcagaatcttggacatggctctcatcctggaacagacctggagttcagaatttctcttactgtccgtgtgacggggcttactttgtttcctttttttcgatactcatttacattatggggtgaagaaggttgttgattgcaggagctcaagttacctcaaaaaaagtctgaaacctgttttttaactgtaatttgaagtttcaaaatgacaaagtgctatatctgaggactttttcctcctgattactttggtcatcccaaaggcctatgcctgaacataacttgtatgcttatctaccagggaaagagcaactctgccccctcctttttcatatcctgaagaaaagtccccgaagagctatttaacaatttgtgcatttcataagtatacatttttatggtaccagttttttacttgtatcaacagtatgaaatagtgaacttttacttatgttgtcatatcttagcacactgagacaaacaaaattattcttgcctcttggagttgacaacattgaattttataaactcccaaattattgaattgagactgggttttaacacctgtttcacatttgccaacatttaatgtaattatgacctcccttttctaatgtgaaaatcaaacctaatattcattttcattaatcctcacaatctactctctacccctgaactctgaattttcacagattgtattcaagacctggaaggaatatcaggggttcatctgatcttatataaatgttgcctgaactctgcctttctttcacactgttgcttgagatttatctggtatctttccaaaactaaaccctgagctgcaataatatcctgattttaaagaacgtagaaattcagggcccatcggtctgcccaagctgtggctgatacagtccgttgtgtttaattttagtttttcaagctcttggctgccccagttcttcagtgaattggacgtgtcttcaggcctcattccttcttttttcttcaggttatttaatccagtaatttataaaatgctcttcagt

SEQ ID NO: 507 - DNA, 2468 bp, Homo Sapiens
acgcctatcccgtagaatggcttacatctaaacagatgacttttgtttttgagatggaatttcgctcgttacccaggctggagtgcaggggcgcgacctcggctcaccacaacctccgcctcccgggttcaagcgattctcctgcctcagcctctccagtagctgggattacagacatgcaccaccaatgcccagctaattttgtatttttagtagagatggggtttctccatgttggtcagactggtctcgcactcctgacctcaggtgatctgcccgcctcggcctcccaaagtgctgggattacaggtgtgagccaccacactcagcctacaggtgacttcttaaatcaatactgagattatagtattatgcctcttccaaagcagcctggtgaggacaatctcccactcccaccctaaaaaggaataaagaaaattgcagcatgaacaaaaccagaatggagaatgggccatttcctggagtggtttgagccaagagggagctgctctttgtccgtgcttgtttctctgagggtctcctgggcacagctgataaaccacccaagtttgaaagacacacgttattttattaatatagccatctctccccactgccccagtggtgaaggtgtttgcattgcaacatggaggggcaccaaatgctctgcgggccctagcccgctgccacaggctaggcctgcctgcagccaagaaggctgctcaaactctagatgccatttggaggcatgaggacctgagcccagaggtggcagtgtcctacccagggaagtcaacagatcgtgctccaggtcccagctctgggctgggccaggactaaatcctggctcccctttcttggtactaaggggattagtgcttggttgtctgtagggggtcagagtagggagggttccaggaagggttccagagtgggctcacaggggacctcctcccctggcctcttggagtccaggtcgtcgagggcgcaaagctgcacgccatcctgggcaagctgggcccgcagcgtgggcgcggtgaggacgcgcagctcatgcagccgctcccaagagcaagagaaagcgtcggggccttcaccgcagccgccggtgggaggcacactggggtagccggggtgcgccatcagctcggctgtcagggtgtggcccgctagggtaccttccaggacccgcgccagggccccggacacgcggtgagcggacatgtgccggccgcaagtgctcaggcccacgaaggcgtctgtccacctgtggggggcgggacatcagaggtgggaccaggccgggccatggccaagggctaggtaggctagggaagggacggcggggtgggagggggtaactggggtggcggcagcggtcgacgccagactcgcttccgggttgagaaacggacacagctagccaggtgaacagccagtgcggagggacagaggcagctatggtaggagacggggcggggagcctcaccgcaggccgtggcgggagaaggggcccacggcggcccgggcgtcgcgctccacggcgcaggcgaaggcacgcgcgggggcctccagccaagtgcagccacccacaccgcgctccagcggcagtcgcgtaaagcgcaccccataggcctgcagcgcctcggcgaacacctggcacacgcctgcgggcggagcgggtcagggaggagcacgtcctttcacctgggggcatcgaacttcccctactcccccagccccgcctgggagtaacgccctccaaactgggatcactaaccacgcacctgggagcacgtgcacgtgctggtgcccgtccgcgtgcgtgggggccctgcccagcagctcccggaagcagcttagttgggcctcgagctcctcccgcacctagagggcgagcgagagacaccttgagcgaccgggagtagctgccgaggataccctcctcgtgcttccgtgtgatggctccagtgtttgaatgcggaagtcatccaccgccagctcctaacggcctcacagtaccctccgggcggagctctgggggtcctcgcgagcatcctcctgtagctgcggctccgcacctgaggcaaatccacgtctccggccgccaccgcctcccggaatcccatcttgccaaggaagaagccttccgggccgagcagcgatgaggcgccacggcgggccggacccacggggcggccctcggacaggttggcgtggaggcccgtggggatgctgtgcctgagggcggagcgcgagctggagcactagcggccgcggagccgcgcgccccaagccgatcgccgccctgctagaggccctcccctcacctgcgggccagctccgccgcgctctccgtggccgcaccgttgaccagcagggacacgctggtcacagccccggccagaaaggcctccacgataccctcatcgcgtcgcgggcagtaaccaaagtcgtccgcggtgacc

SEQ ID NO: 508 - DNA, 2782 bp, Homo Sapiens
tctctttttttttttaggtggcagaaacttagccccagctaaagatacacagaacctttgcagtctgattttctttctgtttcttctcctctgtcctgtctaatcctggtagcccaagtcccaagacagaggagagacagacatgcttctctctcaagatggggggctttgaaagactgatgcctaccagagggctgaaaaggggggctgccctcggagcagagcaaagcgaggactcagtggggccatggagcaacagggggccaggtcctgccctccccaccaacccagcactaactgttctttgcactaatagttactgattgtccacagggctctgggcactgttctaaaagtggggaccaggaggaaagctctctaatggggttgacactccagtagagaaagcaggtaataaacaatgaaataaaccagaacataggaagagttgtcacagaagaggctcctcaatgtggggaggggaagacaagacgtggagaggtacttacgaggcccatgataaacatctcaccattcctgctcagtcagtctctctctctctctctctcagatgcgcacacacacacacacacacactctctctctctctctcttcctggctcttgcaccagatcctccaaattctgtttgacctgcccttgcacacctccagggctctgggattccagcagttggtctcctgccccctagggccattagcaaagccagaggaagctggatggcaaagggcagtggggcccttcactctttcccggaagaagtgtgctgaggccagacgcgtcacgtgacagtgggactcgccctcctggaagccagctcagctggtggagatggcacctcagaggcctcggcaggccctccacccagccctgcctcacggctgcctgccgtctgctgaaagattagtccgagcacgaccaggacgtggacagctccaaggccacctccaccagcaggcctgccctgactctcccagcactggccattacagctccttcctggactgacccctgcgtggttccatccccatgcaggtcccctcccccagggccagcctgaggctcactcaggcttagcagcaaagtgcttcataaactgcaaagtgccacatacatcgcgcctgtggccatgtgttcaagaatgctgtgactaaagtgaggagaaaggcagtttctgtgccacagcctccaccccagatacacgagcccgtggagctgtgggaaagaaggaggaggtgctggacgaagctggaaatggtaaggggaggctggggaaacatccagctgtcagcggcctccccggggcacgctgggatcagccaagagaatgcaacagccaggggtgggagccccctccgcggttgcacacgccaggtccctccagtcttgcaggttcaaatgaaggcttatgtgaagggggaatcgctctggacagctcagtgcccctcagagtcacatcaccaccattttccaccacgcggaggtggttgaaaaaaaggagtcacagatgggtaaggtttgaggggcgtcgggctgacgaggcaaaaaaaaaagtaggtgctgtggtgctgatgggaggttctccctccctcacaggacgccaggaaggaaatggggccgctacagaggtggtgaggtgccagggcccacggagggcccacctgttgcgcgggggcgagcaccaggcgctgggtgcacgggggcccgtgcgtgcctgtgtacgtgcgtgggtgtgcgcgcacgtgtgctcaggccgcgcgtgcaggggccgtgcgtgcgtttgtgtgcggtgcgcgcgcgtgtgtcccgcgtgtgcacgggcgtggcagaggcgggcgcgcgacctggccgcggtagtgcgtgcccgtcgctctgcgcgcccgcccgccggagcgcagcatcgcctccggccaggagtgtgcatgcgtggggtgagtgagcgagtcgggggcccgggcggggtgggctgcggagagcagccacggggcgccgccgttcccaggacgccctggcaccgggcccagcccccaggtcccacggcgaggcgaggcggcagctggggccggccggccaccccctccccaacagctggccgcggcccggggggctgcgggagaggcggagagggggcgtcgggaggggcctgaaggcggcccggccgagccccgcgtcctccctcccgggtgcgggccgcggggggcggccgcggaagggcggggcccccgggcgggcggcctgcggccctcgaggagccccgagaacaaaaggagacggcgacggctcctccgtggtcaaaacaacctgcgctggcggcagcccaaggccgggccgcggcctccgagccctccgccttaaccccttcgccgccgctgcctccttcctgcgcctggctggaggccgcaggggccgaccctccccgggagccggcgaggtgcgggcgaggtgcggactcccggccgcagccgggcggaggtgggacggtacccagtcacgccgcgctcccggctgccctctcctcccctccaccgcgcgcgtcgtcctgccccgccccctttcccacctggattccgggtagacttgccaactcacggctacgtgaggctgggaggggtggggacggctccgaccccagcgctccctcagatgtttttataccccatctcccgtgcagctaggcttttgcaggcggcgcgctccgcaccctgcatgcgggggagagaggtgcttcctcctgcagggcgcgggcacaggtacggcaaggc

SEQ ID NO: 509 - DNA, 2377 bp, Homo Sapiens
catctcagggaggccagttgggggcaggtcctggatctgttttaggtacctgaagcccaaagaataggatacactggctctgctattctttcccacccctcgcctatctacccctcaggccagactactgcacccctgctcctatcactgtgtgacttgtccggcaatcatttctttttttcttttgaaatggagtcttgctctgtcacccaggctggagtgcagtggcgcgatcttggctcactgcaacctctgcctcccgggttcaagcaattctcctgcctcagcctcccgagtagctgggactacaggtgcatgctgccatgcctggctaatttttttgtattttaatagagacagggtttcactgtgttgtccaggctggttttgaactcctgagctcaggcaatctgctcacctcagcctcccgaagtgctaggattacaggcatgagccaccgtgcctggccttggcaatcatttcttttttctttttttgtttggtgttttgagacagagtcttgctctcacccaggctgaagtgcaatggcatgagctcagctcactgcaacctccgcctcctgggctcaagtgatcctcccacctcacccacctcggctcccaaagttctgggattacaggcatgaggcactgcatgtggcctctggcaagcatttaaaagcctgttctgtgacagcccatgacatcagatccactcaagtggagggctggatagagcccccgacacatccgctggcatggaggttcagctcaggagtacaggagccctgaggaggctcctgactcaccgctccatggtcccaaacagccagtggggctccttggtgaaaggcatctccatgccatgaaattgcgccatcttcgtggcaatggctgctgacaacactggctctcgaagctcttgagttttcaatggccgactctgcacccaggaagctatcagggtggtgatggggctggggcaggagtgggaagggctggggcaatgaggggaagtcagggttttgggggaaattccctacttggggtgagggatgtggaggcagacattgggcactggggtagggttagggggtggaggtgccttggggaggagagggtaggactgggcccgtactgggatgtactgttccagccggccctctgggaagactccgtacagctggggccccagcgaccgctccgcaagtatggcgaacatcacgctttctagcaccagggagtccacgccctgaaaaaggatggacagcaaaggggccaaggcaaagtggcacagggacacacatgagggctcgccttcctcccaccagagctgcgacttctgatccaattgcctggaggctctggagcacaggctttagcgttggtctatttttatttagagatgggggtctcactatgttgtccaggctggtctcgaactcctgtgctcaagtgatcctctcgcctcagcctcccaaagctctgggaatacaggcccaggcttcggtgtaatgaggtgttactcagaccgtgaacctcggtgtcctcaactgcgcaacgggaacaatactacccgcatcgcgtaagcgacaggccctaaagccactggtgctgcggcgctcacacccccctcacctgcaagatggctccgtacagccgcagaagcacctcccggggctcctcgccaacgctgggcaggtggtccgggagcgagcagcggaagagcaggttgctgaggcctccgctgcagacccacaccaggcgcgctcagcccgcggccggccctacctgccgcggccccggccccctcccggccaggccggccccgccccgccccaggcgcgggcgcaagaggggggcgaaaacatggagcatcctgagggccccgcggctgacccctgaccccgatccgcgcaccggagaggctgacccctgacctcccacctcacggggtaaaccctcagctcctcgggctgcactcggcgccaggccccgcccaagtactcccggcaccattggtaggctcggcgctcggcgtcacgcgacagcgacgaggcgcgccgccgttttggggtagtgtccgggcacttagactgctgcaagccgtctttggccaggcagccgccaacagccccgcttccggccacagctgtcgcctcggccgccatggcgcgggctcgaccgggccccaggccaggctgcgctccgctcccttcggacgggctcggttccttccggccgcgctcggctcctcttccggccggcctgggcttctccggtcatactcgggtctctccggctctattcggctcacggctgcggcgctcggctctctccgtgccccggcccgggggctctttccgaaggccgaattc

SEQ ID NO: 510 - DNA, 3534 bp, Homo Sapiens
agcaaatggttacatcatgagtcatgaatacagagtgatttattcacaatagccatgtaatatgtgggatttaaaaggaactggtacatttatttctactgataccaaaatcttttaaatctatcattgattgaggaaaacaacttggttagacttagtgtccaatatggtagtatttatgaaaaatattaaatcaagaatagaaaaattgcatataaagccagagatagacctcaaatttttttttttttttttttagatggagtcttgctcttgtcacccaggttctggagtgcaatggcgtgatcatggctcactgcaacttccgccccctgggttcaagtaattctcctgcctcagccggtatagctgggattataggcatgcgccactacactcagctaacttttgtatttttagtagagacagggtttcaccatgttggccaggctggtctcgaactcctgaccttgtgatctgcccacctcggcctcccaaagtgctgggattataggcgtgagccactgcactggccgacctcaaatttttatgcctggagattagtaaagggcatggaataatgaaggggaacttttattttattttgtttttgagatagggtctcagtctgttgtccaggctggggcgcagtggtgcaatcatggctcactgcagcctcaacctcgaggtctcaagtgatcctcccacctcagcctcctaagtagctgggaccacaagcacatggcaccacacctggctaatttttaaattttctgtagagatggggtctcactatgttgtccaagctggtctcaaactcctgggctcaagtgatcctcctgcctcagcctctgaaggtgttgggattacaggcgtgagccaccacgcctggcctaattttattcattaaatatgttagaattaagtgttttcccttgagacctgtgagttttttcagtgaaaaaatattcaaaaggtttgtcagtatgtccataaaaaagaagataggaggggagggacaggacccaggagggcagcctacagcctgctctccccgttctgtcctggggcggagtctgtactgcgagttgagcttttcccaaggcgcatgttactcctggagccaagcctagcagtgcagccgcacagtcagggtggggtgggccaggcggagaagcaggctgcagagggggcagggtggtggcctggggatctcagggaagggctatgggagcacggcggtgtcctcagtgctggggctttcaggggccttggtaccgcgagttgactcttgggggcaggaggtcactccatgcaggggcagcaggtgctggccaccacattgtccagcaaggtggcagcagaggcctcctaggtccccttcctaggaaaggagcctgggctgccctgatgagtctcctgtctctctctctcccgcaggatgaagatgagacgctacaagctctttctcatgttctgtatggccggcctgtgcctcatctccttcctgcacttcttcaagaccctgtcctatgtcaccttcccccgagaactggcctccctcagccctaacctggtgtccagctttttctggaacaatgccccggtcacgccccaggccagccccgagccaggaggccctgacctgctgcgtaccccactctactcccactcgcccctgctgcagccgctgccgcccagcaaggcggccgaggagctccaccgggtggacttggtgctgcccgaggacaccaccgagtatttcgtgcgcaccaaggccggcggcgtctgcttcaaacccggcaccaagatgctggagaggccgcccccgggacggccggaggagaagcctgagggggccaacggctcctcggcccggcggccaccccggtacctcctgagcgcccgggagcgcacggggggccgaggcgcccggcgcaagtgggtggagtgcgtgtgcctgcccggctggcacggacccagctgcggcgtgcccactgtggtgcagtactccaacctgcccaccaaggagcggctggtgcccagggaggtgccgcgccgcgtcatcaacgccatcaacgtcaaccacgagttcgacctgctggacgtgcgcttccacgagctgggcgacgtggtggacgcctttgtggtgtgcgagtccaacttcacggcttatggggagccgcggccgctcaagttccgggagatgctgaccaatggcaccttcgagtacatccgccacaaggtgctctatgtcttcctggaccacttcccgcccggcggccggcaggacggctggatcgccgacgactacctgcgcaccttcctcacccaggacggcgtctcgcggctgcgcaacctgcggcccgacgacgtcttcatcattgacgatgcggacgagatcccggcccgtgacggcgtccttttcctcaagctctacgatggctggaccgagcccttcgccttccacatgcgcaagtcgctctacggcttcttctggaagcagccgggcaccctggaggtggtgtcaggctgcacggtggacatgctgcaggcagtgtatgggctggacggcatccgcctgcgccgccgccagtactacaccatgcccaacttcagacagtatgagaaccgcaccggccacatcctggtgcagtggtcgctgggcagccccctgcacttcgccggctggcactgctcctggtgcttcacgcccgagggcatctacttcaagctcgtgtccgcccagaatggcgacttcccacgctggggtgactacgaggacaagcgggacctgaactacatccgcggcctgatccgcaccgggggctggttcgacggcacgcagcaggagtacccgcctgcagaccccagcgagcacatgtatgcgcccaagtacctgctgaagaactacgaccggttccactacctgctggacaacccctaccaggagcccaggagcacggcggcgggcgggtggcgccacaggggtcccgagggaaggccgcccgcccggggcaaactggacgaggcggaagtctagagctgcatgatctgatagggtttgtgacagggcgggggtggcggcggcccctagcgctatctccctgcctcctgccggctccttggttcttgaggggaccaggagtgggtggggagtgggggtgggggtagggtttccctactgaagcccttgtgaatcaagggtcaggcctttgagctcagaaaatatccctcctgttgggagagggcgcaggccgtgacgtctgggtggcccttatgactgccaagactgctgtggccaggaggtgccactggagtgtgcgtggtggtccctgggtagcgggggagggtaggcaggattggggaagagagcctgcaggatctcaccaggcagcctctggggggtggccaggccgggaaaaagcccaccatttggcatccctgggccttgggctccgtgtgggagaccggcctgccaggaggacccagggctctgtaagtagatgcatttgggtccaggaggaagcgtgg

SEQ ID NO: 511 - DNA, 2484 bp, Homo Sapiens
cctagtagctgagattacaggcgtgcgccaacaagactggctaagttgtgtatttttagtagagacgaggtttcaccatgttgggcaggctgatctcaaactcctgaccttaggtgatccacccgcctcggcctcccaaagtgctgggattacaggcgtgagccaccgcgcccagccgggaaacatttaccagggacaataaaggcttagaagaaccttttggggaaactttgtgaggagcacaattccagagggcccacagcagccacagcctcctggcgtgacaccaggcacactgccggctgcacaggttgctgggcacaggcaggcacagccagtctggaagagcagcccgtcttaaatctttggtttctttccaaccaggagcaaacattggtagaaagagccagggcatatttactctttacacccagaattttcattcattattgaaccatttggcttgcacagtgctctctgataatgtggtccataaaaaccaccattaaagctgccctttcacctgatctgggtggggctaaacgaggaaacgagaagtttcctgtatgcttcaaaatataaatcaatgccaggaaattctgaaaatggatgctgcctgttaaacatgaaatcactaagggagcttctgcaaaacccacccggcagcatgaggaacggtgtctacagcgtgctccaaacggccacggccccgctccttacagatcaaagtttaagccgcatattctcatatttcaaacaaaactacgttacagacatcatctacgtgggcacggatacacactaaacaaggacgtagtacacaattgaggggtgccccggggagcgcggcaggaatgccttccgggaagaatcctctggtcgccggagccctcgcgctgcagaggaaaccagcgatccatcgtggcttcgaggcaaaagacagacatccgagacgcagtttacactactctggcttaaaaggacaagatgttcaataaatatagagaactcagtgtgaagaaaagacaaggacaaatctggaccacgtgtacagacttcaggccctgcctcagaggagtcctgcgggagtccaggaccggcccctcctccacggatggccagcttcctcctgactgcccccaagcccggctgtgttaagcacttcgcgtcgatataaagcattggtatttgacattttaacagtaacaaacttgccagtgctttacacactgccagcttccagagcttatcatccgtgctcccagaacagacgccaaggtcatgctcccagccggattgtcgtagcctcgccgccgtgatgaggcaggtgtggaggccccagcagccttcccggcgctggcgtggaggcccctcccgcggatcacctgaagcagggccacgttgcattgcagttgcacagtattgtaaggatcaagcagcgatgtcctaaccgtaaacgaagaggaaggtgaaatgaaggcaaagagaatcaaccacttcccaaaacttggccacaaaccgttacagaataagtcctgcaaagtggatcaaagtgacccactgctacctcaggcccagatggtgtgacctgcgtggaaatcatataatgtccctaacattattgcaatagagccactaacgggccattttctaaactacactgttgacatcgttaaaacctaagaggccagtgcccccaagtgagcagctgcatccgctgagagtaagcggcgtgggctgcaacccgcagatgcgtacagaactgaaaatgccaaatatgtacacaaaattgttgacaaaagggttttcttctaaaatcaagatttaactatcaaaaataaatttctacatttaaatgtatatatcaacataattggtctgtaataattatcttaaatagttttcacactttcccagtttgtgagcaggacgccggcttctcagctgtgtgagtctggcttcggattctcttcaattcctcgtgcaaagagtcgaaccagctggcagtggactctgcagagacaagcggccacgtgtaaaccccacgtgtccctcactcaaagctggcctgagccccactcctggacaggggctgcagtaaaccccacgtgtccctcactcaaagctggccctgagcaccgctcttggacaggggctgaagtgggggtccatcccccatggaacggtcagacgtcaccgtgggctgtaggagtccagcccacaatgacgggccctgggcgtggaataattcacttagactcccgggatgccgagtttgtaaaggggttgccaatggccaggtgggaaatctgggcatcggtagacctgactcgaactccagcacccccatggaaagcagagcgtccgctccagtgtctgcccactccacccacccacccacctccattttctcagcagtactgagcgcgcaaggcctgcgaggagtctgtgcggggcgactcaatgcgtgtaagagatgtgtga

SEQ ID NO: 512 - DNA, 2482 bp, Homo Sapiens
gtggggggcccgagagcaactgtccccacaggggctgctatgtccagacccatggacctggcatgtgctccatcagccaggctcaacgacgtcagccaccaagcatgctccatctgtgcggctggggggccaggggcacctgacattggagctgcccttggccaaggctgtcccacctgtggtgccaggcaactcccttcctctgggggccttgtgatgggggagaggctgcccgtccagcacccacccctgcttctcaccgcccacagcaccctagcctgagaggccacagcttaagaaaagagctctttattccacgtcgtccgatatttttacacaagtaaaataaaatgcatatctctatataccgcgatctgggtgggaggcggcgttctggaacaaacgctgccgccgaaccctgtaaacatgatggggtggagatgggggtggcgggcggcaggcgtccatcagggaggacctggcctggcctgccccacgggtcggccgcccggctggcttggcggcgtggagagagaccccgtatgtacacacacctggctgctgagcacgctcttgtgtccgctgggggtcagcagggcccaagcactgtccacagcaccagcgccaggcccaggggggtgaggctgcaggtgaggctgggtagggcacctgagccttctgagtcaccagtcccgccacccccgctgcctgcctggcccagacggcagtggctgcgggtgcggttcttgcgtgaacagcctggcctccggcgagggcccgaggtggggaaccctggtggctcggagccctcgggccgcactgcagtgagcgggggctcagcagagccaggcagagtcccaaagggtgagtcattgatgtgccgtgggccagagccgttgcccggcgggctgtcaccgggcggcacgcgtcccttcagcgcattgcctgccgaagctggtcttccaggctccagtactgaggccttgtcagcggcatctggctggcagcacttgggaagccccagcggctcctcatcggtggccctgccggtccagatgggatggtaagggccggtggccacagcgcagccctgcaggtcattggcagctaggcgtttgaggtcacggccagccaggcgttgcgggaggctgcagggcacctcggaggaggagccgcggaacttctgcagccaggcccagagtgggcgtgcccggcagtcacacacccaggggttgtcgttgagcctcaggtactgcagggcacgcaggggggccagggcctcagtgggcagcgctgatagattgttggcaaacagatagagtgtcatgaggcggccaaggtcacggaaggcatgcgggtgcacatgggccacgcggttctggtgcagtaggagacggtcgaggctgtgcagcccacggaaggcgcgctcgggcacgctggagatgcggttgccgtgcaggaagaggtgtgtgaggttgcccaggtcgcggaaggtgtcatcaggcagtgcctgcagcgcgttgtcctgcaggtagaggtactgcagggcagccaggccgcggaacagccccgggcccagctcctgcaggccgcagcggtccaggtgcagcgtgtgtaggcggcccaggccgtggaatgtggcagggtccacagaccggagctgtgcattatcgctgaggtccagctgctccaggagggccaggccagtgaaggcagccgcatcaattcgggccagcacattcgagtgcagccacaggatggtgaggttgcggcaggcacggaagctggcagctggcacatgcgagatgcggttgccgtgcaggaagatgcgctggctggcagcagggatgcccacgggcacagcctgcaggccctgctgggggcagcttgtcgtcaccttgggctcattgtagcatacgcaggcacctgggcatggggctgccacctgccaggcctgcagccacagcacccatgccagcagccggctccctgtgggcagaagacagagtggttagcaggaagggcaggggtactggagaagctggaggttttgctagagccaggtgggccccggagattgggtctcaggaggacctggggctgggtccaagatgtggccaccacccccgggaatcgcagtgttgggatccctgcttcacaggcctcatggacgatgctgggctagaacatgccttggagccatgcactccaccctggaagccacatctgcagactccccataccacacccaggagcagcccactgggtcaccaggggcactcacttgaaggcctcctggaatggacactggtgactgcaggtacctcctcaggactccagtgaacacagagcccgcattgcaggagtccccggggggtcccagtgggggttccacccacagggcctaggaaacactgcaatggggctggggtccctctgggcacgtctatctcaaaaacgggcgcctggatgcccgagggcg

SEQ ID NO: 513 - DNA, 2395 bp, Homo Sapiens
tacaggttgacacactttacccgtcccttcaccccagggccttgcgatttattggcaagggtggagtctcgctcacctggttaaaacgaagacgtcaaggagggaggcagctgtggtcaggcggtaccaggtggtgccagcccaccagtagagaagtctgaagagccggcctggaagaatgaccatcaagccgaaggctccatatggtgtttgggggcaccgctcctttgtcccgtctgccgtcctccctgcccctaccccacccccacctgccagtatgcctctgtcctgccctaccgggacccaggtccttggatcccacctgcccacaccctctgtcctgctctgcagctactccttcccttccacgcaagggggtccccacagctctgggctcccagtgattattctagaatgacctttccccaatggtcctacagtctctctgcatgggcaggatgcccaactgcagagagatgggtaagaaagcactatcaccaagaatggaagtaactgggcacgggttgcagcccacctggcgaagtggccaccatccagagtaaggagcccgcccgtgagacggcgcttcggagccgcgagctggaactctgctggtccacatccgagtagcctgcggggaacgaggacactggctcagtctctgtcactttcgagcctcttccttcactgtcttctgtgagccaagaccacaagtcacccaccctccttcacatccccacagccccacacaggcccggtgtgcagtaaggaatgaaatgggagctctttgacattctgtttcttctgacagcttcctgtttgcatccctctcctcaccagccacccctcaagctgctgttcagaactaggtgctggggtctgacatgcacaccactcagaatgactgagcacccaccatgtgtgagccccacaggaaagtgctggaatgggcctgaatgcaaggatgttggccttaggttgccatagactcgtggggtggggaggacagacaagtgaagggcagtcacagcccagggcaccaggggccaccgcaggccaggctggggcgcacccagggccgggcatgggaggggcgctgtgcctgccacatgctgccctctctccagctccccggggctccctgcccagccttcctgaggcctcccagcagcctcggatctgctcaggagggaggaagcatcgcctacccacgtagtcgtcctcagaggagtagcccgaggaagagcccaggaagtcctcggtggccttgcgccccacaagcccgctggccctgctgctctctgagccacccgtgcctctcctcctccgcacccgcaggtcctcacctgtgcagggaagaaccaggggctcttctgggcctccaagagcttctgaaaagtggggtctgggcagagaggtgctctgaggagggaatcccggggactgcaggggacactgtgaggagtatctcgcgggaggccgaggaagcaaagccccgggacggagggctccacactcaccccagttggcgtcaccatgcagttcctccagggagctcctgggtgggaaccaggactcgtggaccagcgactcactgtagtaggaggtgtgtgcatcagaggacgggcccagctgtggcgctggggacaggcgcttcatgttgctggatttcctcttcaaggtcctgtgggacaaccatgagggcagaggtagggagcagggaggtgagcccagccaggagcatgaaggaaagccacagcctgcggccctgcctagtgcagggtgtgggttcccttgttgctaggcaactcgcagctgccattcccctgactctcccaatgctggcacgtcctctcctgttctctctgaatctcaccagcagatgggcaagacgggcagcggcagctagggatggagccacattcaaactttacaacccactgaaaccagacagacctgacctggcctcagagctagccaaagcctcagggcctgtcttctgggccccatgcctgtgagccgggcaggacgaccaggcagctgctgccacagcccatttcccagtggcctgaggactgcgcctgttctcagccatgtcgctggccagctgctgaggccggacaggtggtgagacatgcaggcgtggggccaggaaggatggtaaggctgacacgcccgtccagagcagggggggttcctgtgagcccagcctgcagttttggggtttccggcctggcttatggttgaagctgcctctctccacttcctgttttctttctttcctttttttctttttgagattgagatggagtttcactcttgtcaacccaggctggagtgcaatgccatgatctcgctcactgcaacctctgcctgccaggttcaagcgattctc

SEQ ID NO: 514 - DNA, 2390 bp, Homo Sapiens
ccagcgggggccaagtggagccagcctggtgctgtcttaagggggctcggctgggaccgcctccaggagggtgacgggtcccaataagaatgaacagccaggaactggggctgcaggaggagtgaggggggaccacctgtgagaagcagcctgcaggtgagacagcgccactgatggggtggggaggggcatctcagaggcgcccatggggcaccagccggatccacccagcaggtgtggagtgggccacgacagaccccagcaaacacgctgcactcctggctccggtctctccctcccgaagactgtgagaggaggtgccactttaaatcaagttcagaattttgacaatcacccagggctgggcactttaatacctgaaatcgtgaatatctttgtgactaaaggagcccaaaagaatttttgttacctgagagagaaaagagaagttcaggaacttgccctagattttatctaagcggtggaaaaaacgggcccctccagggtgcacagggacaggctggagggcaaaggaaatggcgccctctctcttaacagccactctcactctgttgggtgcacgtgtgcattcaaaaactttctcagaaaaaagttggcagaaaaaggaatgtactactttcaagacagcagctcaagctatgaatgcactaagaacctgttttgagacgatccctggcagctggcaaaagtgcaaccttgagaagaggccgtgaaatatccccaacgaaacagaaggatttccaaactgaagaacgttgcagaaggcatcaagcgcggtgccttcgcttcacagatgagtagtttggggcccagcgggtgaagcggcccagctggttggtgcagagcccagcccagcatccagattctctgatttgggaagagctacctttcctcgaggccagctgggatgtgcgaaggaaaccaggtcccgtggagaaagttacctggactttctagcaagggaaagcctaagtaaagaaaacagttggccaagaggaaagacagtggtggcaatgctgagagagtgccgaggaaagagtggagagtttgtagccaagacgaacatttatagtaagctcccaacagccaaggacttgaaagccatcaccgtccagctggacacgagagcaagaattcagtacatcctgccgggccctgctagttgtgcagagcacaaggtcctaggcaagccagtgtcggggtaaaacactgcttccgtcgaaagtagagttaagaatggaatggaaaaagactgaggcctgcatagcgcacgcacggggatttcaaaatggattcgaaaacactccacaatgcaatcttgggagatcgcaacataaaaaggaaggaattcaatgcaggtgagcctcaatagacaccacggcgtgcttctgaaatagatgaaaattgaactgttttccaaatactttgagagggttaccaatgacaggaatcctttcgtctgatcactaatcatcatctcgcttacacagtcaggacagctgtggagtaggtcggcttagagggattctcagggcaggttcaggctagtgttcagtctggccttgaattgtgttctgcagagtcccacagcaggctccgcaggaggccagggtaccccttctagaaaacccaagttttccagctggacaggcctgactcctagtcctgtttctagccctcgtttaactatgcaaccagggcaagctacacaacctttctgagtctgtcatctatacaacacaggagtgttaccttgtagggctgttatgaagcctaaacaaataatgtgtgcaaaacacctagcacacagtaggccctcatcaaacgttacttccccactcctcgcttgcctgggagggcagtgatcagcgcggattgttcttgcacttgtttgtagggacctcctttgggtaggcaggatggtcactgcggtgtttaggcagaagagaggaggagatgagcttggcgccagcccttggctgcgtctcaagctgcgtttgcttatatttcctttttaattacagctttcttaaccgagctgccagcggtgcttctgtgagcctcaactcaggggggactagttaacttgcacagataatagcaagtgcttactgcagcctcttcaagagtagttcacacccacccacccacttcaacacctcaacagagtttaacccgtagcccactggcctttggtgactcctgttttggaggttggggtgggttttaatttctgagttctatcaagcgttctagggaatatggaatattggggtgcagggacaatttcacaaatgaatggaggaagggagaatactgaaatcctgtttgctagggcactaccgcctactgctttgcacaaaggtgtg

SEQ ID NO: 515 - DNA, 2444 bp, Homo Sapiens
tgaggccatgaacacaaacccagtcccacatgccccggaactgcacttgaagatgtggccccaaggcagcttcacacccagtgctctgggcggggcgggggggcagcttcacacccagtgctcggggttgggggggcagcttcacacccagtgctctggggtggggggggcagcttcacgcccagcgctctgggaggggcagcttcgtgcccagtgctctgggagaggctgccccagccagtgctcccaaagctgccgccagctgggagaggatggcaggctcccctctgggtcccgggaggctgaaccagccaaatgggagaatggggagatgggggagaagggggagatgggggagatgggggagaagggggagatgggggagatgggggagatgggagcaatgggagcaataggagcaatgggagggtcccaccaccctgaccccacccccaaccggcctgctctggacacactgtctaatcctcagcagccatcccatcagtccaccctaccagggggtcccagggagataccctttaacagacacagaagcgtaggaggagaacgagggcccccgcctcaaccccaggcttaaggccactttgctcaggcactgggtcacggcaccctaagggtgcccctgctgacacatcagcctcgaagggccagccaccctccagaaacaacgcccccgaggtggggagggccccaagtcagcatcgcatctgtcagatacggaacagagcaggaaccgaagcagggaacgcaggctcaagttatgccagagacaggccctttgcctcagactgtggcctcggtcaggaaaggaggcgcgagcgtgtggctggagaactctacaccaaacaccctggtttcctgagtggaaatcacactggctcaggaaaaggaagggggtgagaaggttggttggctggatggctgcttcaagtaatgcgaaaagtaaacccacgaaaccaccttttgaaaacaaagtgcgagggctgtgccatcctggctgcagcagggtcgtacctgcttccctaaccaatgtaccaccttttccagaaatagaacaaagacaaaagcggatgcataataaatcatttcagcctgccagcgctctgagagatgaaaaacctcgcccagagataggattgtgggtttacaaaaaaaccataaagcccaggcactctgccaagcccctagaacgctgccgggtcgccctttccttctccatgctcagccgtgcgtggctgccgggacagcgctcactccggcaggcgacgagtcagtgtgggaacccaggggccgcctcagtttcgctggggtgttgagttgcagggagtggcctgcaccgactcccctctcccccattcacgccactcaaaagcacactagaggggttttgagatgaaatccgcacacttctcagagccttcccagaccaatgcgcggatgagaacgtgcccattgcggggatgcgcccggctgcggatgtgaagaaacccctccgcaggagcagcgaccctgccatatgggccccgcacacggagcccccgccagcccggggcctcggcctcgggaagcacctgggaggcggcggggaaggttggccctggctggtctgacacacgcctcggggctcgtccttcatgggccaggcctggtgctccacctaccactgctgggaagccatggaggcttctcaagggtgacctgcgaggtgggggtgcctgccttccctcttgaggtaagaggggtctggtcccaccgcttgccgtaaaaaaggaggagcagctcaggtctgcacgtggccctgagcagctcgccggaaggttccagcctggtctttttattccgtttcccttcccagggccggtccagccccacagacaccgtctccacccacgagttggaggcggcctccctggctcatgcgccacaccttccttggcctctgcaggtgtcccatctcacccagaccctgcctctcaatgggtggtaccttcaactactcattctcccttctggagacgtcaaactcccctgactcctccttcctgcctgctccataaccggttggtcctgtccctcctttctccccgtgcccagtgccctggcttcagttctgggtctccaccccacctcccaggcctgcgcattatcagactgctctgatcttctgcccgtcgtccacctgctgccaggctcttttttttttttttttttttttgagacagggtctcactctattgtccaggccagagtgcagtggcaccatctcagctcactgcaacctctgcctcccgggttcaagcgattctcatgtttcagcctcccaagtagctgggattacaggtgcgtaccactatgcccagctaatctttgtatttttagtaaagacagggtttcaccatgttggccaggttggcctcgaactc

SEQ ID NO: 516 - DNA, 2346 bp, Homo Sapiens
ttcttcttcccacagtaggatctgagccacatgtgagctgggaagaggactgttttgttagtggcatggaagtgagaggggtcaaccctccagactaccagtcccaccactacaggtcccaccggcctcagcattcagccccatcacccaacctgccagccccaaaaccaacctcctcagcatctcctgagcacctatttgccccaatgccaagccaaggacagacttggtctccggccctccaggatcctgtcttcactgggaaggctggatagtggggagccggtagtccccagtaggtggggcccggaattcttcttgcaaccccaaaggaggtctaagagaggctgtttctgggaaacttgaaatccagccacatggggccaagctatcaggttgctttcttctactgtggcttcctgattcacctgccagagcctggaccttctcccagggccaaagctctttctccagcccctccctccactgctccccagggggtcttactctgagccagaaaaggtgctcgagacagaggccaccttcctttcacctgctcctgagcatggcctcttctgagaggccctgggtctgtgtgacacctctatggacatattgggaaagccagctgtccctccgcccctacccaggaggctggggctacagcagctggggcttcagctctctggctttctggttcccttcccacctgtcttcctggtaggacccagcatgctctgggacagagtccacctgacatgggacagcaggaggctgtttctgccaaaactgggtgaaagtggtgtcctcggtatggcttccccagccagaggggctatggtggtctctgtccttggtggagtctccggagtttgaaagagatggaagtttgggggcaaggatggagcccagagagaggcaggcaaacacactactcagaaaaggcaaagtttattccagtgttgacagagagagggtgagccttgcacagcaattctaaaaacatgtcatctccttcacctaagaggtaagaaccggctgtaagtcatggggtcactaaaccggccgcagttacagtaagcagaagaggtcacggctcaggccttctcagactttccctgggacacacggctctctgggggggcccggcgaaaccactcggaccaggagccatcgtacacggccacatcaggcttgccgcagaggtaggcagccaaggccacgtggcaggcggtgactcccttgcggcacgtggcaatgagaggctgcgagagatccaccttcttggtctggaacagagcacggagctcttctgggcccttctcgaagccatcctcagtcaggaagtccatgaaaggcatgttgacggcaccacggatatggcccgagtccagtcctgggcagggcagaggacacagcttaggggatgtatgaggggtggggactaatggggcctggaggattccatcagctatagctggaaggatagatagctttgcaaataaaaataacatctttgctctgcttggagctcaatttattcccagccccacctattatcatttctcatgacttaagatgcctgcaactcctctcctaacacctgtcttgaagtagagatgcccaaaatcacacctgcttgagaagacagcggcatgagtctcagctccactaacctttaccttgggcaaatcatttcacttctctgaacctcagttttctcatctgtaaaatgggctcagtggtacatacctatctcacagccatgttgagaagagcaaatgggacaacttattgcaaatgctatgtgctgagaacacagcggtgaaaggcagagacacagccaggccctctgggagattccagtctaacaagaaaggcagatgctaaacagataaccacataactaatcagatatgtccccattttacagatgaatccgctgagtcttggcaaaacaacacggctcacctaaggccacacagaaagatgaaggcagacccaggattacatcggggcctctggttttctgttaagcacacagttgcagaaagagcaagtgacctggtgtcagatgtgaggtcaaatcccactggagcaagttatgtcagctctctgagcctcagtttctccataggaaaaatggaaatgagagtatccactgtgtattggctgctgcacgaagcgggtggcacaaggaaagcgctggctttggaggctggcccacccaccctgccatgctgcgcccccagccacttcaccacccatggagggggtagggggagaatagggacagtgtgggcctttttggtcccctccaagaacttggatggaagcagagtggag

SEQ ID NO: 517 - DNA, 2400 bp, Homo Sapiens
tcacctcaaacctatgtttcagctgcttcctactcaaaatggaaataataatatccaccaaataataacatgtacaaaacacttagcagatagaagatacttaacaaatagtaggcttgctttcattatttcctgcaagagtttcctgttaatcacctggtttatttgcatgtgcaggccaaaccttttatgataaattggaccgtgtcttgtccttattgttattgttccacatagtttcattttgcctgatattatttggggtttagaaattttttttggctgggcgcgatggctcatgcctgtaatgccaacgctttgggaggctgaggtgggcggatcatctgaggtcaggagtttgagaccagcctggctaacatggtgaaaccctgttcctactaaaaatacaaaaaaaaaattagccgggtgtggtggtgcgtgcctgtaatcccagctactcaggaggctgaggcagcagaatcgcttgaacctaggaggtggaggttgcagtgagccgagatcgtgccattgcactccagcctgggcaacaagagcaaaactccacctcaaaaagaaaaaaaaaaaaaaaggccaggcatggtggctcatgcctgtaatcccagcacttttggaggctgaggcaggcggatcacaaggtcaggagttcgagaccagcctgaccaacatggtgaaaccccgtctctactaaaaatacaaaaattagccaggcttggtggcgcacacctgtaatcccagctacttaggaggctgaggcaggagaatcgcttgaacctgggaagcggaggttgcagtgagctgagatcgtgccactgcactctagcctgggcaacagagcgagactacatttcaaaaaaaaaaaaaagaaatctttttgtgtgtaggattctgatgttgtaaagagataaagattgatgctgtcaacttctggcctgagtgggcagtgtgcatagctgcagtgttctaatagcctgttttctcctttctgtctctccagctgtccctgggacaccccagtatgtggacgagcagttcctgtcacgcctcttcctatttgtggccctggtgatcatgttctggctcctgattgcctaatgctgggctcctgcctacatccgtggcagggctctggactggtgacgtgccaccccaactcctggtgtttggcttcctggctaatcttgactcctggaatcagtgggatcagtaacacatcaaggagtcttgtttcttcatcagagctttggaactcgagaccagttggcgatgacccctgaatatcgccaccgctgtaaacactctataacttcaggccttggcattgagtcatctctcatgggtgacaccatgaaatcttgtttcagccagttctgcaggtcctgactctgcagagggaagaggcagaaagagagaaactgtcagagtataatttcacctgagtttaatattacagaaacaaagggatgcaccaaatggtatttctggaaattttcatgtctttaaataccccttggtaagttgcttctgaagccagtgggggctcctcagatagagaggttcccctttcaaatcccagtgccgctctgttctctttccttcccctcccactccccctcttcttcctctgtagagatgcaagaaattgctgtcccataaaaatcataattgcagtagctaaagctggggtcacttcgtgaattcaccagagactcaaagatcttttattggctctgggctgtgctcagtgtctttggcctcagagaacaacttgaatgacttcctggtttcctggcataaattattcctggtgagacatgtggcttaactcacaggtttcccatcagctttctccctaaaactatgttcatctgcctctctctgccagagaacatacagccgagaatactgccgaagctgagactgactactgtgcattaggaaagacctggagtcaggactttggtgggatttggagctccgaggcagtaataactgaacaagcagccctgtcccctaggctgcagaagcttgaatgcatcctctcccagaacctgccacaggaaactgggggctttgtcaggtcagcccaactgcatgcaaaagaccaccatcctcagaagccaagttgtcttttatgaagaggcaaggaaaggggaaacccacatgtgaccctgattttggtatggcttgatagagttccctgaaaactccttgtatgtgtgctaaaaccagggaagcatgtgactgccaagcaggcaacccctgatgatttgtaaagccaggtggcagggccttggggagccccagcacaatgatattgtgtggtcttccctcctgtggaatcgaggggaaattattcttcccaataccttgatttgattt

SEQ ID NO: 518 - DNA, 2500 bp, Homo Sapiens
aataggggtccctgggcctctcaacaggaagtaccagatcaggcagctagcagacaatcatcggtggaccacagggccactagagtgagacctatccatagataaagattggccagtgatgaagcccatctgggtgcaaaggccgagctgagaggcttctaccaactggagtgtgccagtgagggtgagcagaaggtggtctccagggagaacatgggcagggtttggagccagcacctccccagggttggaggaagcagacccaggacctgcctgactgggatggggctctcttctgccatctccgcctccacctgcctagctctgctcccccgccccgagagatgcctccaggcttgggtagatgaagccaggggcttcctgccttcctggaaggcttttccctgtctggagtttatgaaagaccagcaggcaatgcggcaataaaaaagaccttggggtagaggggcgccacgagaggcgggtctggcgctgacatccaaccccgtgccccctccctgcaggatgctggtggactgtgtgcccctggtggaggtggacgacatgatgatcatgggcaagaagcctgaccccaagtgtgtcttcacctatgtgcagtcgctctacaaccacctgcgacgccacgaactgcgcctgcgcggcaagaatgtctagcctgcccgcccgcatggccagccagtggcaagctgccgcccccactctccgggcaccgtctcctgcctgtgcgtccgcccaccgctgccctgtctgttgcgacaccctcccccccacatacacacgcagcgttttgataaattattggttttcaacgatcctgactcctctctgcgtctcctgggggtggggagggggtttgaaccgaaggcagctccgcaaggtctccaactccagcagggatcctcagaggttcttcttccgacctcccaccccacccgcccgcagcaacgaaggagtcgagcctcagttaaggcaggagggaatttagtggagctggggaaggaagaaagtggggttgggagaacctccccaaccccatccctgctggcccggggacgggcatcggctctcagcaagagaagtattcccgggatgctgagcgcttcattctgtctccaggactcaggcaggtaggtcccagctccgccgcgcccccggacctacaggtcagcgtggtccgaagtttcctctgggggcttcgcgggcgcccacacgtactcggggggcacctgcgcgtcgggcgccgccttgcggtagaagccgagctcctgcactagcgcattgatctcttcgcgggtcatttcactgagtgggatgcgctgaggcggaggaggggcggggtcagcaggctgggcctcgcctctggcctcgcccccagcccacctcccacggcctcacctctagttcctcgtagcggcggcccagcagcacgagctcagggtcggccccagggaggtgtttcatcaccaggttgtgactggaggtggtgttaaggagcggggtggtgggcagagggaggtggtggtttccgcagccttactgatgggaacagcattgcctcctttgctcagagcttactctgtgcccgggaggggccagggtctccgcttatacgtgagaaaattagggttcaaagaagtaaagggccctcctctccattctgtggcagtcatcactagtcaatctctcttgcccacccaacatggagaccacctcagaatcctctgggagccactaccaatcaattcaacttgtcagttgaaaaccatctgccacccctttctgaagttacgtggagattctcccaggtgcccatcccatttcccctcccccagaacagaaggatactagaatggaatgtcctgcgtgacgaaagccttcacctggggaggaaccagagcatcagagaccatgacctcagtctactcgaggtacagacgagacactgaagcccagtgaggtcataaagcaagtcaggtgcaggctagactctcagcctaggctagactctcagcctagggatccttcccccctccccgccccagtcattgggaccatgttgcccactccccaagaggctcagggggaacagagctagggacctcttccttcaaactcacctcctttaggcggttcagctgtcatcccccgcaggtctggagggggataaaatgggataggtcaggagtccttcacgtttattccagtcacatccccaaagccatacttccttatccctgagttgggtcgggctgtgagttatccccggatcagcagttcccaaggtctgaaggaaatgctggacccttgtgggcagaagggggaactgtgtatacaggtggggagactcaggcctagagacaccaggggaaaagagcaaggccagagacccacagtgtgcctgccagccttggggcctgtacatcctactggctgtggactgactcccaatgcccaggggaaatgatcaccctgctcctct

SEQ ID NO: 519 - DNA, 2470 bp, Homo Sapiens
gtcccctgtcccacgaatgttagaagcaagcaaaaatgctttcatccaaattaccttcctcttcataaaaataagaaaatcatgtaatcaaaataatcttctgccttctcaatgagtttaccacctgattcagcaattttctaacaccttcatttgcctcattgtaagtagtcccagtgcatgctggttagatggcctctgggtctacatcagtccaactgaatcaggagaggagctccagaaggtgcactggacagtcatgccagaggccgtgtgcaattttaggttagatcagtggttctctgccctatctgaattttaaaataactgcgaaacttctaaaaaatatattgctgctggggttttatctatatagatcaaatcatctctaggggtaggtcctgggctcgagtttttttgtttttgtttttgtgttttttaatctccccagttgcctcctccgtgagcgaaggttgagaagcatagctgcccctgtgaggaactcagccttcagagagagcctgcccgccgcctctcatcctccagagaggctgtagggtgtccagactttgcaggcactgttgttcctcgttaagcctgatgctgccacctaattaacacttgtttatattaattagttgccatatgcattgaaggggagtggtcctttttgaagtttctagttgctgactatataagatttggcctgaagtgggacttctggaaactcaaccaagataacgacttccaggttcttccaaaagcttatcttccaggcataggcaggtaatgaaacaacccaactgcggttttttccataacatctttcaccccacagtatcgatggagcaggagggtgtggacaggctttcctgggtttttggtgctccttgtcaggtgttaaaacaaagaggatcattgtgtttcttggaactggcctaaacgtctatgtttaagattaagatctagggaaatgcatttccgtttgacacccactagtttctgattgtgaaaagggtaccaacctgtgcaatggcgccgcgacccggccgcggactccagcctctaaagtcgggtacctttaattaggagaaattaagtggggctgctacatattttgagaataagtaacactatttaaacttaggcagccttaaccactaacttaaccgctgaattctcgctgctacatgtctcctaaatagatcagcataatcttaactaggacttaaaatgcatcatcttcgttccggaactcagaacctgcagccgacgggagcctttggaggcttaatgactttaattatggcgagaaatatcttctcccggtggggaggggcgcggccggtggcgaggagggcactttcccgggtcggagaaggccggatggcagcccgccccgaaagtcccggcccgctggattgggggttcgggggtggggggaacatagagaagcagggctggtggaggggaggagggaccctgcagggcggtacacgacgggtgggagtggggaggaggagggctcctggcgcggggaggagccgcgggaggggggatgttggccgcagggcctcggagttctgagctgtgtttgtggcttcagcgctttgatctcctgccagggaaacctggaaggtcaggccgggctgcagccaagccctggagcgaggagccggcgggtggagctggcagcactgcgccacccaccctcacctcccaaccccccaagcagtgaagcccgcctggccgccctggcctctcgcccccgctcctgccgctgcccctgcccctgcccctctttacctcctgtgtgttggtctcctgtaggccgtagattaaggggctccaagtcttgaaagtaagctagccaaatgccctgcaagtttggcttagtaaaatcatgtatgttgtatatactttaaaagaaaccagatatttttttaaagctgtgtgcgtccctttcctccaccctcctcatccccaccctagtacaaattacccaagaaccacaggtgattccccctgctggttcgtgagtgttagggtctagtttgcctctcctcttctaccaccaccaccacccccgttcctggcaccaggattttctcaccggttacccgtgtgctcttggtgtgtgacctcatttcctatggaatgaaaagtttctgtcggaaaacagggcccttggtgaggcaggccttgggagcccccttgcccagcgagaatgtcctgtgtcatgcagtgactcatgcttcagagaacagcagctgaccagaatgttcaagagcctggtgcctgggtggtcactactaagtgaagaactcgaggaggaggaaaggaaaaagtgaggagtaaggatttaaaatccacttagtggcctccagagggagggggataacaggactcaaagagcctgggctctctggcctggggtaggacccgccaagagggacctgtgggcgtcagg

SEQ ID NO: 520 - DNA, 2491 bp, Homo Sapiens
aatgcaaaaatgctttgaagaaagagacattgagcattggaaccaagtattctacgtcctcttccctgcaacactggggactaaggattattatctgcatttctggtgaagaaactgaggcacagagaagataaactatggttctccggctacaaagtaagcagcagagcctagagtttgaagccaggtctgacacctaagtcccgtagtaaacctcccactgaggtaggcaagcctcgccttgcagagagtggcaaattagggaaaaaagaatcaaatgtgcttgagtttaacagaacatatacattatacttaaagagaaagatacttttcttacaaaaagtttgaggacaaatgagacttcatgtgatgcgtcttgcactaaaaaaaaaaagttagattatataagccagactggcgttgattaaagaagagcaaggtaataaatacgcataagaagaaggaagtggctggctctaccttgggcatcacccaagttacaggcaggggaggggataggccctgcatggggacagtctcctgacttgtcttcttccttctctacttccctcccttcactacccctccctccaaaacccaaaaaaccttaagcaggaaaaaagggagctaattaaaaaagagaaaaacatccttgagaccaatgaagtctccataatccacagtgacagacagggacctgcagaacagcaatttgattaaataaggatataagggatttaaaaggactctccagttgtgtaaagtgtgtccatacgtctgaaaaataccgtatttatttggctcccaaacctgaaaaccttctgacgggggagattgttcccatttggaaactaggaagaaatcacaaggcaaggccatggggttctggcagggctggggatcccatgttgggtggaaaccccaagaagccagccaagggtctgcaggaggggccctggcagagagaagcattagaatgcaagggcaggtaaagccaccctcacagaaggtgactgtgggctgagcctgaggcccttcccagatggggaagagagaacagcacacctctcctgcccacgcctcggtatctcactcaagaatcagctgcccgttagtcacctgtcatcggagacagctctgttggcggctttcagaaaaagcgaagcagccagaggatgaatcgttattcggggaacacacctgcacacaggacaggaatggatgggagtggggagcgccctggggctactgttcaaacgccatcctcatggtctccaagacttgcatcagcagctcagccgctgatgaattataattctcggacaagctgcagaggcccccctcgttccatgtgttcacccctgccgctcatactgggggatttatgcttcctggggctaggaggagaaaataatgagtcactggggacaagagaaaaacaaaaatgccctgtatgtgcaaaaccacctaaaatggaggcttttagaggacactcaaatcccagccaactagccagaaagggttttgctgggggtatattttatgtgtctttgctatctttggatgcagtaaagccagaaatgtttatatctcttggagggatcacctgtgcaaacaggacaggtcctcttgagaaggctgtttgttctcctgggatctcgaacctgagaagaaatggtcctggcctggcgcggtggctcgcgcctgtaatcccagcactttgggaggccgaggcaggcagatcacaaggtcaggagatcgagaccatcctggccaacacggtgaaaccccatctctactaaaaatacaaaaaattagccgggcgtggtggcaggcgcctgtagtcccagctactcaggaggctgaggcaggagaatagcatgaacccgggagctggagcttgcagtgagtggagatcttgccactgcactccagcctgggggacagagtgagactccgtctcaaaaaaaaaaaaaaaaaaaaagaaatggtcctgcatctctgacttgggaggtccaattaagcagaggaactgttggctgtaaaccttctaaagcagaggatcctttgggaggctgaggcaggtgatcatctgaggtcaggagttcaagaccagcctggccagcatggcgaaaccccatctctactaaaaatataaaaattagcggaccgtggtgggctgtacctgtaatctcagctactcgggaagctgaggcatgagaattgcttgagcctgggaggtggaggttgcagtgagctgagattgtgccactgccctccagcctgggtgacagggcaactccatctcaaagtaaataagtaaagcagaggaccctgatggccacccccaagttcatagctacctgcacactttatgtggtgaagcactggtggggggcccaggaagccctgcatgagttggttgtagctgccatgattccaactcccacgccaccctctgcacctagccacagagccgcatctccagaga

SEQ ID NO: 521 - DNA, 2478 bp, Homo Sapiens
ctcttgcagctaggtatgttctggcctgagaagctaagtaagaatgttatgtagaacatccaggaagcctcctttaaaggagaggggcatgcccttttctctcctgtttttccacctgctgcctggaatatggctgtgatgctggggctccagcagccaccttggatcatgaggtggcctagaggaaggaagccaggagttgagaacagcagagcaaaaatgtggtccctgatgattgtccagccaccacaccagctctgaccttcctacctctggacttcttttatgtgggagtgaaataaactttcaccttaagctgctattttccccgccccattatgtgaagctgaaacaaatcctgacagaccctcatagtatataaagatgaggccatacatttcctatccacatttgcgttataacttgtttctaggaggagactggaaagcagggctagatggcccagaggtcctatggggctgaggtcagcaggcctggccattgggccccatgggatgaaggcagaaaaggaagctgagcctggtgtctgagacggcccctcaattacgccatctgatctgtgactctgtggagggcaaggtttcttttgccaccttcccagcaccacgcccgaattcctgggaagttgccggaagggaataacagaacctgccctacttccttcctttctttgcatgagggatagggagaatccctgactgagatttatacttaaccccgaaggaaagaggaacgtgaatgtggattggaaaaccactgcggggtgtttgttaggctctgggggtgggacatggagggcacccagggacatcagggcagatgcccaatggtggagccccgctgtgtactgcaggggcagggctcactttgcaggccccttggaaggtccaacataggtcagagatgctcttcagagcctgcaggagagcccaggtgtggggagagggctcggagcagcagcagcagtgatggcagtgccttaaggaacctgggctcaggcactgaccctgaggagctggcgatgcaggtatggggcatccacgcagggctccagcaacctttgggaaggagaacccggggtctgaaggtgaggcgagtggacccaggactggataacttgggggtcccagggaagtgagatctgaagcagccaggtcacaccgggccttcggcagcaggtagagggctccccgtgggaagtttctggccgctggcatttggcagctgctccctgcagaggcactgggcgcagagctgtgctcaccgtcctgaaatctgcgacgcttagcagccctgttccagcctcatcatagcttttgaacgtgcgccgcattggcctccagcagtgcacaattttgggctgaatacgcagcagagcagagtaaaaagatggcgtctccgcgccggcttctttctagacacaagacaagaaggggtgaggagggagcttttgaacacgagggttggggtgggctcctcctcgcctcgcccccgcctcgcccagccctgctccggcttcacctcccaacctgctccgctggctctgaatcgaggagggagcctgccagaactcgtcacaaagatgcgcacccgccccctgaccattgtgtgggctgtttaaaaacgtgtattacatcagccatctcatttacacctccccactggcaacccggaaagaaggcaggtctctatccccacttcacagattaggaagtggagactcggggaggtaaagtgacttgggctttgaccccaacacacttcaggccacaccacctcccagggaatgcaacgagatggccgggcagatatgggccaatttgaaaatagtttgaggaaaaaaagagatttcagtctgtgttttctagtaagttattataatgaacagtgttaaaaaaaattcacaaggttgtaattatatctagtaattagaacactacactgtgattacttcatttaggtgctattagattgaaaacaagacatttgaacatgatttagccccaatgtgtttgaatatcacaaaggtgaacggtaggcaacaatgcgtaacacatcttgggaaagttgaattttaacataacactatgtaagacagatgagcacagggttaagctgctttcattttttttttacatcatttggcacgtatgatgtgtgctccccaggtacccaagacttcatgagctgccaatttgcccaatcagctgatccacaggtggggaagagagggtgtggggctcacatgacctcccacaccacacatcacagggcaggaccaccagcccggccagagcccccacctctgacccaccttgcagggaggggcggcacccaagctgccttcccccgaggacatctttctgctgcctaatggggtggagaaagctcccaaatcaccagaaaatgaagtcccctttttagctcctctgcagggagacatttgacctgacctcc

SEQ ID NO: 522 - DNA, 2292 bp, Homo Sapiens
aaggggctgcagtcctggcttctggtgagaggactgcagtgccggggctggttaataagcacccttcatcctgcaggaggccggcgcagcatttgtgagtatctgtgttgaatctcttcgtggatcagatattgtgtcttcttgctcagagtcaggttggaaaaggaaaacttgccgccggtgtgcatgtgctccaaatcctcagcttgggcaagggcacgggcgtcgtgaataaaggagccattcttgctggccttttctagaaattgcccacagcttgcaaaaaggctgtgttccctggccccggctgcggctgtgtaggagtctgaatatcattttccccagaagttgaggtccctaggttaggcccaccttgtcccaaatgggcagcattggccttgccccatgcacaggctccaggcggacagagctgctgcaggcatgctgtcagggggacaggctgccccccagctgtgcatggcagtgtgtcggaaagaacaaggcctgtgggtgcccctgagccgggtctggagtcctgtcctgccacttctcagccgtgtgactggagcctctttgctcctctctgaaaatgggtctggtggtttgttcccaggttcttaaccactgtgtggagtcacacctgcagaaggtcagctcataacagatatggcaaccaatgtgacctttgcatccttccttcctggggtcaggagcaggtctaagaggtggtcaggctaaacccctgtagggctgtgggtactgctggtttcctaagccccgggaccttctgggggccgggcggaccttaagttctgtccacctgcctctcctccatcctcactacccaccttgtccttccggctccttccctccctgctccgcctctcatcggccctctgtcctctccgtccggagaggggaacgtgaaggaggtgaggagggagtagtgcaggaggatttgggtctctccttctttcccttttccattctccgagggcttaaccagctggtgaaggttcttaaccagcaaaggaggaagcagccggggccggtgagggtgaggccggcagccaggcaggaaggcagcaggaggaggaggaagcggaggcggcaccttctgagaggcgcatgctcagtgagtcgtgaagatggcagggctggcggagcggccgccgcatctgatctctcccctttttttaggatatgtgatggcgtccagtttggagctgggataaggttcctgtagccgacacccctacaggagaagctctgggactggggcagcagcaaggcgcccatgccacacaccgtctctcgaggaaacgcggttcagcgattctttgactgcggaccctgtgggaaaccccgtcaataaatgttaaagacacactccgaggcagcgtggatgtggtttgctttcactcaacagtatggcccgcgtggcctttccccgggaccacccgtgttctcacacacccgcccagtgtctgcgagtctccgtgtttggttcccgtgtaccagacatgatgtattcagagccaggcagcaggagggagctttgccccagaggaagctcagccatgctgttacggagagggcgcgctcccctcgatgcaccagccgttgtcagaggaggcccacggcagcgggcgcttggagccacagtgctcgagccatttgagtgtgtgagtggcaagggagaaatacccaaaccgtgtaacattagggacactgaagcaaagacggagcctggtgtctacagacgaatggcagcatgaatgagtgtgcgttttctggggctgctctaagtcaccacaaacgtgggggcttaaaacaacacacattaatcctcttgtagtctggagatcagagtccagaatgggtcttgctgggctgcgtcctcctggaggcgctaaggggaaatccccctcctttgccagcagtgagaggcaccacattccttggccgacgtcacctgcatctttaaagccagccatgtggtgtcccccatctctccctcttgcctcctctgcgtctctgctgtctttgaaggacccctgtggtgacctcggatctgcccggggaatccaggggtcttatttctaggtcagcagatgagcgtccttaattccgtctgcagacttagcgcccccttgtcatgttatcgtcacgtttacacgatccagggattaggaggtgtgcgtcttcggctgggtgggagtgcgggacattattctgtctcacacaactagtatctctctaatatttgggggataatcttaaattggtcac

SEQ ID NO: 523 - DNA, 3056 bp, Homo Sapiens
gaagcgcacacatggggccatccccaccccacagggctgccctcctgccacccagcagccgtgatgaggacatcgtgatccctgcggacaagtctggcaaaggcccccgaggcactcacgtcttgagccatcccagccctcccgccttcggcacgccttgaaggcctgaccatgggggtgacagcctctgagaaggtggtccctgtggtacctggcagtggaccgcaacagtgcccgttactttatccgcttaacaagtggtcaccaggaagccctggaacaaagcccagaagaactgggacaggggccgctagggttgctagtggggacagggtggggtataggaagctgtaggacagatccagaacacggggccctgctgggcaagagggcgacaggcagtagcctcagtaaatcgaggaactctccatgggacctgaaagctgaagacgggcagggagtcctgtcctgacctccaagaggccggcactcccgcacccacaccgcggccctgtgcttcccgcgcccccaccgcgtccctgtgcttcccgcgcccccaccgcggccctgagcttcccgcgcccccaccgcggccctgagcttcccgcgcccccaccgctgccctgagcttcccgcagccacaccgcggccctgtgcttcccgcgcccccaccgcgtccctgtgcttcccgcgcccccaccgcggccctgagcttcccacgcccccaccgcggccctgagcttcccgcgcccccaccgctgccctgagcttcccgcagccacaccgcggccctgagcttcccgcgcccccaccgcgtccctgtgcttcccgcgcccccaccgcgtccctgtgcttcccgcgcccccaccgcggccctgagcttcccgcgcccccaccgcggccctgagcttcccgcgcccccaccgctgccctgagcttcccgcacccacaccgcgtccctgtgcttcccgcgcccccaccgcgtccctgtgcttcccgcgcccccaccgcggccctgagcttcccgcgcccccaccgctgccctgagcttcccgcagccacaccgcggccctgagcttcccgcgcccccaccgcgtccctgtgcttcccgcgcccccaccgcgtccctgtgcttcccgcgcccccaccgcggccctgagcttcccgcgcccccaccgcggccctgagcttcccgcgcccccaccgctgccctgagcttcccgcacccacaccgcggccctgtgcttcccgcgcccccaccgcgtccctgtgcttcccgcgcccccaccgcggccctgagcttcccgcgcccccaccgctgccctgagcttcccgcagccacaccgcagccctgagcttcccgcgcccccaccgcagccctgagcttcctgcgtggcctgcgctgcctcagagcccttggtgtggggtggggcacacaggcagggaccaactcatggagtctccagcctgctttgcagtgttctttataaaagctatggatcctcccctgcctgccacatgccgtgcccaccactgtgacggtttcttccacggggacctccatacgacagagagcaaggcgtcagttaaggatcactgggcagtcgggggctggcggtgctaagcagcaggaagcagcccagctggatgaggagcgctggctgtagagactcctctgctgggccctgccacccggcaggattcccacggaggagctgcacccacatcccaccaaaacctccaatttctgcagaataaagctgagtcccagagaagggaagagacttgcccaagtcaccaacaggtcaataatcatgggggcccagacagggaagcccaagtggcccgactgcagcccatcatcggtagctaagtccaagcagatgagtccctggggcagaaggaagagtcaaatggccctgtgaacacggaaggtaaagaaaaaccccacttcattccaaggaagcatgtagcaagatgtcaaaaacagacatcccggtgacatggagttgcagggggaaatagtgtgaggactctggaaggagcaaggcatgaaggactgcacgtgtggtcctgcgctgatgtgaggagcaagtgcacggagtccccacagcaggaggggggacgggaatgagctgtaggttgctgggtggagagccttcccaccggaatgcctgagaggaggcgaggacgccgggcccctccacgcttttccctgggctccacgctgctctgtgaaagggaagggaatcatccatctggaatatgaaggaagaataacaaaacctcactgtccaccccagagaagacacggtcacagaggctgcatgccacactgcgggtgccacagggagcctgtctacacagcgtcctcacactgcaggtgccacagggaccctgtctacacagcgtcctccgactgcaggtgccacagggaccctgtccacacagcgtcctccaactgcaggtgccacagggagcctgtctacacagcgtcctccaactgcaggtgccacagggaccctgtctacacagcgtcctcacactgcaggtgccacagggaccctgtctacacagcgtcctccaactgcaggtgccacagggaccctgtctacacagcgtcctcacactgcaggtgccacagggaccctgtctacacagcgtcctcacactgcaggtgccacagggatcctgtctacacagcgtcctccaactgcaggtgccacagggagcctgcctacacagcgtcctcacactgcaggtgccacagggatcctgtctacacagcgtcctccaactgcaggtgccacagggaccctgtctacacagcgtcctcacactgcaggtgccacagggatcctgtctacacagcgtcctccaactgcaggtgccacagggagcctgtctacacatcaaactgaaggctccacagggacccagtctacacagcatcctcacactgcaggtgccacagggaccctgtctacacagcgtcctcacactgcaggtgccacagggacccagtctacacagcgtcctcacactgcaggtgccac

SEQ ID NO: 524 - DNA, 2500 bp, Homo Sapiens
ttgaggcaactcatgctgtcaatgtagagtgaaggccagacatttcataagaaatatgcaaatgtccccagactcagaaacttcttttttactttatttgtcccttcactccaagggaagctaacatcttggaactttgtgtagatgctaccaagaagaagaagaggggcccagaggcatgcagaacccagctgaaaaagaacaacccacttatgtctgaagttctaaaccagctttaactactcttgttaagagctgaggaagggacttaggagaaaggggaccaaactcattcctcctctccttacgaatttcagtataacttgttctaagctaacttttattgaatgttgtgggctgactgctattctaagtcatttgcttctctcaaacaccctaagaagtgctttgacccattttacagatgaagaaactgagacccaaagaggttaagtaactttccaagtggcgaacacaggtggcagagaagattgaagattcaaactctggctgtcagcctccaaaacctgaatttaccactgatctccatggcattggtttggattagattacctttaacatcttttccaactctgagattctaggattctctgatgtcaggacattataaacctattataactctcctaaatttgtcaaaccaattctagatctctatgattacagacatgatacttttagaatcaatatttaaatcaaggtaggattattacacagaaaacacaactgagtagaatctacctttgccatgttgttcttttcagaattgaccctaaaacacagcgctatgtttgtcagagccagtcatttgtaatgtgtcagaatttcgactctaggcaagtgctaggagctaaaatgcaggttccttcaaacttccaagtagctgcggtgccaagctgatttcgatgagttgagttcttactgagcagttcaaatgaccagactgtaaccaggggcttcattctctcacccacgaagcactagggcagtcaaggggaaagactgacgcagaaggaatgaggttcccatgggctgggtccaaaagacctagagcgagtgcttagttgaaacatttgccaaaacctcaaggaacacccacacaaaaataagaagttgctcggcacagaagtcagggtaggggatgttcttcgaaggccacactccatggcaggcatacagcagcacgcttaaacatggttcctgttaaggctagagaggcaccattcacatagaagaagtcatcatcgtgactctacccaccccgcgcccccaccgcgtaattgaatgctgagtgtggacggcacttcttccagcacttggctgcgttaccgtgctcagttggcaagccttgggggagaagagaggttcagaaggaagaccatctgagtccatcagaacaatgtgtgcttttaacaaggcaggggcgcccaaactcagtaggtccaacagaccaagttatgctatgaaggtcttgtggaccacctacccccgccaaccagtcaccacttaaaagatgagaaaacgccagctcacaggccaaatgggaggcatttagaagagacaccaatgaagagatgtctggctttgtattaattactgtaggtaaattaataccaaatgccaggaagtaaagtagaggcattttcctattataaacccttgggacaagcccagagaccaccagcagtccagggcttgtgtacgctgagaactgaggggataacagaattgtgcaacaccttggtgccccaccgcccccgttaccaaatctcacagttcacagtatcgccttggcacactgggcttgtgtaatactcatggacttgacctggaatcacaaagcggactcagcttctgttacattcattcaccccagtgactctgggcacacactgtgcctctgaaggaggcacagtggccataaatggaaatagcatttgcctgcttctggggaccttggtcatagacttctgaggctttcctgggagccagtctaagataatgggtaagagtatggactctgaaggcagagtcctctgcttggaatcctagccctgccatttcccaactgtgtggccttaacaagctacttagcctgcctgtgactcaggctcctcatctataaaatgggcataatagttcctacctcatagggttgtcatggtgattcgtgggctaatattaaaggagatttctcaacctcagtaccattgacatttggggccggataattctttgttctgggggctgtcctgagtattatgggatgtttagcaacctccctaccctctacgaactgttgtgacaaccaaaattgtctccagacattgccacatgtcccaaatatttcctaggggggcaaaattgcctccagttgagaaccactgtattagattatgtcgtagatacaaatagccaaatatcagcaatttcacgtggttcaatctaacaattataaagtatttaacagttaaaactc

SEQ ID NO: 525 - DNA, 2780 bp, Homo Sapiens
cacgcagctcaagattgccagcaatcccttcgcgaaaggcttccgggactgtgaccctgaggactggtgagtgtcctcccccgagagagtgagcgccgggcgcctggcgcaggcgccgccctgatccgcctcccgcccgcaggccccggaaccaccggcccggcgcactgccgctcatgagcgccttcgcgcgctcgcggaaccccgtggcttccccgacgcagcccagcggcacggagaaaggtagggccggggtcgtgggatccgggttccggccctgtgcgcgctctaccccgggccggcggcctcgcccgacctcgcctgcgcccccggggcgctccaggctttcgcgccggttgcacaacggccgcggcggcgggcaagcgcgcactcgcccgcccggcccgacggctgcgccccgcccgccgccgccgccgcccgcagaggggcgcgggccccggggagggctcggggcgccggcgacttggggtctcgggcacgctggcaccgactggtcggggaacaccgagggcggccaagagccttctctccgccagggcctcgcatggggcgtcggagctcctcggcggccccggccggccgcgctcactcctcggccctctccgcagacgcggctgaggcccggcgagaattccagcgcgacgcgggcgggccagcagtgctcggggacccggcgcatcctccgcagctgctggcccgggtgctaagcccctcgctgcccggggccggcggcgccggcggcttagtcccgctgcccggcgcgcccggaggccggcccagtcccccgaaccccgagctgcgcctggaggcgcccggcgcatcggagccgctgcaccaccacccctacaaatatccggccgccgcctacgaccactatctcggggccaagagccggccggcgccctacccgctgcccggcctgcgtggccacggctaccacccgcacgcgcatccgcaccaccaccaccaccccgtgagtccagccgccgcggccgccgccgccgctgccgcagctgccgcggccgccaacatgtactcgtcggccggagccgcgccgcccggctcctacgactattgccccagataacacgggccctgtcgcgctcccgccccggtcctgcacagccccgaagttcgccgggcccggccaccctgccccaagggcaagcaaggaatacgttcccccagccccaggggccaccgcggctctccccttccccagcctcgaagccatgggggccccctcgccacccccagccccttgggctatcgaagtatccggttccccagtccctggagccaccgcgggtccttccccggccccgagggccaagggggtccccgcccgccagtgccaaagcgcccggtcggaggcggaaggaagtgatatttattgttctccccgagaccgcgtcgcccgcggcccggccggcagttgcagtgtagacagcccgagagccccgcctgcaggcggtgtagatacatgtagatactgtagatactgtagataccgccccggcgccgacttgataaacggtttcgcctcttttggaagccgcctgcgtgtccatttatttgtgcccagttagatcgcgttgggaatcttcgggacagcgagcccggggtagctcagggccctcagggcctccccagccccaatccctgccgactgtaggtcggtcccggtcccacagcgccctgtccgccacgcctcctgccctctgcccgccccataggggctcccactgcccctcccctctccgaggcccctcctgccaggcctgtgcactccccccaccttcccaccgtcccgtctcatcccaacctccccagggctggtggtaccgcccaggtgtgcatcctgcctttttacttaaattcctcccacctgcagttgtccctattctgggacttgggcctgcgccctggcctgttttcgggacagatgcttgtgcttttccatggaagctgggaagaagggtcatgacagacactgccggtcggtgctgggagggggagaagcccctgaccgggatggggtcatggaaagacaaaaacaggcagcactgttctgctagcatttcccctgccggcctagcccaggcccgcatgttccctccttagtgactttatttgctgtgagtgtccctacggagtgacctggccagggggcacaatgacagtagccatgagtcatcttgagacctgtgtatgaagcatttttcccaggccaggtggctaagggacctctccccgttaactcaacaccagggatggggcgagaggaactctttgatccctcccttcctgagcgcaagcaggaagggctgacagccggtcagcgccaaggctgctgacttggacacaagatgaacgggaagtgcacgtggccgaggctctgtcccccacctcccgtgcctgtcccagtgtgtttgtggcaactgctgccttctaggccactcggctcatcaccccacgtggtagcggcagcctgagtgccacctctccgagggcacagccaggagtttccagatgtccaccctcgcggacctgtttttcgtatacatgtttgctctggcggcgtgaagtgagtggggtcttagtaattgaatggcaggaaccattcccagaggccagtctagggtgggagggggtctccaggggccatccaaagcctcaaagggcatctagcaccagagagtgaggacctctgcagcatctgcccaggctccgtgagcacggctttggagatgcatttg

SEQ ID NO: 526 - DNA, 2333 bp, Homo Sapiens
gcgcaaaaggaatcgttggagggtcttaatgacccaaactgaaaacaacgacaaaaagtcttcaaggcatttcccatttacacagtttaaaaaataattatgaaaaggaacaagacaactcaatggtctgactaacgaggcgtcggccattgtgctgtgtgttggggtaggatggggcctcacctggggcctgcatttccaagtttctacagagttctacactgaccccaaggtggggtcggttggagggatatttaagtccagtaaatataaatgcaaactgcacttccccgtgaaaaagatttgaaaaatattgcagcattctcaagctgcaattcaaagattgacggggcacattagggttcccgagatccttacgagagagatggtagtgaggcatcggaggaggtttttgcaaaaggttcctcctccctcaccatctctgcccctacctgcactaccacccctgagccagtgggtatgtgaccatctatgtctgggaaaatcccttctcagggcaccactaaaagatatctttagatgaaatcgatgtcgagggaggaattttcgcccgtgctgtctccacctgctcaggcttgcaggggtgtgggcgtggggccatgtgggtgtgtttgggggtctgtggaggatgggggagggttgtaggagaatccttcctgttccccaattctgaaaagtaaaacttaactcacctgtttacaaaataccagccattgtcttaccccagctcactgtcaccctgtaggctcgggaggattttgttgaaggaaaaaaaaaatgtcttaagtatttaaacacgttgagccatgcatgcatccgtccacagtgctgtgggttgttttttttttcttttttttcttgtcccctccctcccttcccttttctttttaccaaagtatattcatcaaactgctgagttggaaagatttgtaatgagtttttgagctgtacgactgtgtttttttttcctctccccccgccctctccctctttctaaatcttcatctgacattaaataaagcaaatcccaaacagattaactgtcgcacggttctgctccgtctcctcagtctgtttccaggtctggcggggggccgggctgcggtggcggcagcggtgggagatgccggggcggccggcggaggtccatgtggcgctctaggtgggatgccagcgtcctgaaggcggaggccctggccctcctcccctgcggcctgggcatggcattctcccagtcccacgtgatggccgctcggcggcaccagcacagccggctcatcatcgaggtggacgagtacagctccaaccccacccaggccttcaccttctacaacatcaaccagggccgcttccagccaccgcatgtgcagatgtaagtgggaccggtggggtgggggtgggggcggtgacggccccctggggtgggtgcatggtctcgggtgcctcctggttctgggggcactgtaacaagcattgaatgtttgttgactgcaacaattctggaattctaggatcatcggggctctgagttgggagggaccggcaagaagttgcagatggatggcctgtgggccgattctggccgcagtcctgtttcacttggccaggagcatgttttacaaatatttaaagatgaggtggatgcacagaaaactccagacttctggcttcactttataaaacccaaaggcctggaaaccccaggcccacatgtcctcctggcagcgtctggcgggggccacattcccgatccctttcttggcatttgggtggcgacccctggtctgatttacgctcctcattgtacacatggggagaccgagccccagagaggggaaggggctcgccacaagccccatggcaggttaggacaccagtcttgggctctttgtttcccctccctgcccttccttttgtccagaccctgtgcttctcttgtgaaagcagagatgcttttccaaaaggactgggggattctgttgtctgcccctcggggcattgggggtgctcaagcagtgaggccctggggagcacacagactcaaggcccccgtgagcagcaggaggacttgtcctgatgcctgtgtgcggggccagcctttccctctctggatttcccgaggacctggaaagctgtgggtagcttggggtggctccagaggtggtcgagctcctggccctgctctgggtggttccctgagttcctggagcccccctcctcctttatccccattgcttctcccatgagccctgcacgacagagcttacctggtgaggaaccaggggcccaggcccgtgaggtgccccaccctg

SEQ ID NO: 527 - DNA, 2567 bp, Homo Sapiens
attactcttgtgccaaaatgtccttgtaattagcagttctggaagataaattgaaatatgtgatttttcagggtccagccggcctcgggactgaaccccagtgtgtgtgtgtttcagggcacaagcatgtgtgtttcaggacacgcggggtgcaagtgtttcggggcatacgcgtgtgtttcagggcacaccgggtgcaggtgtttcggggcacacgtgtttcaggacacacggaatgcaggtatttcggggcacatgtgtgtgcttcagggcacaccgggtgcaggtgttttggggcacacgtgtatttcaggacacacagtgtgcaggtgttttggggcacacgcgtgtttcagggcacgccgggtgcaggtgtttcagggcacacatgtgtttcaggacacacggagtgcaggtatttcagggcacacacgtgtgtttcagggcacgccgggtgcaggtgtttcggggcacacgtatttcaggacacacagcgtgcaggtgttttggggcacacgcgtttcagggcacgccgggtgcaggtgttttggggcacacatgtgtttcaggacacacggaatgcaggtatttcggggcacacgcgtgtgtttcagggcacgccgggtgcaggtgttttggggcacacacgtatttcaggacacacagcgtgcaggtgttttggggcacacgcatgtttcggggcacgccgggtgcaggtgtttcggggcacacgtgtttcaggacacacggagtgcaggtatttcagggcacacgcgtgtttcagggcacgccaggtgcaggtgttttggggcacacgcgtgtttcggggcacaccaggatgcagatctcttactgggtgcaaagcccccaactccttccccgagccaccagagtacggctcccagatcggagcagcccctcctcgggccaggcagggtgtggaccctgccctgaatgcactcagcttccagccgattctgcccctccctccattcactgcacaggcaggcgctgcaggccgtagggagggcgtgcgtctcggtcctcccgctccgtgtccagtctgggaagtgtctcaagaccaccctgggagaggcctgggctgcggcgccttcgtccctctgctccgcgcaaggccggggatcctgctctcccggagcgagggtgtccggcaggcaccagcggccagcagcagccggggccgggcctcacccgaggaccgaggtgccgatgaacgctcatgttcggaagacactggctccctggtttatgtatttacttaattttaagttaggctccccagatccctaaatcaacagtggattctgtaaattgttgcgtcagaggaaaatctaagcgagcccgatcgcgggaagcaccgtcgccatgaaaggcggtggctcagcgccacctgccgggacgcggcagccaagggagccggtgtcgggggaggcctgaggcctcgggtcctcgggaggaaacagagctgtttgcaggaacaaaggaggaaaggagggccacggctgttcgaagaattcttacacgaaaggcatgaaattagttggaatcatttcaaggaaaaaatcttcctccaaataggcgctcctgcgtttagcagaagtgggtttcattgccattgagcacggcctggggtctgcggggctgttttcagaaccggagggaagcaatccagctgcacacaagaggtcctggggagaggaatcctccagggcctggagtccccgctcgagctgcgtcacacctgctgggttggaagcctccactcagcgggagaaacacaatccctggctctggtgtttgtggcagtaaaatccccatccctgcaaagccactgggcggaggccaggccttgcaagaggcctccctttgctggaggaagccctgggccctcggggaccccgcaggaggcagacgctggggacagggtccggcccacgggcagctgcgtccctccccagtcctggcctccctgcctcctctgctctttctgatccccccaccggctcccactgcccacagggcgctgagccagcagcagaaactgaggtggagacagccttcggccctcaaaatctgtgaaggagtctggaccctgggaaggcaccgaggactgcccaggatctcagaaaaggatgacagccaggtcccttccttccttccttcgtttttcaagttgttgggttttttggggggggggggttttgttgctgttttgagacagagtctcgctctgtctcccaggctggcgtgcagtggtgcgatctcggctcactgcaacctccatctcctagtttcaagcgatcctcctgcctcagcctcctgagtagctgggattacaggcgcccgccatcacgcctggctaatttttgtattttcagtagattcaggtttcaccatgttggccagtctggtctcaaactcctgacctcaagtgacccacccacctcagcctcccaaagtgctgggattacaggcatgagccactgcgccccaccgtgtttttcaaatgttgatggcagctcagttgccccccatttcaataaatg

SEQ ID NO: 528 - DNA, 2312 bp, Homo Sapiens
agtgaatgagtgcttctattttttcctgatacatggcttaagtgtatagctcaatgaattatttgtcccctattcagtcagtacctgctcagaggctgccatcattctgattgctaatagcatcaattggttttgcctgttactgaacttccttgtttttttttttttttttttttttttttttgagacggaatgttgctcttgttgccgaggctggagtgccgtgatgtgatcttggctcactgcaacctctgcctccaaggttcaagtgattctcctgccacagcttcctgggtagctgggattacaggtgcgcaccaccacgtccggctaagttttgtatttttagtagagacggggtttctctatgttggccaggctggtctcgaactcctgacctcaggtgagccacccacctcaacctcccgaagtgctgggattaccagcatgagccaccgcacccggctgtgttcttgaactttctatacacagactcacttgggtccccgtgtgcctagcttctgccccgcgtcagttggaggcctccatccgtgtagttgggtgtgatcatctatcctcttcagctgctaatgtttggaccccggatttcctcctctgtcgcgggcctgccgtcaccgcccattctgtcttccttccaggtctccacctctgggcaggagagttgccgaccacctcgggggtgctttctctgcgcttgaacatctatagctgcttctgaggggctgggagccgggcccctgggagagacgagccatgaaccccccacagcctctgcatttggggacctcaccttaggagagtgccatttacagcttccgccagggcaaaggagctgagcagccatcccaagcccagcccacctccctcccccggcccctggtaggcatggactagcagctgtgagcagccagagctgatgcccggcccccaggggggcagaggcgccgccaccatgagcctgggcaagctctcgcctgtgggctgggtgtccagttcacagggaaagaggcggctgactgcagacatgatcagccacccactcggggacttccgccacaccatgcatgtgggccgtggcggggatgtcttcggggacacgtccttcctcagcaaccacggtggcagctccgggagcacccatcgctcaccccgcagcttcctggccaagaagctgcagctggtgcggagggtgggggcgcccccccggaggatggcatctccccctgcaccctccccggctccaccggccatctcccccatcatcaagaacgccatctccctgccccagctcaaccaggccgcctacgacagcctcgtggttggcaagctcagcttcgacagcagccccaccagctccacggacggccactccagctacggtgagggcctgggccatcttggcccacttttcagaggctgaggctgaggcccagaggggttcagtggctcctccaagctccaagtgagctccaagtgaccacagaggtcaggcccagaccccacatcatggatggggagggggtgcagtggtgggaacaagctgactccccaaaacacctgaggttgagagtgaggaggtggagtttgaattctagctgcccctcacttgctgtgtgacctgggcaagcacatccccctctctgggccttagctgaaccagtcacccacccattcttgcccccttcaaccaaagccttcccctcatgtcggaatgatatcatggagaggtgaagggcctgggctctagattccaatccagttctgcctgaatttcaggaagtcagttgacctctataagttcaagtcctcgcctggataatgagtctctcggggtcattgctaagattcagtgccaggagaggcgcaggggggctgatacttagtaggtgctcaggacactggagctgttgttatctgaacttggtttcctgtaactcgacaaatttgggaaaccactcacaggaaccgcaagccacaggccttcctgcccagccagaagtgccaccttggccgttcggtcagagctcacctgagaaccatgggcccctgctgccacctggtggccactccctgccttgcgggagtggctctaacacccctgccccaggcggctgctcagaaccgcactgaggactggtccacagaaacccgattctgtctcaggtctgtagtcctggaagcaggggctggacatgtctgtccttcatttctatacagtcagaccctgattgctggtcccatcctgtgtccacaaaccagctcacgtgctatgggttcacctgcagccatcg

SEQ ID NO: 529 - DNA, 2439 bp, Homo Sapiens
cattacttaccagagggttgatgctcttgtcagataggtcatagtcagtggaggcattgttcttgatcagcttgccgtccttgataaggtagccctggccaatcttataaatctgaatgaacaagaagggtgtaaggctggggcattagggacaaataacccagacatgccagtgtgctgacctgcaaagcacgctagaaggcagctgaggcctcagtcccagtcacagcgtatcccaaggtcagagcaaaaagctggctggccctccaggttcctttctgtaaggcggctgggctaaaactaaagatcctgctgtacaacacaggcctgtcacccccctggtggtggcatcagggaccaataagactagtatccccagccacaccagtcagccccaccacagccactctacaggatggcaccttacaaatcatcaagatgggccagaactgaccatgagaagcaagccactgatgtccacgtgatgcataagctacagtcagtgaagcagcactgacaggcacagaaaccccactccccatcacgggggcctcttcccacccccagggagccactctcagaacctcaccttcttgttgatctcagtgcggtgatggtagcctttctgcccagcgcgtgccacagagaaggctacacgagcaggatgccatgccccaatacaggccaccttgcgcaggcctcggtgggtcttgcggggcagcttcttggtgtgccaacgactggtgacccctggaatggatacacattacttcacctcagcgcccagcacctcccactgaccccttcctgctactcagcaattaccaaccatggctgggtcatctgagggagtgataagattatttcatgtgcattacccacaggtctcccctgtcaagctggataggctctgggggtgtcaccctgaactcaattctgaatgggtgctttttaaggcatccattagtttaagctcccccattcacagggactgactaacataattccaagctcccctttgcagttatcagtaggctacaaagagcaaagggtccaggaacgtgttaagaagttgtcccctggccctccgctatcccagccacttctgaccacaaggctgttctcagaaggaaggcagtagagaatggttctacactgtccgattcgggcgctgtacccagcgctcactctgagcctcatcaacgaacagctgggcctgaaaccacttctcccccaggtttgcacagcaactcaagccaccgcaaagctcacctttgtagcctttgcccttggtcaccccgatgacgtcgatcatctcatcctgcccaaacacttggttcacaggtacctgctgctcaagcctctcgcgggcccagtccagcttctcggccacagtgcctccgttcacctggatctccatcaggtgggccttcttctggcgcagaggaagcaggcgcatctaggagaaggtagacacagctcagctccagctgccagcgctcctcccacagcagaggaactgcagctccatgcggcctgattgatgtcaagcacacggcaaaaagccagtaactctgaacaagtcactgaacctcaccaagaggaaggaactttcatttttgccaacagcaacaacttaactttggatactggtgcctgagttactgtcaggatgagcggacaagacccacaccacaggcaaacaaccagatcccagcccctaccagcccaatgttcctgtggctgtcctttgggtcagttccttttggggtactgcagtggttttacctcagccacctacacttgccctagtgacaagcctgcttttgagagagcacaagctctaagtaagaaaatgcatcaccgggagcggtggctcacacctgtaatcccagcactttgggaggccgaggcaggtggatcacctgaggtcaggagttcaaaaccagcctgaccaacatggagaaaccccgtctctactaaaaatacaaaattagtagggcgtggtggcgcatgcctgtaatcccagctactcaggaggctgaggcaggagaatagcttgaacctagaaagtggaggttgcagtgagctgagatagggctattgcactctagcctgggcaacaagaacgaaattctgtctctaaaaaaaaaaaaatgcatttaagcataaagctttcactcaaggacagcctggcaatgtcctgacaaaatttcaacggtggacatgcactctcatccgtggtggccctcaccacatggggttgcactcagcacttgagatcagccaggataaccagtaacaggacagcaagaggcacccactctaaccaagtcaataaaaagcctgctcagctcatcaactaggtttccaggagagcagccagtacctcacaaccgactttcaggcaggcatttcagtgttactggtgagtcacca

SEQ ID NO: 530 - DNA, 2453 bp, Homo Sapiens
atacacccccagaaggacaagggagagtggatgctggaaagacagagcgagagaccatcaccagggaaagactttattcttggaaggacatcaaacctgggggggggtcggtagtggagctgctgtttcttctcctgtatccaacagttctaactctggttttctccattttcagctctttcttttcctggccttctcattgctggttcctgcaagctccccctctattcttcgcccaatatattctttagtccaaagtaaactacttcttcccattccccacactctccagtcctctctcctcccttattgcaggctccagtgttcctgccttctccttggtgcacttgccatctgcattaacccctcccttgctgtgctcagctacacaaatgccaaagtcactaacactcagttccataagctttaccttgccctccttatccccctaataaaatgtctgcattttggccaggcgcggtggctcacgcctgtaatcccagcactttgggaggccgaggtgggcagatcacgaggtcaggagatggagaccatcgtggctaacacagtgaaaccccgtctccagtgaaaatacaaaaaaattagccgggcgtggtggcaggtgcctgtagtcccagctactcgggagactgaggccggagaatggtgtgaacccgggaggcggagtttgcagtgagccgagattgagccactgcactccatcctgggcgatagagcgagactccatctcaaaaaaaaaaaaaaaaaaaaaaaaaagtctgcattttgtcctggcctgtgcccggcatttctgccctggtggctgcactgctctggggtcattggtcttggcctggctgcagcatctcatggatcttggtgagaaagttgagcttcccctccagctcctgagcccgcttcttcagctcctcagctgactctgactttgccccctcaagcaagtgctttgactcatatgcaaggctgaccacatccagcagaagcaagatgcctccagtggctgcacccacgatcatggttcctctgctcattgcctgggcggggccttcaacaaccctctcaacctgttcaccgccttcagctgagattcgcccaatgatatgcgggggtggggcatacgctcctaactgagggttggctctggctcgtctgatggcacggatgttcctcccaatcccttgtgtgacttggtaccaattgtcaactaaggtaagaacattgggtgtgttcccacccacaaactccttcatcacctttgctacattggtgccgctttggtccaagttgcgggcttgggctcgtgcccgcaatttgtttactagttctaccacactgcaggtaatcccagccacagcagctgctgctcccagacccatgccagtgtccaagagcacaaaactgattccttctgtgaagggtgccagacccaggccgaggagggtcaggatgccagaggtagtgccaacagagttggacaccacattggcaatggtggtgcctctgtggacctgctcaacctcctctgcaagggcacggagcttccttatgtgatcctcaagctcccttttcaaccgaggaaactctttcaaaaaccactgcctgtgctgctggtctttatcgtggcggtttttgtccttcatgaccatgtgacttgcaagcttgttcagagctttacggagctcatctgcctcatccctgcacaaggaaaggttaaaggattaagaaatgcagtttccctatctgtgaaatgagctccatgcgatctctatcctgtgtaaattgcagagctttcactatcaatcaaatagaaacaaattttacaaatggaattaattatctttcaaactcaaacacattttgttcatcatagatattcctcagtacttattccatatggaaataaatatcttaaaggcacctcagatgctctttcatggtaggtgtttgataaagatgcctcctcactcaagggcaggtcaacaccgtgactgccaaagtgtttggagagggaaaactctgcagatgaacaaagagcagtgagagtgagacaaagagaccttattaccaggatggcaggaaagtgaagcatgaactttacccaaagagaggccttccctttgtcctcagctcctgggaagtgatctccaggcccctggaatgtcctgcctggtaggaacatctttctttgcctggtgatttggccacgggacagtatagcgatgtgatggatgatagggtttggggctatttggtgtctttcctgacttccagaggacttggggactaaaggtgtgagatctcagggaagggctggagactctagccatgagggcagcttgtgatccagccccagcagatactctggacactaaggcatgggttgagaaagaaggactttctccttgaccaactccagctgggctcttcagagc

SEQ ID NO: 531 - DNA, 2305 bp, Homo Sapiens
aggcagctccactgggctggaggctgtgggtgcccacacagggtctggcccacaggaagtgcctgaaaggggggtcgacttggtgacggtctctcccctcctcccaccaccccacatatccccaggaactcacacggtggggatgtactctccgggaaaggcgttggtggtgtagctgatgagaaggcaggtcttgcccacggccctgaaagacaggaagtgcaagagggcggcggtcatgggctctgccggagacgtggggaggtttctgcctggtcctctgcaaagacctcagcatccacccagcctagccctctgggcctccgtctccccatgtgagatgccccctgtctgtgttctcacacccgagagcctgcaagtcatgtggatgtttgttaaagtggagacttcagggtccagccccagagattctgatccacaggtgtgcgcagagctggcaatccgcttttcccacaggcttctccaggggccagtgatgtgggacagagggtgcccagcagacccaggcaatgccgaggggcccccgacgcctgacctgggcttcaaatcccagctgtaccacctaccagtggtatgatcttggacaagtcacttaacctgcctctgcctcagtttctccatctagaaaatagagatgagcccatcctcataggagtgtgctgaggagtaaatccaacgaggcctatcaaagcactgagcacagggcctgatgcatggcagcagccgatggctgctagggaagacctgaccctgctcttccctctcacctcccccgtggagcagagcagttaccaggtcagggtttgagtcagagtggtctgggttcaaatcctgtgaggctttgggcaaattacttagcttccctgaactttcattttcccacctgtaaaatggacctattaggtttggtgagaggataaatagagaaggctagattaaccccagagctggtacataggaaggaagtgataacgcgcgcctcctccaccctcagcatgcgaggctgggagcgggtgcaggtagctcagccgaagcccagaggccaagggacagctctgggccttcccctgccctgcgtggttttgtcacttcctgctcagagaagacagctcatcctctcctcctaccatcgccctcccctgggcctgccaccgaggtaattttgaatgactggaacgttaacccttgacttccgcccgcccctcctccgatcagatacaaagcagaagtgaacagggctggggcaggcgagggcagataaggagccatgcatcagaatcagctgaggctggtggacaaatgggcccgcccccacctagatgggtcacagccaaagtcggggccacagggcccaggccaggagagctgagtctctcaaagccttgggctgctcctctgtagaatgggaaggctggacaggaggcccccttccagctagaacatgctccagggtgagcctgtaggctggaccctaagatgtggctgctggcaggcatgacagattgacaaattggacctgtccttttattttgtgtttttttaagagacagcgtcttgctctgtcacccaggctgactgcagtggcaccattatagctcactgcagcctcaaactcccgggctcaggcgattctcccacctcagcctccccagtagctgggactgcaggcgcatatgccaccactcctggcttaaaaaaatttttttatagacataggttctcgctatgatgcttaggctggtctcaagctcctggcctcaagcaatcctcccatcttggcctctcaaaatgctaggactacaggcatgagccactgcacctggcctggacctgtcattttacagatgaggaaactgaggcccccaggggacaagacagcctgaagtcactgggatctgacaactgagaagggtctcagcccagcctgcccctcccctgccgaccccacaatcaccctcccatcctttagcctcctccttccctctctgtctctcaatgtccccttgcctcttctgctcctcacccacatcccccacacatcctccccaacccggtaggctgaggggaggggagagaaagtggagggggtgctagaaggcacatactacaagcaagacagccactcagcttatctcaagcgaccccacagcatccccagggcataggcctcctcccagatgaataagctgaggttcagagaggtgctgtgacttgcccaaggccacacagcggcaccaagccagtgacgacagcccaggtcagcctggggacaaaggctgaattt

SEQ ID NO: 532 - DNA, 3096 bp, Homo Sapiens
tccaggccactgctgttcaggaagaggtgctgcagcgacctgcccacaggctggaaggctccgtcacgcaaggccctgagtgggttgcccgagagctgcagctccaggagggcaggcagcccctccaaggccccagtgggcacctctcgcagctgattcctgtccaggtgcagcttctccagctcccgagctgggcccagcgccccaagggacacttcggtgatgcggtttccactcaggtagacccagcgcaaggcccgtgttctccccaggtccccaggtgccaggcggtccacagcgttgtcctgcaggtgcagggagaagaggctgggcagggcgcgcagggcagcccctggcacctgcaggaaacggttgcgttctaggtacaggtagccgaggcggggagccccttcaagggcagcagcgctgaggcctgcgagctggttgtcggagaggtacaggtagatcaggcggcccagcccggccagggcgcccgcttccagctccgcgatgccgcagtgctgcaggtgcagcgacaccaggtggcccaggccggggaaggccgctcggggcaccgaggggaagtggttccgcctcaggtccaggagctgggtgtcgctggggaagccgcggggcaccgcctgcaggccgcagccctcgcagctgctgtgccgggactcggggacgcacacgcaggcgcgagggcaaggcgcgactgcccgctcctccccggggccgcgcggagggccgcgcggaggggcgcggggcccggccacagcccgctcttccagctcttcctcttcctgcgccgcgtccccagggcagcgcaggtcccagggccgcagggcgtccagagcctcgccccgcaggcgccgcggcccctggcacgcgccgtccgagcgcacgcgcgcccgcgccagccactcgagtaggggccgcgcctggcagccgcaccacagcggattcccctgcagccgcagccggcgcagctggcccgggccctgcagcgggggcagggtgtctagctggttcccgcggaggtcgagggtgtgcaggcgcggacagtgtgcgaaggccctgggacccagggcctgcagggccccgccgtccagcagcagctcccgcaggccgggcagcgccagcccgtcctcctcgcccgcgtaggtgagcgggttgtggcccagctccagacgggccaggccgcgggcctgggacaagacaggcccgggcagagcctggagctcgttgtggtgtaggctgagccgtctcagggcgggcaggccagccagggcctcgggggccagcacgctgagcgcgttgtgcgacagccgcagccagcggacgcgcagtagcccctggaaggccatggcgggcaggtaaaccagggcgttgtgggccaggtttagcgtggccagcgcacccagtgccccgaacgtccccggccgcagctcctccagtgcgttcccctccagctccagccgccgcaacgagcccagcccgtccagcgcctcctggggcagctcacgcaggtggttggaggccaggttgagcaggagcaggcggcccaggccacggaaggcgccctcggccaccagctccacctcgcagtggcgcaggtccaggtgtgtgaggtgaggcacgccctggaaggcggctgcggggatcaccttcagcaaattgccctgcaggtccagccgctgggtcagctggggacagcgaggagaaagtggggctgagccaggcagggaccccgcctttgcaagtgctgcttcttccccggaacactcttttctcctgtcacctttcccatatttctcttcatccgacccctgacacctcctccaggaagccttcctctccagtgccctgggcatcacccactgtggcatttttcacactgtgctgtccctgcctcctcgctctctctcctccactagctgatgactctgcagagcagagaccacacctcaccctgccacagcccgcctctccaccacagggtctgcagtgaattcagtatcgatctatgggtcacctacttattccattcacacagtaaggattttaaatagatcatctccctgttactggtttttattattcccattttacagaagtgtaaactgaggctcaaagagaagtaatttgccaaggtctcccgggcaggcggtggcagatcaactggtgcccagcccaggctcctccctctgggtccccaccttgccccactgccactctgtgcctgtgctcctgccctgctgacctcagggatggcgtctggcacctcagtgaggttctggtaccggcaggcaacgtgtcgcctggagttgtcacagatgcaggcctgtgggcagcgctgggcggcggcctgcctagccggggccagcagcagaagtacaagaagcggcagcaccaaggggacatgggtggagctccggggcctgggacggggagggagagtctgttgtgcacaagggccgaggccacatgctgtccctcacttagtcccagccatggtgcagctcctgccccaaaaacccctcagagcctcctcctttgggcccaggaaagtgccaatcaccctgagcctccctgccccccaccccccacgcagtggaggtcctatgattagtcctgttttacatgggaggaaaccgaggctcagaaaagtgacctggttagtccctttgcctctgcccaatggctcagtgaggacttgctgactgtgagaatgactccagttcagagcatgttctcaggctgtggtgaggctctggtccagggtaggctcggaagcagcctgtcctcagactgatatgatgccagctcccaggtggcaggagcataatggtaccccccagaaaggagggaggcatccagtccgggtccttgagtctttttttgtttgtttgtttaaatagagacaagccttgctctgttgcccaggctggagtctggagtgcagtggaatgactatggcttactgcagccttcacctcctgggctaaagtgatcctctcacctcagcctcttgagtagctgggactacaggcacacaccaccacgcctggctaattttttaattacttctggtag

SEQ ID NO: 533 - DNA, 2400 bp, Homo Sapiens
gcctcgttgtaatgaaaatcacagtaacaatgatgacatctaactttgatgggcacctggtatatgcctggtgttgttctaaggattctgcatgtatttactcatttaattctcacacaatcccacgagggagaggctattattgtccccattttattaatgaccatctggagccaggtttgcccaaagccacccagctggtgacaggcagagctgggattcgatcccaggagcccctggctccttaaacacctcccaggctgtccccatatgacagccttttccgggctctgcatccccagttcctctcggacaaagttccccgaccccacctcatcctgctgcccccatgggatcctctgcagggctctgggtgcctctggagcctcagcacccaaagccaaccctcagtgtccccagacctgtgcgcttggagtttggtgagatgaccccgccaggctctgggtgctcgcgtcctcacagcttcaaagtctttgcatcgtggtgggtgtaaccagcttggatgaaacaaggacactagggctcaagtccgggccctgtcacttagctcggctcctctgggccaggtactttccctctccaagcatcagtttcctcaactatgatatgagataaagtatcaggaagcattttgtaggctataatgccaccaactgttgttaatttgggttattttgggagccccccacccccgccaactgttgtctcaccttaagctttgggtagcctttagtggcagatggctctgggtgccccagctctgtcccttgctaggctttgtggccttgagcatatcccttcacctctctgatcctaactcaagggatgtcatgagatggagcaagggcgcgcatgtgatacccacctggtaaagtcaccgccgggtcatgttagttgtcatcaccattactgctgtttctggagaactttaagtcttttccaaatggactcttctcaagcccctggtccctctcctgaccttggacccaggagcagagcttgtgaagtgttaccttcagcatgctgagttttcttattcttttaaacaacgcatttctgttatcaggcatcatgcattagtaaagagaggagggctgatgtcagggctcggggacgggacatctaggctggggtgtccagatctttctgctgactaccccaccggttctgctgtctcacccacacagagcctgctcagcctgccggtctgggtgctgatggatgaggacgtccggatcttcttttaccagtcgccctatgactcagagcaggtgccccaggcactccgccggctccgcccgcgcacccggaaagtgtaagtgaccagcccctgggcttccacatggccagagccctgggtccctgctggaaaagcatctcttttccctgaaaggagagaaggaaaatacagatcagccatatccctggacactccaggatgatttgatttattagatgggtttagaaagtcatgttcaggcttggagggacagagggtgtgtgcctttcaatgtgataataaggattggaagacgaggactgggatattgactccagagagtttggtgccacagcaactactggggatagcccagaagctctgggtgcctggaaagaattgggggcagagaggagggaaaagctgccccatccacaaacattctctgagcatctctgggaatgccttctccctggtgtgttggagctccatggggccagctatggctctagttgtatcatgctggcctccagagcacactgttcctcccttattccaaaaagcccatccttcccaccaaaaattcaagccactcgtagactgctgggcttccaaagcccaggttgctgctactaagaattctgggaaaagcaggacggagctcctgagctccccaccagctcctccctctgcttcctcccaccaatgtctccaagggtcctctccatgcctggcatctcccctgtgcacacaggcaggtgtgtcttaattccagctgtgccatgtggcagccgcaggccccagagcaaggcacttcacctctccaaccttcagtttccctcagctgaaaaattagaaacagtcacatttacatcagagcttggttgtagggagcagaggaacaaacacatctgaacactttggcaagtgaaaggcaccgaatgagcgtgtatccccttccccacctgctttctgagcctggcttcctggtccataaagaagggagaacaatcccacctccaaagaggttgtgaggatttggggacaagtgtgcccgcccagaggagcaattgcagccacatttcagcatcttctgtctcctctgccttccctgctccttgcaaggggctcctctggacacaggagcaggaagctgggcc

SEQ ID NO: 534 - DNA, 2495 bp, Homo Sapiens
acacacctgtgaatgtctgttgggtttatacctaagaggggaattgctgcatcatcaggtatgcatatattaagctttaaaagatactgtcaaagttttccaaagtaattttaccaatttacactcaatgaaaatttcaattctgcacatcctctacaacatttagtattgtcaatttgtaaaattttaagcattctcataggtggttagctggagctccttgtggtattaatttgcatttccctaatggctgttgatgttgagcaactttttatattatatgcctgttggctatggaggtactcccttttaaaatgtgccagtttgagtctcttgtccacttttaactgattttttcttatttgtaggaaatttttaaataaattctggatgctagtcctttgtctgatatttataatgtaaatattttcttctgtctaatgtaaatatcttcctctgttgcttgccattttattctccttaaagtaagaaaagattcttggccgggcacagtggctcacacctgtaatcccagcactttgggaggccaaggcaggtggatcacctgaggtcaggagttcgcaaccatcctagccaacaaggtgaaaccctgtctctactaaaactacaaaaattagccaggtgtggtggcaggcacctgtaatttgtacttgggaggctgaggcaggagaatcacttgaacccgggaggaggaggttgcagtgagccaagaccgtgccattgcactccatcctggcccacaggagtgaaactctgtttcaaaaaaaaaaaaagagtttgttgctcccaccgagttctgaagaacgccagcagctcgctgcttaaaattaaaccacagggttccatgatgggtcaacttgatgggaaagtcatcatcctgacagccgctgctcaggggattggccaagcagctgccttagcttttgtaagagaaggtgccaaagtcatagccacagacattaatgtgtccaaacttcaggaactggaaaagtacctgggtattcaaactcgtgtccttgatgtcacaaagaagaaacaaattgatcagttcgccaatgaagttgagagacttgatgttctctttaatgttgctggttttgtccatcatggaactgtcctggattgtgaggagaaagactgggacttctcgatgaatctcaatgtgcgcagcacgtacctgatgatcaaggcattccttcctaaaatgcttgctcaaaaatctggcaatattatcaccatgttttctgtggtttccagcatcaaaggagttgtgaacagatgtgtgtacagcacaaccaaggcagccgtgattggcctcacaaaatctgtggctgcagatttcatccagcagggcatcaggtgcaactgtgtgtgcccaggaacggttgatacgccatctctacaagaaagaatacaagccagaggaaatcctgaagaggcacggaatgatttcctgaagagacaaaagatgggacgatttgcaactgcagaagaaatagccatgctctgcgtgtatgtggcttctgatgaatctgcttatgtaactggtaaccctgtcatcattgatggaggatggagcttgtgattttaggatctccatggtgggaaggaaggcaggctcttcctatccacagtgaacctggctatgaagaaaactcaccaatcatctccttcctgctaatcacatgttaatgaaactaagccctttttaacaatgtcactgtttgcaagagtctgattctttaagtatattaatctctttgtaatctcttctgaaatcattgtaaagaaataaaaatattgaactcacagcaagagaatagtttttaaaataaatctcaatttgtaagcatctgtgttagtcactttgggctgctataacaaattaccatagatggagtgtcatagacaacaaacatttatttttcagtctggaggctaggaagtgcaagatcaaggtgccagcagatatggtatctggttagggcccacttcctagtttgcagatggtcctcttcttgctacatcctcacatagcaagagcagagaaaaaaagcaagctcttatgtgtctttttataaggacactaatcctgttcatgggggcactacccttatgacctaattacctcccaaaggccccacctcctaatgtatcatattgggggttaggatgtcaacacatgactttggggtgatacaaatagcccattgcagcatatacaattaaaatgtaaatatgaagaaaaaaggaagtttttgttttttttgtggggggtggggttaaggaagaagatagtaatttcaggactaggcattgtagctcatgcctataattcctgcactttgggaggccaaggcaagaggatcacttgctgccaggagttcaggaccagcctagttaatagagagaggctaaggtaggaggattatttgagcccaagagtttgaggctgcagtgagctgtaatcatgc

SEQ ID NO: 535 - DNA, 2452 bp, Homo Sapiens
tatcagtcaagtgagaatagcaccacacccctcacaggttgctgtgagaattctgccccaggtcagtgctttgcacacagtgcatgctcaactcatgcttccttttcccacatgctggggcctcccagttcccccaatggaacccagagctgtgacagtcaagggcccagaatccaggacatctgtcccaccagaatccaggatatccgtcccaagtcccagccagcagccactagagctgaggctctgtgtgaagcagcaccctctctaagcatccctctgtcccttgcaaactaaacagaatgatccaacttcattatttggtggatgagcccaggatttcttagcacaagagagacccctttctgccctggcagtgggaagctgtttctctaccctctgggaggtgcagagttgggtgaccttgggatgggtctccagggcaatgtcttcatgtgtgcctacacctcccacccctctcacaggcagtggtgagttttgccaacccccaccatgcccagaactgaacaggaagtggtaacttggttgccatggcagcgagaggggcaggaatgggtgaggttcctcaaggagcattggtatctgtgaggtgggaaaggcattcacacactggtcccttcaggacagaggcagggacaggatgtggcatcagcatttcaagaaaaatgttcaaattcagttcaaaacacacatgatgcaatgattgctgtcataactaagcagggcttcctgacagaggccaagcagagaaagctatttgtgtgaggaaattgagggctctgctttaaagcctgaggaagcctagcagataaaggagccaatgcagagagggtccagagctttatcttggcttgggaggcctgggttagcttcgcctggggcctgatattagggtaaagagctaagtcagccctaatctcctccttccccaacccacaaaacactaaacaagaaaactgctggtaaggagggtaagaaaaaggccctgagctcctgcctctgtacccactccctcctccacaagtcagccccttctcccctcacctgagacgcaaccctgtggccacagcagcagcagcagcaggaaggctggggccatggttccatccagctgggcagtgtcaggcctggagatccaaggtgagggcccacccgacacaggatgtgccacctgggcctgccagggaaggacccggggttctaaaagtgaagctgcccatttagggaagtgaggcagtgtgggacccactgcccccagccaaccgcagggattcattgagcctattatgagggcggtgctggcagctgtttccgcccttttcctcggaacttcaggcaggtgtggctgctccacccagtctggggccccaagccgggaggactcacagtcagagggctccccgccctccccaacctcccccagaaactggtccctaggatccagcaagggggctggggtgaggcttctggaacgtcaggtatagaccttcctggaatcttctgggctcagagacccaggggtgcgggctcttaggctgagatggagcatctcagaccctagtttcttacatatatacattcacagggaagttcttataaactctcattcattcattcattgcagattctttctgttccttcctctctctctctcccaggctcctggctgctcagaacagtcacttgtgttcactgttgcaaataacctcttacaggctcacttgaaatcttacttttgtcaagcgggaaaaatgcaaattgttaagactcagggcataaattttgggttgagggaggggttcctgtactctcacacacaggtgtgcatgcacatgcactcacactcacagtctcactttgtcttttattcactttcacacacacacacacacgcccatgcacacagtctcacacacaccccagcagcctctccttttccctatccatacgtctcctctctctgtccctctccctgcctctcctcctgtcgactctactcaccatcagctccctctagactcctagtccctcgtgcaggcttcctacagcctccgcagtacttcccctcacccacctcatctcaagacccccttcctcccctgcctccagcctacgtcagcacgcaggcaagtgccctccacttcctcctgctcaatgctatctcgcctgtacagccaccagctccagtggaaatgacccagcactaggcccaagaccacacccttcacttaccccaaggcctagaatcagaagcatcaatttttgatgtccggtacctgtgtcatctgctccttcagtgtgtggggacccagctggactcccgtgattatgtatgctccccctactcactagtgccatgtttctactccttagatgggactgtcaaaaggtaaactgaggcacaataaaattttaaacagattatttcagc

SEQ ID NO: 536 - DNA, 2374 bp, Homo Sapiens
aagaccagcctggccaacatgataaaaccccgtctctactaaaaatacaaaaattagctgggcatggtggtgggcacctgtagtcccagttacttgggaggctgagacacaagaatcacttgaacccgagaggccaaggttgcagtgagccgatagtgccactgcactccagcttgagcaacagagtgagaccctgtctcaaacaaaacaaaaaacaagggaagggaaaatgctctacttaattttattatttgggggttgggcataaaatatgagaaaaggaagacctaaaggtgaaaaaatggccagtatccataaaagaaaaggagtggctgtctgtgcttcaggtagctgaccattttttatttttagaacatcctatctttcttaaaaaaaaaaacccaagtttttaatattttaaaattttcttttaacaaatgcttatatactagaaaagttatgggctgtgggaatgaaacctgcaaaaacagtgtctttaatactgaaaatagggtcaagaatattggcttaaaatattaatgacatttttccatttttaaaacgaaaggagttgaagttgttcaggcactgaatgtacctacttgtaggtgagacatactagatggcctgtgaagacttataaaattaattaaggtatgaattccataattcttaagccatcaagcccgctattacaggaataaaacactggaagctacaaaaattaattctggttttatacactcagattcaacattgtttaaaatatttctaattaaaaaataagttagcatcaagtatgttgaaaatgctggaagaagaggccaagtccctggagtgggaaggacatgccttcctgtggggaagcgcagtagtgtggaagggggaaagggatggttttcagctgatttatctcagacttcccacccagtttggtttccgctccctgcagagctgtcaagaggatatctccttggaatgcctcctccccaggggcccccactcctcaagaacccatgagccctggcaataggcgggggtggggagggtaggtctaaggggtggtagctggcctaggataactcacctgggggcagtatgttcagagagactctgtgcaaaatctggggccccctggccccatccaccatgcagccatactcgccagcatcctcttcctgcagggtaaccatttccacctgcagcaggcccccacccaggtctgtgagaaacgtacgcctgcccgctggagctctgcgatccacagctgaggacaccaggggctggcacccctccggcaagaaccggcaccacaccttctgagctttgacatcctggagcctgtagtggcactgcaccagaatggagcttcccacgggtgcctgcagcacctcagggaggctgccaactatgccctgacctggggaaggaaaggaggtgggaattttgggcaggagctgggagcatctcccagcccagctgctggtatgggtgtggcattcacaataacacgttactcctggacatggggctgagcatatggggcccagagctgcagctcctcctgaaccttaccttctagtcccaggagcagcagcaagagcagggtgaggcccatggctgggcagagaaatgtcaactcctgggcttgcctgggcactgatgcagcattcgcctgagggcaggaaacatctgcctcagaaagtcacttggggtgggagaaaggaaatgatgggcacctccaggggtggggaaagggagttcttccaagccctggttggctcagtgctcaggaactgccctgagggtaagggtgggcaagacaggatgagaagacccgaagaaagctagaagcctgcaggggctggggcccggctaaggggtgagatgggaggattgtgacaattggaggacaggagaggaagaggaaagatgatcttcaggatcttcctaatacagaatctgagggtgcacagctatgaaggaggaaggtagagtgccctgcacctcactcaatgccattcttgctctcaattctttgggagtgccccacgaccacccaagcttttaggaggttgtatgcagtacaacctcaaacaggaagtttcaccttgatcctgtgccctggactgggtctttcttcatttattgtcctggacactatagaacccttccatctggatccacattcttcagttctgggaaacaaattcttactttgataattacatgtccattttcttctccccttccatttttctgcaattccttaactagttggttattgaatgtcgtgtgttcatctcattttcatatcttttctatctcattttccatctttttgtctcttttgttctgccttcaaggagatttc

SEQ ID NO: 537 - DNA, 2465 bp, Homo Sapiens
tctcaataaatatgatgattctaggcagctcttaggagtggaactgtacagtatttgtccttttgtcaccggcttattttgctcagcattatatcttcaatacaaactcccgggctcaagcaatcctcctacctcagcctcctgagcagctggaactacaggcacacactcccatggctggcagggttttttttattttttgtagagatgggggtctcactaagttgcccaggctggtctcaaactcctggcctcaagggatcctccctccctggccccacaaagtgctgggattacaggtgtgagccaccactcccagccaatttctctcgtttttaaggcgaaataacattcctctgtatgtatacaccacatcacgtttatctattcacccttcagtggacacttgggttgcctctgcctctgggcctctgtgaacgatgttgctgtgaacataagtgtgccggcctggccttttcctttctcaaacttgtcccctgctcttctgcattgtgatggtttctctaaggcggacacacaagcatttaagccccgatccacatcccggagcaactctactgtagtccacaccccagcctgttcacgagtcagggatgggcaccccacgattggcattgcctggccttagagaaaagctcataatcttgggggccatagctgaggtttcttatggctgcagggaatttgtcttcactgcagtcagattaacatttagttcagtttcctcattagcctttgggaagcccacagaggcatcctctataagagatgctaccaaaagttcctgactgcattcagcctggaaactaggcttcccatagatgataactagtctagaagatgctctcatgagcatggtgacagggctcaaatgtgcctgggagttctactctttctgatttcctaatacgtaaatatcttcaaaggccacagcaggaggttttactgaaactgaagagctccctctggttaatctttcccccaaaaatgtcatctggaaattaagcacaattttgctaaaatgagcaaggatttcacctaaatgaaattaaagagggttatcttattttttttatttagcacttaaaataatttagagtgtgagaaatcagattgttcagggtcacacgcccccaaggactgctctctaacagccctcctcctgcctctgccccggggttccagtctctctcctccacccctggactcaagtctgcgtggtgttggccacactgactgacagccaggggacatgcactcaccagcagggtgtgtccctccggtcttcacaatgaatgctggcccagtcgccagcagccttcacgccaatgttctcccgtcagtgaggccaggcccccaggtgccactggagtcagaggagggcagctggcgtgcgccaagcagccactaggagccacttcatgccaatgctccacttcctgcacgccacagtcacgttcagctgcaaaagtagttatgctttgggtttttttggtttttttttttttaagaaaaaaaaaaaggaaaggaagaaagcaattaaaggggcgggggggacttaaagtttgcacctcagcatgagtcaccgaatcaaagttcagcaaccacatgcaaaacaaaccctccgtgagggcagcaagtctccgtgaggacggctgggattggctgcacagcaaagccaggagaggctccatgaggagaacagcattcagagtccaagggggagaacccctgttccaagtgggaacttggaacagaagttctcctgcctccagctgagaagatgatcagattctagctgctcctggggaaagtcggtactcacagctggacacaaacatagcttgcaggaggaagagtgtcagagcaagagacagagcagagatggctacggagatatgggtgcatatggggacatggcacagggaggactctgtccctgccttcacgaaggggaattccaaacgagtcacgaagtccttctgactagggaccaaggcactagcctgtgtcagagataacatggccctgtggctccctactgccgccctgcgtggcgtgggtggtggcttctctcccactgtggcaggggaagtctgaacccacctgaccacagcattctgcagactgcctggtctccagcctcaccaggtacaggcaacagacccagaactctgaaattatttcctaaatttggtgatgcccatcaggggtcagaagaagaggaaagaacacaatcaacccacacagtagcccacctcccaacaaacctccctgtctcaggcagcaacttgctccaggacacacagtcaaccagttggccaaggtgggtttagaacccaggtgttggtgctagggaggtaagaatggcacatggtaactggaatgtgtagctctttttatttattcaccaccggtctcccaaagaaaatgtgaagcagtgt

SEQ ID NO: 538 - DNA, 2459 bp, Homo Sapiens
tccggctaaggcggggcccaggtgcttgcttcctccgagcttgcttaaggttttcatgttgcaagtactagatgttgaacccaggtggcttcttactgttctggaggagaaggctgctaggactggttttttttcttcgtcctccttccctcctacaaaaagaatgggcggtgtttcgggaaaaagtccgccttaggatactttagtgtgtttactgctgccccatggtcacatgcacggctgtttataaattgcatctttattgaggaagaaggtaaaaaacctagagagggcaaggaactatttattttgtatatgtgattatttggaccgttcaaattttcctttaaaaaacaagaattataattcaaagaaaatgctattctgactactgccagaaacttaaggtgtttaagcaaaattcaaaagtaaaaccagagtttattttgttggaatgaatgtaacataaacataactttatcattttcaattagaaactctggtctgttatcattttggctggtggttctgtaatgtacgtctaaggggaaaaacaccagattctcatatgttccctcctcatcccttttatttttcagtccagagcacaacctccagaagacaacagaaggaagccagttttggggaaacttggcactctattcactgcaggaaggagaagaaacagtagaaacgggttagagagtcccaccagatcaaatgccaaaccactctctcccaaagatgtggtagcctctcctaagctcccagagagagagagtgagaggagcagatctcagagcagccaactgaagcaaacggacacaagcgaggagggctccccgcgggagaatccccgagaggcagagggcgagctccccgagagcggtggccccgcagccccccctgacgccgagctgtcacctcgctggagcagcagtgcagcggctgtggctgtgcagcagtgccatgaaaatgattcaccccaattagaacctctggaggcagagggagagcctttcccagatgccaccaccactgccaagcagctgcattcctcgccgggaaattcctccaggcaagagaacgcagagacgcccgcccgcagtccgggggaggacgcttcaccaggtgctggccacgaacaggaggctttcctgggtgtgaggggtgcgccagggtcgcccacccaggagcggcccgcgggaggactaggcgaggcccctaacggagcccccagtgtgtgtgccgaagaaggctccctggggccccgcaacgcccgcagccagccccccaagggcgcgtctgatttgccaggtgagcctccggccgagggcgcagcgcacacggccagctccgcgcaggcagactgcacagcccgccccaagggtcacgcccaccctgctaaggtgctaactttggacatctacttgagtaagactgagggggcacaagtggacgagccggtcgtgattactcccagagcggaagattgcggtgactgggacgacatggagaagaggtccagcggccgtaggtcggggaggcggagggggtcgcagaaatccaccgactcccccggcgcggacgccgagctccctgagagcgctgccagggacgacgcggtgttcgacgacgaggtggcgccaaacgcggccagcgataacgcctcggcggaaaagaaagtgaaatctccgcgggcagccctcgacgggggcgttgcctccgctgcgagcccagagtccaagcccagccccggtaccaaagggcagctccgaggggagtcggaccggagcaaacagccacccccggcttcgtcccccacgaagaggaagggcaggagccgtgccctcgaggccgtgcccgccccgcccgccagcggcccccgggctcccgccaaggagtccccacccaagagggtgcccgatcccagcccagtcaccaagggcactgcggccgagagcggggaggaggcggcgcgggccatcccccgcgagctcccggtcaagagcagctcgctgctgccggagatcaagcccgagcacaagaggggcccgctccccaaccacttcaacggccgggcagagggaggtcgaagcagagagctgggcagagcggccggagcgcctggagcttctgacgccgacggcttgaagcccaggaaccatttcggcgtgggcaggtcgacagtgaccactaaagtgaccctgtaagtagccgcgcaagtcccggccgagttgctgtccgcacacgtgctgggggtccgctctgagaggctcggggtatctgcattgtggaagaaacgtctggtcactgaactttcccctccatgctgaacttaagatagtgaagggccagtttacacagtcaagatttaagatgacacctgtggcagcctcctcagttaattccctttttaacacaagatttaagtttaacgaatgtaaaaataggatatc

SEQ ID NO: 539 - DNA, 2382 bp, Homo Sapiens
acaaagccatcatcctccactctttgagaagtccatcatcctccaataggtcaagtgtttctctgcacatttaggggtctgtattctttctgcccagacttgccctttcctgcccattgggtcccatgtgcctctatggttgggccaatgatcaatacacagatatacctaaagcccctccccatctgtgttcttccctcccctctcttactgcctgcctctgtttgcccaccccattccacacttaccactggtctttatctggggtttgatgtcacaaaggagcatcctgaggtctcgccccacttctcccagcgtttgggtcaattctccccaagtgctggtggcatataccttcttccccaggaggcccagaggtttgaccatgttgttgtcactgttgtactgaaggaaaagatttttattcaagaagacctgcgcttcacaccagggctgtccaggtctggacaatgattttatagtgaagttgaagcaaagagagtgaccacctgtgagacaaagatgcaggtgaggtccaggacaggggaagaggcccattagaacctgcgcttctgtgacccaagactccctggactgggccaggctagcagaggcggggcagctccatcccagactccctcaaccttctggatccctgttcccatctctccctgactgtctgggatgagatacttgatggtaccagggacccctggggtgcacttagtgttaatggtgttaacaggaggattcatgtcacaagtacttttagcaacatctaccaagttctgaggcacaaaacagacaagccagtgtatgacctcctgagacttaaactctagctgaacacacatgacattcaatagaaaggaaaaagaggcatttatcacaggacacacgctgaattcctgtggggtcccagatgttcaggaaagtgacctggagtagaaggcggggggtagcattgtagaactgccctctgtgagccagtgccttgcctagggcctcaggctgtggtctcccatgaactgggtgtaacatcccagggatcctcttcctcacgtcatccttaagagcaggcacccacttgtctgaagcctgcatgaagccccattcgcctaccccctacctttctccctcctccttgtcctcagccagttcttgtgctcaggacactcaccaaccatgatctccaaggctattagtagcaacagcagaaacaaaagaaggcgcacagggctagaagtcagggatattcttcgcatactgtggagagtaacaggcaggaagctgggcgtgtacacattcaccctcactggtatggtgaagaaatgttatccaacagcgtgggtgtgggcactgcccaaattctttaccctggaacaactgaggtcaggcctgtagagacccaattaaagaacaattttgtgaagagagtgttttccaagtattcagaatataatcatttattgaaaaataaaagaagacatttaaaaacaaaattaactttgaataaactctctctcctctcctgtccctgctgcccctgcaaaaaaaaccccctctggtgtgagcaggatggttggaggttatgtgagctccttctcctttcctccagtttcctcttcccttctcctccctgcctcttttgcttttccctttcttcctggtaccccctgcccattcctgtattttctcccatcgccattctcccctctcccactgtccctaacccgttcaaactctttcctcttaaatggttgagattttctctcaccaagcacaccccagtattaattaaactagctgcaaacaggcagcaagtggtctaccatgacagatgggttttgtgtgtgtgtgtgtgtgtgtaattgtaataaaacatattgagtcactcaataaacacagagtgtctactacatgtatcaggcactatcatagatgctaattaacgaaactgaaatggccaggccctcacagtggctcatgcctataatcccagcactttgggaggatgaggcaggaggatcacttgaggccgggagttcaagaccagcctgggcaacatagtaagactccatctctacaaaaaaaaatttttttttattatactttaagttttgggttacatgtgcagaacgtgtagttttgttacataggtatatacgtgccctggtagtttgctgcacccatcaacccatcacctacattaggtatttctcctaatgttacccctctcctagccccccaccccgtgacaggccctggtgtgtgatgttcccctccctgtgtccatgtgttctcattggtcaactctcacctatgagtgagaacatgtggtatttggttttctgatcttgtgatagcttgctgagaatgttg

SEQ ID NO: 540 - DNA, 2498 bp, Homo Sapiens
gattaccatgcctctatctgcttctcacactaacgtgtccatagacctcatgtatgggggtcttattaaaacatggattctcatttaggaggcctggggtctgagattctgcatttctaacaggaggtgaatctgctgctagtccatgaagcacacttttgagtagtgagatctttcttagaggatactgagtgagttgaattaacaatggtagctctcagtaactcagaacagtgcctggcctatataaatatagccactgttttatagccaccaactcatctaaccccccaacaccactatgatgtagattctattattcccatttgacagtggaggaagctgaggcacagaggggttattaacataactagaggatctttgaagttctgagttctgccagcctcttcctgacctcaggaagggcttcccaaggtctatacccctgacctcatgcctaccccttacaggcccaggggtggctctaaggtggactgagtgagcccaactctttacctgcctctccttagccttgtctctgatcctgatgatgatgggggtgtcttctcacctcttccagccctgccccctgtgccaacagtccccagccttgcgctgggctctgctctggctagaacccagctaacctcaggggctgagcccagcatgctccagggcactctccaccaatcctgttctgtcccttgacagttcgccaaggccttgatgcacttcggggagcatgacagcaagatgcagccagacgaattctttggcatctttgataccttcttgcaggccttctcagaggcccggcaggatctagaggccatgaggaggaggaaggaggaggaggagcggcgggcgcgcatggaagccatggtgaggggcagtgccaggcctgggactgaggggagacgggtgctacttggggagaacacccccaaactggggtgtgtgggaggagggcagagactgaggaactgaggaacaccataggggttggatgtcagccccaggagagagaaacttcttcccagcctgagggaagagagtggtgtgaagctgggggcctgtatgtcctaggcaggaagaaagtggggccaacagatacaggcaggcagcatgaccatggcctaggagttagcccagggttggggggctgccctggcctcagcgcctctccctgagagggttcctatctttggccccccgcccgcagctgaaggagcagagggaacgtgagcggtggcagcggcagcggaaggtcctggctgcaggcagctcgctggaggagggaggagagttcgatgacctggtgtcggccctgcgctctggggaggtcttcgacaaggacttatgcaagctcaagcgcagccgcaagcgatcagggagccaggccctggaagttacccgggagcgggcaataaaccggctaaattattgacctggggaactagccacacaggaggccgggagacagggactggtgagaatggggctgagtggaggaggtggtgatatttaaaccatttggtgcttggtttagagccttgggctgggtcctgggatggggggctgtgtgtggctggaccaggtgtctccccacgcttaccttaaggggctcctcttatctccccttcacatgattccttctgtgccctggccccaggtattattctgaggctgccttggatggcctcaggccaggtaaccccaggctgaaggggccctgctccccatcccctaccatgggcacccatgtgctggcacagaacagttccagatctagactggagaggtccacagccttgtccagagttcctgtgtagcacggggagcaatgatggagggagcccctgagagggaatctggtgagggaatccagactcccttctctcaaggggaggctcaacagaacattgacctgggggcaaactttcctcttgaatgggaacagaggaggcattatatattctagttagatcagctctggtaggttccagagaacagtcaatgttggaaggatgatgcagggaccaaagccatcaggacagagtagcagtgtctgtttcccatgtcacaagtcctctggcctctccctgcatgtcttaagtatctttcccttccttctctaccctcacctccatcctgtctactaatccacagtcctagaagactcaccttgggtttccacagctatggctcactaccaggtgcttgatgaatctggcgaggggctcaagacagacctcatgcatcaccacacctcatgccttttgggcatctcccatgtccccatctcctggacacctggccattgttgtgaagccagacagtgacctcaaatgttgccttggagtcccctacagcccctcagcagagggcagcacttgaatgcttagctccatcccatagttctctacttcatataaattgctcaggccctcccaccccttctctaacactagcttcaaggcagaagccacagcagcctc

SEQ ID NO: 541 - DNA, 2351 bp, Homo Sapiens
ggccttgcccccccatgcctcagtttcctcaccgataaaagaggtgataattatacccaccttatagggttgctgcgaagattgaaataataagggcatggggtgttagctattactattttccagaattactatcttctagatcgagatccccttgcagtagatggttgacattttaaagttttgcttgtttttcatgttataatatggtcataagttccttgatagcagggagcatattagtctttgttcctcaatacttaagactggtacctagcacatagtagatacccaataagaacgtgctgaatagagccagacagagctgaattctttcctcttctgaggagcatcttccattctctctcccatctccctctctcccttcttccctctctttgtctgacactctctctgtctgtctttccctccaccacctctctctctaattattatactccctcttactctttctttcaaccattttccccactctcttcggggcttcacactgacatgtgcgcccctttccctggctgccccatctccagagcacgctcctattctgctccaaatttgcctccaggctcagtcctcctgggaggcctcccatggctcagctttgaggacactgaagcatcagggctggatgggagcttcactacctgttctattccagtctgctcacttttcagatgaagatgccaaggtccaaagtaccaagaaggctgcttcacggtcatgtggccaacttgtcccagagctaggattagaacctgggctttcccactcttggcccaatgctctttacattacggcattcacagaggcagtggcagaaacatagtaggagaccactgaatgcttgttagataaatgaatgaatgaatgaatgaatgctattggaagaggagagctactcagacaacactacttgtttttctgcagctccttttgacctgctctacccctgccccaccctccacatgcctggggtccccagaggaggtctttggcactgttagtcttgcctgtgacccttccaccacccctggggagtcagcggcctttctccctcctctcactcctgtgtgcataaaggccatttttattgttctctgtggaaatatctttagaggaccgagggcattctctgagaacaaagcctcttcctggggagtgttggccagggctcttgtcattgcggcttgctgtctgctcagagccttgtgttttgacaagaacaaagtgattccgattggaaccctgtagcttgttgctggctctgcctgttttcctgcagatgtgtagccccattctggcctcctctcctctcaaggaaaggggagttgtcttcaactgatggcccctccccaaagcctagccccctccttctccatgcctttctcctgtatcccacctggcacctcccaaacactatctgccgctgcagttccttgttgaactgttctggttttaattccattccctgcaattggagcctgaataatgagttatttcacaggaagattgatctgggtattagggcatcatttagtttgccattacaacagccaattttggttacatgctcagctgtgaaggggaaatgggccagcctgctggagctttctaaagcatggagctggtgagtagggggatggggtactgggctgaggggcagaggtggcagatgggcaggaggaggggttctggcttgcttcagcaaaaatgtctttatgctcacaacatgacactgtgaaagaaattgtaaggattgaaaatggacattacccttcctcaaagggacaagaagagcagagttttcaggctgtagatgccaggagtggaaaggtctctcttaaataactgagtgagtgagccccaaattaaagagcattccagactcaccaatatttcaggatgacaaaatagtggtgcatccttactcgccactcccataccagacccagctgcagaaatttcagtggctcccccatttatttccctcatagcacttctcacaacccaacacttccctttccatttactttaagtgaaatctcgcctatctcttcctcaactagattgaaaactacatgagggcaagaaccatgtctatgctgctcatctgtttccccagggcctgagacagtgcctggcacttcatgacactcaatagacattcgttgaatgaagtgaatgagcatcagagggcactggtttcatggatctgggtgtgggggacaaggcataccatgcgcagtggtctctgactcccctgcacacgcacggtggtctctgactcccctcatgctcacggtggtctctgactcctctgcatgtgcaca

SEQ ID NO: 542 - DNA, 2487 bp, Homo Sapiens
gaggcgggaggattgcttgagcccaggagttctaggctatagtgtacaatgatgattttactggcatacagatgaaaaagaaaaagatatttgaaataaaaataaaaatatagtgcacaatgaccaggcctgtgaatagccactgcactccagcctaggcagcatagcaagatcacatttctcatatgaaactttactagaatgaaacttatggtttattacatagatgttgcttattcgttgtaggaaaaattgaattacagatgatttttaaaactaccagagcaaaccatttaacctatttgtgtacatactcccagatttcttacacacgttgcaaaaaaaatagatcgtaccattctgctggttttctaagctgctttttgtaagtaatgtactgtgagcatcttttcatggccataactattacatacaaaagaaaaaaacaggcttcacaataaatagttaaaagacattttgacctgaaactaatgaagaagggttttttggttttgtttttgtacctcctgtataatgctgaaattggtaattctgcagtaaatattaacattttctgaggatctgctgaagatgaatgtgacaaaaaataagaaactccactttcctcatcacacagccttaattaacatcgctggctttgtttgagatcaagcaaacgttggcttcagtgtccaagtctcttcttggggtcccacggccttgggtctggcacctctgctgggcacctcgcagggcttccgagacgtgccgcgacccacgggaccccacggaagctttctcccaccgcaagctccctggaggcagggaaaggagccgggacccgagcctagctggcctcaagagaagggcggtggctcgcacggcgcgggcggctttgctcactgcagctggggagatgcaggttggccgtccgggcgcggcggcgggaggggctgcgggcctgtggggcggggtggtggctccgtgttgttggatccctatggagatgaccctgtccctgccccacccctctccggagctgcggcccgagttggcgcactcgattttcactgcgcggttccaagaggagacagccgccactgtaccgggcctcatagccacttcctagaggtaaagcccgtggcttctgagccgctagtctttttcttggggccgcccggggcacatcgcctgggccggcttagtttcccagtgcagtcgcccaggaagaccctaagcagcgctgaggggcgcagggccctccctccgcgaccctggagtcccttagcagctctggaattaaccaagattctgaagaggctctggggagaaacaaaatccacgcgtagggtagggtttgcatcgggccatgccaagtaaactcttacctcctccagagaactgatttgggatcgaagtaaagttcttgaacactttggaaaacgctgattttcataggttcacaccaactgccttcttccttctgacagttctctccctctttcctcctatggggtccaaaaatgtagggagtagggtgggggctgggttgggggaatgagggaggaatacaaaaaatctactgtgaatataggtcttggttataaggatagctctaagagttaatatgctaagatttgatgagcaggacaaataaaacagtggtactttaaaatatcgatttaaaaataccgatgctgtgcttattaataaactttgcatatgtatcagaacacaatatcctgacatcattggtgttaaagttcactgcaacccatgcaattgtatccaagcctgttaaagtctgttctgcaggaactgacatttgtgctccacagaaacctcaaaaatcatgctctacaaacacttatttcagtgggaggaagaagggttaaggacttggaagttttatagcaacagttgcatcttgtttgttacagctttagttttatagctttaaacttataaatcagtgagcacatccaccatttgaaaataccagcacaagtatggtattttctatcaccgcctgtaagatcaatagcccaggtttcctcaaaacacgccattattttcattatccattgcttagtgtgtacttaataaaaattatatactggcatgtagttttacatgccctaaatgtgggacatttaactcaactggaattgtctttcatttctgttttttcaccaatcacacttacttttcttctactcccgttcttttgtgcgatctttagaaccagatacctttttggaggcatatttaaggaagtaaatttttgataaataaaggaatcattgcacaatttgcatgtgtgaattgcagaagtacgcgcatgtaggtacatacctctgccgaggagcagtgttttaatttctaagccactctgtctactgtagtggagaaggaccagactaacttgcatttctccagctgtataacagataacctgtggaaacacagttaattgacatcattgct

SEQ ID NO: 543 - DNA, 2392 bp, Homo Sapiens
gagcacccgccctgtgacagcgtaatgctgggtgcccgcggccgcgctgggaaaacagacgcgcacacacattctccatgtggtgggtccagagcgatacgaaagctcccgagggcgccgcgtggggtcctgcgggggcttcctagaggcggcgggagtgggaagggaaggatagccggagggatgagggcctggcctggccgtggggtgggagagaggacgggtgggacgggcagtggggctgcaggcatctgagatgagatgccctgttggagagcgaggcccctctcagccagaaaatgggagccactgaaagtttaaaaacaaagaaatcacatgggcagcctccaacttcggcgagtccgacttcggcgagtcctgtgtggcaggagatgggctggcaggagcgggaggaaggtctccgtgagtgaccatcaggacacgaaggcaggaagctcagacacgctgatccttccacatgaagcagaaaggagggaggaccccacttttaacagagcagtgattctgaagccacggacccgataaggacctcagcagagccgagggaggggggaactcagctgtggcctagacgagcaccgcaggtggttgagaggggccggggtgcaaccaggggacgccctgggacggaacccagcagacagtctgggctggagacagggtttgggaacgggggcaggaaacggtcaggcattgcccagggagagtttgtggcgggagaagaggcgaatccctgcggtgcggggagctggtgttgaagagaaaggtggagttgggggactcctacagaagatatgggcctggtgggcaggagggcatcccggaaccagggggcagagctgctgggaagaaggagggcccgtgccgtgggaggaggacgaggcgcaaagttcaggaaggaaggacctggagccgggccggagccttggagggaggagagaggggaggccggagttggagcgtccaccacggtgaccgctgttcccaccaggcactgcccaggggctgcccattttccttcagtccccacgggggatgttgtgatttgacaggtgaggagagcaagtctcctagacaggtcgttttcccaaggccgtgcagttcccacaagttcaaatgtgacctgcgtcgggcaactccaaaacactgccgccgtcagctccaggtggccctgcagggaggggtccccggtgtcctctgtgaattggaatcggaggctgactcctcagagtgtgagaagctggcgggcctggcggctggggacgtgctgcggtgtgcgtgtatcgggctgaagacctgccaggttggacgtccctgccgtgagtggtgtcctcagaggccgcggttctctgcagcagccctgggcagtctgcagcagggaaacctctggtcgagtgggtccagggggagccttggtggccaagtctgctgtgtggccgcagtagaatcctgagcctgggtgagggggaagagcagaagtttccttcccacatttctggaggctgggggtgcaagatcaaggcgccggcgtccccggggcctcctggctgtgttcttggaggctagagggcgctggaggccgcaggaagcctcttgtgtgacggccttgatccccttcactgggaggagacctggagctagtcatcctccaacactatcacgtcggcaacgcctgggtcttggaggggacacattcgaacctcagccaggtacaagcaggtaaggcagagaaatgggggtgcagcttctgggggctcgagagcctcagaggagctttccacacctcagtgcccagttcccacctgccatggcatcctcaggatgggaagggtccctgccgatgagtcccccttgctggcacagcctctccctttccccggaagccgacttgagcaagcagtcggctcacaccacattcctcactacccccttcctgggcctcctccttgattgcctggcacatctgccccgacacccacctgtaaaccgcaaggccaggcaccctggggcctcttcctgaccgtgcccccgacacctcacagagtgtttgcacgtgagatgtttggtggcttgtgactccatgatggcctcgccccatccctgtcatgcagtgtctctgcaaatccaccatgaccccaccctgccatgtggcatccctgcagccccctggagctgctccccttgaggtcctcagtgacctcctgagggttggttaacgtaaggtgaattccagccctaaacccccctggggtcagaatctcctgttagacacgctcatagctcctgcaacttttccttgatgtcacttgttaaccggcttgcataatgagttacttagtaaatggtgatgtgtcccgtctttgctacagtc

SEQ ID NO: 544 - DNA, 2475 bp, Homo Sapiens
tggttctggcaacccaacccgcatgggttgttcagagcagggcctctgagggttttgatctgtttgccttccgctgagtaggactaggctccagagagagtaattataggctgggtgtggtggcttctgcctgtaatcctagcactttgggaggccaaggtgggtggatcacttgaggtcagaagtttgagaccagcctggccaacatggtgaaaccctgtctctactaaaaatacaaaaattagccaggcatgctggtgcacgcctgtaatcccagctactcgggaggctgaggcaggagaatcgcttgaacccgggaggtggaggttgcagtgagccaagattgcgccactgcactccagcctgggtgacagagagtccatctcaaaaaacaaacaaacaaataaacaaaagagagtaataacctctcccagagcagcagttgccactgggatactggaagtagaggctgtaactcttatttatattcagggttttttttttttttttctaaaaataagaaatcaattaaactttaacatacatatttataacagcacatgtatgtgatttgtaagtaaatatgcatgtattagaggtacagtttcaaaaacttgtcattgacagcagcgcatgttcaaaaatgtttggggactgacctagaaaatgtgcctcaagatattaatttatattcaaaaccactagtttatctgatgcttagtagaatggaaaataaatgtgtaacatgccacacatggtgtttatatcttagctgcttgttcttttcttatctccatgtctaacagtccttatgtctacttcaggcctggagtatgatgcttcgtatgtcaattcaaaataaacttcctaaggaacttagatttgtaatgtaatgattttgaatgcagatcctgggctattatttcttgggaatgtctccattacatcatgaaattgcattcactgttgttcacacatatatttctgataattaagcaaatttctgaacacctcttctaagattcaaaacagtaaaatgaaacccaatatcattataaagttattctctggcaaataatttaaggaagacaactcccgtatgcatttttttcttaatagttcaggctaggttcctatatacagttctccccaaaatacttgagtgtaattatttagcaggtcatcggttgtaaccctgagaaacaaagcagcacaatgtgatttgtacagagaatgattttacccactacgtctccaactatttatatctgcctcaaatcaaaatgctttggctgaacgcaggcatccgaaggaaggctcatcccagtctagttctgctctcaatgcttgtgacacatagagtatgtgtgcccagggagaggctgcgttcagtgaagtagctgggttctcattctcatagggcgatatctcaataggaccttagccccctggggagccatcccactgtgccactgctgctgctactatgcagggtaacctccctcctttcccacctatgactttaccttggcttgggcatttccacctgccctgtccatcgcttcctcttgggttttctgctctccacgagaaccatcaagcaaaacaagaacaaaatgagtcttgtaaaataaggcattttgtggacatctgtgaggcaaaaagctgctttccagtagcctgtggcagagcaaatcccccctggcttgaccattgatccatctgctgcctcctgacgggctgctctgaggggctgtgagggcaaggctggccaggctagttgtcccgatttactatttgatactgacgccccactcaccccctccactccgggccatgacacaaacaccaggctttgccctccctgctgattagtgattggccattagtcgagaagtttgtcctcatgaaattctgcttccactgaatcctagaatagctttggctaaagctgttatataaaaaattaaatctcttgaacatgccagctttgtgctgagattattggtccatcttctggctgcataaaaccagtctgtcccatccaccagggggtcagctcggattccaagtagatttgcagagaggacttggtggacatttagatgggtacataaatgtgttcaggaaatgctgagtaaacatgaatgacctgtttccttagggttgatttatttatggagctaagagaatatgctttgcctatgagcaaggatacttcctttctcacaaatatagatcaactttttccagtgaaaacatcaaagcataaaatacatttttagtttcaaggatgacattaatcatagaattcatgattatgtaagcttttcttcctaccataagcattaaattaactttggcctttaaccctaaaatgtataaaatcaatcataaattaggctttattcctatcctgggatatggaattaagcacattagaattgtagagatacatgtggttatgtctaacct

SEQ ID NO: 545 - DNA, 2437 bp, Homo Sapiens
cttctaggtattgaagaagtggctgtgaatgaaaatagacaaaaccagactgagataatggtatgtaaagtgtgatatgaatatgggggtcaggctcgctcaatgcttttgccatttccatatgggatgattccaacaagatacttatagtcaagctgttagaaataaaggcttcctttcccctctccagctaccccaataaatctgggtcattcatcattgttgttcagtttgtactgagcagccccagttaagtgagctatggttatattgaaatatccacttggccacgaattgagtgaaggtgggaggttcctcctgctaattctcctcccctcccaatacacttcctggcaacccccacgcggaaaacctcaccctactataggcccccttcctcccactcttcagaaggcggtggccccacccaggagagggctgcagatcggggccagccccagggcctccgcggtgccacctctctctcgcgagggtccctgccgtgccccggctcgccgctgggaggcgctgcggcaccggcgtaggagccgccggcaggggtggggcggggccggcgggacggggcagagggccctgcggcggcggacgcggcgggctcggccacaggtaacccgcaggagccgagagcgctgcctggcgcgcgggcggctggaggcacggcgctgggcggcgccgaggccctggggccgccggagccagcgggagccagtccccgtcttcgcccctcgccccccaccgtgtcgccggccttggtccctgcggcgcggacgtccggcgcgggagagaaaggtaccaggcgacctcgccggctccctgggacccccgcttacaccggggtgggcgcctcaggtcggggaggacgctgtcgggggaagggggcgctgctccctcggcaccccaggatcgccgactgcccgcggaggagacccggacaccgcgcctcgccccctggcctgcggcctccgaaaacgcccggcgcgagggggtccccccggggcgcctccctcttcgcctggcatcagttgcctccctggaatatggaacttcgggcgagggaggtggagaactttcttctggggctcgtccctcgttctcctgctcgcttgcagtttgaaggaagggcggtgggggcgggggtccgagtaccccgcggtctgcggcgcgtaggagggtaggtccctggcctgcggccgcctccgaatgaccccgtccctccccgccctggacgacagcactagggtgcagtcgcaggagaggggccgatacccctcaggagccccatcggcgaagcctcagcaagtggcatctcccggggtccagagagtcggcgtgctgtctggtttgggtccagacatcagctcacccaagcttatcttgggcttttaagtgtgttgcttccggtagatctcggggactggaggggaagtgcagcattatttgtgacccaagagggacttgaatgtctcaaagctggtcaagaatgtttcccccgcgaggtagcatgagatgggtcacgtggtagtaaagagccacttcgggcccgtgagatggagttctgactccaccacttgttaggtgtgtgactttggaaaacccacttctttaaaccttagtttttagaactctaaactgcaggtattgtacataacctcgtagtattgtgttcatgcagtgaagtgatgggaatgaaatgcttggcattgtactcttgtgtgttagacaccttttgcgaacctgttggatgttgaattcattcatgcttaggttctgttaggccagtgtaagtggaaagaacttgggcaatgaagacaaacacacctgggtccaaggtggtcccatccatggtatactgattgggggtttctcatccccaaaacaccaatagcagccttggcggggtttttgttgttgttgttttgagacagagtttcgctctgttgcccaggctgtaagctttgacctccttagctcaaccgatcttcccacctcagcctgggaccaccacacctggctaattttgaatttttttattttactagagacagagtctcactgtgttgcctaagctggtctcgaactcctcctgtctcagcctcccaaagtgttgggattacaggtgtgagccactgtactggtctgcagccttgttcttgagtgtagtaggtgtgtctataccgatacatgttacactttgtcatctttagtatttgtttagcatatggtaacaaaaaattttttaaaaattagggatacaaattaaaattggggagtattttctgccctctaggtcatactggacatgggggaagggtagaagagggatgaagaggaattaaagagaccagaaaacaactagtcgcagtgttgggaggtataaaccaatggtaatttttaaaaatgtgaatttattaactcc

SEQ ID NO: 546 - DNA, 2308 bp, Homo Sapiens
gaggcgggtggatccttgaggccaggagaccagcctggccaacatggtgaaaccctgtctctactaaaaatacaaaaattagccaggtgtggtggcgggcaccggtagtcccagctacttgggaggctgaggtatgagaattgcttgaacttgggaggcggaggctgtagtgagccaagatcgtgccactgcactccagcctgggtgacagagcaagacttcgtctcaaaaactaaacaaaacaaaagcatgatgatacttataacaacaattccttaaatttctataatactcttttattccaatatataaaccaattttttaaaagagaaaaacagattacaactttctcttctaagtcaggaagctctagaaaaacttaatgatttttaagaagtagcaatgtttcataaacaaggaggagaccaactcgagaaataattcagcaataataagggcccttaggaaagggtgagagatggtactgagtcagagattccagggtttctgactattaccacttctagagttgcaatagatttggtttaggcctttaagttatggtgcattttatttgtaaataatatttaacagtgatgctgctaaatagcagcataaaaatgtggcaagatcctcataattcacaggttttgctgttgtggtaacatgaaagtgaaaacaaaagcatactgttctacaactgcacagcttccttttcctgttctcagggcagtagatgtcaattgaatgctcagacaccaacaagaacagaaaattcaacacacagatgttgccactgacttgtgatgctcaccaaacactcataacttagaggaagtactttttttctttcactggtttgaattcaccaacttgattatcaaataatgcagcagtttcattattttcatcactgggatttcttttcctgacctcacttgttgattgcactcatctatatataacttaggcctcccctgaacacggagaaagacacacggcacctgctgtccagccagaagttattttaagctattctaaaatgagtcatgccgtttagcacttcatccttgaaaatcaagagaatcgtttttcagtcaaattgaaaacagtaaacatttagtggcttaaatccatacatgggttttaaagtcggggagactatcttaggatgaaataaaatctcaagtaaaatgaacttcaaaataattaatttaagataagctgtccataggagttttacttcggttagtctaaatgcaagtggctgtttgtatttgatttattcttcatgagatgccacaatcattgattttttaaattcttaattccatggctattctttaaactcctgttccacatttactttaaaacagaacagtcattataaagcccaggacaattcaattcccaaaagtagcctcaagacaagttaacaagagggaaaaaaacaaagtcagagaactttgttacttttcaatcatccattttatattatgtggcaaagaaattatttctaacttttatcttatataaactttattgccttattttcccctccccagggagagaacttttcacttgtgttggctattccagatgactatcacagacacatccctccctaagcaacacattttatttataaatacaacaatgaaaagttctccaacagttcactggcaatctcaaagttgcaagtttcgaacaccacaaaccgcaccctataccttctcacagggcttgggggagtgtttgtcatacttaccagaaggcaagaagctaagcaagaagagagaggagaggaaggaggcaggaaaaagcaagtcagagctgcagcaacagcaggagagggcgggctggctgtgttcttacaagggagagagaaacccaatacacacacacacacatacacacgtgcacgcacgcgcgcgcacacacacacacacacacacacgccacaggcactgatggaggcagcagtctggaggaggtgggggtagggaaaggaacatcatatgacacagcaaggggaaaatacacccaagcttccctagctgttgccaggggaaataccttagcagagagaagcagctggaagatctcattagactctccatgttttgtttgtcctttcggaaatttaaactctgagtatattacccccgttgcaaatgcagtctttcaccattgttgtcctttttgggtagagatcagtttttcttacttcttgggttatctccagtgtggtggaagattcatcttctttttcttcttcttcttgcactagcttaattagtgtcaggtt

SEQ ID NO: 547 - DNA, 2324 bp, Homo Sapiens
ttcatcaagaggacataataatcataaatgtatatacacctaatattaatgcttcaaagtacataaagcagaaattgacataattaaaataagcggacaattccacaattatatgaagagatttttaactctcatttctcagcaattgataaaaaaattcaaaaaaggcataaatgatttaaagctaattgttacttatagaacactacacccaacatctgaaaaacattgttttgaagtacatatggtatcaagataagaccatgtatgatcggctataaaaattaaataacacttctaaataatccctgggtcaaagaaaaaattagaaagaaaatttgaaaatattttgaatttgaattcaaatttcaaatattgattttgacatttaaatatgcttgatcttggacaaccaatttggattgctgagtgtcagtttcttcaccaataaagtggagatattaaccttcactgggttatcatgaagattaaatgaaataatgtatataaagcacttagcataacttctggcataataataatacttaatgtcattgttcataatgagaagccattactgagggcatatgggcacacttacagggtctcctgctactttgatcattctgtctttgtttttttggtgggggagaatctctagccagttggatggtattaataagatctctctctctctctctttattttctgagacattgctctctgtcactcaggttggagtgtagtggcgcaatcataacttactgcaggctcgaacttctgggctcaaatgatcctcctgcttcagcctcccaagtagctggcactgcaggaacgtgccacactcagctaattttcctgatttttggtagagacaatgtcttgctctcataaatgttgcccaggctggtctcgaattcccaagctgaagtgatcctccggccttgggcttccaaaatgctaggattacagatgtgacccactgtgaccagctgaacattctgtctttcaatactacccaagaagaccacgctgtatcattctactctttatatctctttgttgataaatgatcccaccctatctgatttaattttatctccttactgtgtaacattactgacagacagtggatttacgcaggcacacaagagatttatgcatcctttgaatccaaaccttgagttgaggacgatgcttccatcctcaggcccccattcggcctgggagtctgtcttcagtactattgttgacaagacgccagtagcacatctaaaacctgccatttgagactttgacttcatcacactggttctccatttcccaaatatcaaaaaacaatttgggaaaatgaggaaccatgattctcttctatttttcttcctaactcaattgtacaaattcagcagtgattttcatgtactctgtttcttgaagtatctccttttaaacgcttataataataactaccttacaggaacactggtgtctgattaattattatttgtcaaaagatttaggatcttcagctggaaaggggattggggatgcacacagtatcatcttggagagctctgcatcttgctatattgaatggagctagtgtctctgtgtaatcaaattaaccacactgctagggcttacgctgtaattaatgaaacccgtgcagaccaaatgaagtgatcagtctattatttttagattgaataattaaacctgaagagcttcagtgctttttccaatagcttcctttttttcagatgactattgacattttggttctcaatctcacttcactgtgtcaattcggtgtgtgtccatttgtctcatgtcatgcagaattcattataacaccaaaaatgctgaatctttacaaatgtatttttttaaaagaactaaggcccaccttagaaacaaactcaacataatagaaaggtaaggggaatggtatgcattttatcaagggcctgcactgtgtcaggtactgtgcgggtaccttacctattcaacttcatctaattttttcccagccacacagtgaagctggtctaatctccattttacggatgaagaaagtagctcaaggaggtaaaattatttaaggttacaagcaagcaaggggcagaggcagtatttgaacccaagcctctctgattctaaaattcacactctttccatgagtagcagaggcctgtctctgtgccccattcaagaaattatgttattctgaggcatggggacataccttcagagtcttgttgtgtctctgcagctcccggcacagactctccaatttgcttcgagcgaggatagctctgctgtgt

SEQ ID NO: 548 - DNA, 2389 bp, Homo Sapiens
agcccacaggcaaatgccctatactccatcattagttggtctaatctttctgcaaattcttgcctgaaggaatatattaagtcataaattacctagtgggaattcattttgttaaagcagattatattctctgaagcagggatgttggatcaatcaagtcttgggcacttggaaagtgaaggaaccctgggagagtgactgtgttgaagaaatgacaggatgaagagcaaagacaattttgaaaattttgaacctctatagtgacttcactatctgtgacttcttttcatttttcttttcttttctttttttcttttttttttttttttgagacagagtctcactctgttgccaggctggagtgcagttgtgtgatcttggctcactgcaacctctgcctcccaggttcaagcgattctcctgcttcagcctcctgagtagctgggattacaggcacgtgccaccatgcccagctaatttttgtattttttagtagagacggggtttcacaatgttggccaggatggtctcgatctcttgaccttgttatctgcccgcctcagcctcccaaagcgctgggattacaggtgtgcgccaccgcacccggccattatctgtgacttcttacccaattcctgtaaaccagtattactgagtcttcaaagaaagagtaccctatgaaggaggcaggttgaggtagggcgccagagaatcgaagaatgggcattttcgtagaccattaagtgcaattagataagaacagataaatctgaacatttctaacaaattctaacatgcaatcatgcaaatgtatgttagaaaaaaaatctaggtaacatgcctttgagtattatcaccttccagaagatgcaggtgggcttgggagaacactggggcaggctaagtcacacagcctaatttctttctaagtccacttgaatacttacttagcatcctttgcatataaagtccaagtaaaattcatttagtttctgtattgccactttgtcattaaatctctcttttgggtcaaatttttctctcagatttgcagccactgcttctcttgacctccataaagcaggaaatgtccatgtactgccaagttttcagagtcctcgctgcccatagcaatcaaatgagatgattgcctcagtcctaagcattggtctcagagaagggtagagcatactttgaaccggaaaaccaaaccaaacaaaaacaaacagccacgtgaggtatgtgagatgtcagtttctctttggagaaatgtaagatagaaatctgactgtaaagctctatctttgaatgaaggtttctgcgacttgcttttagggtcacactgtcccttccttggactactgggaatcatagccctagcaaactcagttttccctgatctggtgataaaggacgcaaattaaaattgcattaagttctttttgattctccaaagttacttcaaaatagtttgtaaataacaaagctattttttaaaacacccccttcaaaccaattacaaactattttgaatagcttgaatatttgcttcaaatgatgttcaggatgttttacaacacctggaggacagcgctatacttgagagttgactaccttaaattggctttttcaagcaattctttacgtgacttgtctgctgtgcttgcccacacgtagtagcttctgaattgttgctttaaccacattgactgatttaacaaaagagttaaaacatcatttaattctgttgtatatttcagttaattctgagtttttccaactaaaacagaatgggtggttgagtatttttcttttgcagattagtgcccaaccttaaaatttacagagattcactggattgacttggaagaccaccagtaatctcagaagtggctaaataaccgggacaaaagcatttacccagaagtggctaaataactgagacaaaagcatttatgccttagacatgtttacaggatgatgggtctatgctgttttttttttttatttcctgccccctttctaggaaaatgcaaaaagtgcttttctttacaccattggacaaattacttcaggataaattgaatcctgtttacagtccagtagttttatgtaatcagttttttaaaacctgagtttcaaacagaaacgcctcaatcatgtcaaaaacctgagtagttctaagagtcctccttcttctaaatggtacagctgtaaagagcagtgtgacttttgtgggtccaagctcgggctctactctttactcaaatgtggtcttgaacaagtccctaacactctctcaatgtcaagccttcattgggcataattatatttaccttggttttttgtttgtttgttttctgaaagtcaaatggcacaatatgaatgt

SEQ ID NO: 549 - DNA, 2380 bp, Homo Sapiens
gtgctgagattgcaccactgtactccaggctgggcgacagagtgagacacagtctcagaaaaaaaaaattatatatatatagatatatgtgtatatatatatatatatatatatatatatatatatatatctcactgacagtggcattattagaattgcatattcccaagacccctgtagcagggtatggaagatagaatggagggagactgtattgaggtaaaatacataagtggtaagaaattatgagcatcggaactaaataagctagaaaagaatagtaaatgttcaataaataggtatgaattgtttgatattccatgaagtctgtataaattatttctcttagagtaaaggctggttgtgaagacaaaatgaaacaataaaaacataagatgacaaaaaaatccagagaaatttatagtggtacttaaataagacctggctcctctctgagtctcagtgacctatcatcttgagcctcaatggtgaccaacaagagcacccagctaaggagtgagcaccatccctgcagacaaccaccaccacaagcctccgagacatccctggatattcgttgtcactactggtattgaatttcaggaaacctcgggaataacaactgtttaaccacaaattctagaaaataatgtggaagtccaccagatccctgaacaaagtactcttttttttttcttatagcacataggcactctaaattaggaacacccgttcctatttctgttagcaaattctctgtcaaatctactatttaactgaaaacctcagaaaggagtaataaagaaatcatggtagaggtctatactattaaaaagaaaaggcagttagtaaaaattaccccttatgcagaagccaaaaaaaaaaaaaaactacttctaatgagatttgcactccaaagaaaataagaatcgacaccatgatctatatactggctggcattctttatccaaagatgtacagatttgaaaaatccatatgtcatatcccatctcactatttgcccctcacagtcttgtaaatcagtaaatctccacaagacacacaggttgagagcgtgaagccagctagaaaagccacgtggaaatgcacatctattccagagcagccggattcacatttaacatggcaaatcaaaacgatgcaggtacctacctttctcttctggagttttcaggcttctaaaatttaacaccttactgctgatctgcccaaaaccctctcaggtgaggtgaacctcgagggcatcccattcaatcacacagccagaggagggtggggtttcacaagaccagacttcaaatgctggggctcttgcgggttcccaggctgtcgggagcagaggtgaactgccttctgttctctgctgcaggaagaagacgggagacactgactgactggaggtggggggcgggggcttgggggagggaagtaatatggggactgtaataaataagagatcctctccacatgatttcctatatttggtgcctgatgcctctctccaggctccctagaggaaacaggaaacttgtcctctggccactggaaagaagagaataaacatactgagaactgtgaaaagaagcagcaggaccccaggcaaggagctgatgggccagccaactttaccttttaccaagtgctttcttcctgaagttcctctaagtgtttaactctgtaaaagtcaagaatgtcctcatcttcttccactgagctggagcatattctggccccagtccagatgtcatattacagagcagctgatgacaggcaggttagaacaggccctggaagaatccattcccagcctcaggcaagaccccctaagctctgtctttggaaagtctgatctttcttaatcttggactgactccaaagccctcaggccattttgccttagagtttaaagaattatcaggaggccaccatccgtggagtgaagtaggaccctctacattatttatggggtttcatgtaaaatgaaaatgtgatgccactcatttgaaaattaagaatttcaagatggtgacaatagaacattaaagcaagtgtggggactctctggagcacagggctctatgcaactgtaccaggccgtagactcaccaagccagtcctggctgtagaaagaacgtgggaactctgggccatgtggattttcacaagctgagttgttgagagacctggactacctccattgtgttcagcagggtgacagtcagtcctccaacagcagcacacttggaagctgctgcaaggcagcagagggggaggagggtggatgctgggttgcgggtgtgagcaggcaaagaccacaaacacatcactgagtaaaaatcacacagtggtctccttgccc

SEQ ID NO: 550 - DNA, 2378 bp, Homo Sapiens
cttaagaataaaacgtttttctcctcttttaatacagaatacctttcttatgagttttctaaaagtacgttaagcaaaccaaaacaaaaggaggtgggtaatgtacctgaagaaacttagccaattcaatttttgcaacctcagaagcatgttccatttacttcttggaactaactgtggtcccaccataaattgaaccagatacacttgttctaatgttatctcaactttgcaggcagattgtaacccagggttggtttagttcatctatttcctagtccattaatccactgctcttgctgtctcagccgtgtgggcattctttcagttggaacatacagaggctgctttctcctccaaaagcttaaaagcaacaaagcaagaaagagagaaaaagcaagaaagcaagaaactgagaaaaagcaagaaagcaaaaaagcaagaaagggaaagcaagcaaacacagcttctacctcttcccttatagaatcagagccccttgagagtgcctacaggatctacttagaaaggttattttgcaaatgtcccattagctacggcataatacagctctcctccagcagaaaagctctgctttctgggagtctgttccctcctcagcctaatggattctgtcaggggcaggatgtggcttttgccatcacgggccataaaacccaggagtaatggctgcagtgatggcggcctcctgccggcccatcagcacgggagtttgacggtgaggaggagagaaaggaaaactgggaaaagttctgaatgctcaataacttttcagaggtaagatgagggagagagagacctagagccataattgcagaagcctcttgcaaaatttaattaaaacttgggcagaaacaaacaccagaaacaagtgtcattcatcaacttaaaccgccaactaaggtaaacactgccacaaactcaggaaaagaaagggaggagaatggaacgaggggtgatcactctagatatcaagcaaatcaaattaccctgaaggccctgccagacacatgcattaatcattggttatcccagctgcacacctgtatggagaggagaacttggcgtcctcaaattgactctggctggcaaagtgggaaagcagaaggacagggtggcaggccaaggggaacccaatccagaagtggccacgtggcacccacggctctgcactggccaggtggaagaaggaggaaccacgtaagattcaggcgagggcgtacaatcatccccagctttccagtcttgcttcttgttttctggagcctatgtagctggacaaacctgctgagctgcaacgtgaagcaactttccccgggagggggaaggcttcagggtgaatccaagccaactccagggataacagagtgggaaagcaagttgagctttcaaatcctttatgtggctggttttcttctctcgtgagattcagcatttagtaggagggagacggggtagggtggggtggggacaaagtgagccgttgactttgtttcctgggtcacaggctttgtacacccacaagtcccgagggcaggtcacaagctgaaatcttcttactccagagagaggaggctggagagcagctcagccatccaggctgggagctatttgcacttgatgagcaatttcaagtgggaaccatcagagtgtgtgcctgtgtgaatgccagagtgcatttagagggaacaaatgatttattatcggggcctcaacaaagttacattcgaaaagggagggagcctcttattcccctccttatcattaaaaccttaaagaggtagaatccatttggtctcttaagccaggctggaagggagtcacagctaatcaagcagcccgctcagctccttcagcccttctttgagtacaacaatatgtataaactggcaaaagggactacagactgctttgatgttaaacaaagaggaaaacctccaaaacacggtaaaaattgtatctctgtttaactcttccgcgtcctttcttcagcacaaatttaagacacgtacagctaggctccagggagaggtacataatgaaaaattatcatttcagatacttagatccaagtattttgtagcaagagaaaatgtccagtctcctcttctgaattactttctctgcttacgtttttttgtttgttttgttgttgttgttgtttttgagatggagtttcactcttgttacccaggctggaatgcagcggcatgatctcggctcactgcaacctccatctcccggattcaagcaattatcctgcctcagcctcccgagtagctgtgattacaggcacctgccaccaagcccggctatgattaaatattacttcactaataacaaatactgtgctctgg

SEQ ID NO: 551 - DNA, 2469 bp, Homo Sapiens
tcaacattaggggtatcagccagcaaaatctgttgagcttaccattgaaaaatcctttcattcattactgtggtcataatacacagttacctggccaggaaagagtacacatcacagggatctgctcactgcacgtgtgcctgagctctccctcactttctgccttcttcaagaattcttccctgattggtccaaccagaagcgctgattctccccacctgatttcctgtaattttataatctatgtccttcacttttgtgttatattgtttatttccttttggtctttttgtgtgcatatgtatatgttttggggaatggggtattcacttttgttactcactgtgttactcacttttgtatgcccatagtgcagagcatggtgccttgtacatagagtatgttcggtaaatatgtgcaataaaaagtcctttgattacacaatggcttgatattggcttttccacttcccaaatgagccatttcttaactactgacctaaatggagctgacccatttccataaacagcacctccttgaccttcattgctataaaacccataacaaaactgcctcctcacttacctctccttattgtccacatttctcctggaaatatctaaatgagggtttgctttagatctttggggaaggaaggcctgtgagtagacaacagtagaactaggatgtgtgggactgtttggtggttagcagaacaatgcaaactggctcccctgtccaaagtcaaaccgtgtgcattccccacaagtggacacagtgtcttctgtgtctgaattaccacagtcatgtagtggctcagtgagaactccttgtcccggtcattacaaaaataaaacagaaatctctctgttgctaggttaggaattagatcacaattgatgcaccagtttatcagccaatttcctccaagttcaacatcagaacaggcaaaaaaaaaaagtatcagcctttaaaaatcatcaacaatagtggcataaccttgcattttatcaccctccttccaattatcccagtgcagcagatgcaagcagagtctcatgcaatcatctgagataaggatgaagaactgaaagacaaacaagtgactcactttaatggatttgcttcagacaggagaaacctgtaatttctcttaggcgtgcttcatggacccatagtggagtgaatcacagacttgcacaagccttgaaactgtgggtaactttacagttctcagatcggcttctcgcaacaggcagtcagttctcactgggccccttggactcccatttcaaaaatggagaagacagatcacagccactgaccagggaccgtgggaggtgccacgtgatggtgaggcatcatgctagggagctgagctctgaccttcctgctgggtgattctccacctctgggctgctagatctacttcctggatgccgtgagtagatgtcctacaccagcaccattttcctgttgaagaaaggcttgtttttgcacatattccaggagggggaaatgcgtgatatatgatggtattttctggaatgcttgattcttctggaaacttctctaacatgatttagaaattggctagctcaaggttggagtatttcctaagcctcttttacgtttgtttttctttaagagttgtttgtcaggctttaatggctcactcctaggagtgaaaatgcaaagtatcctgtcaggcaaataaactcactgtccctgcattgtccccttgcttgataaatttcaatacctgtcttttagactgaatgtaaagctggatgttgttttaaaagtgttcttgattagtttcttcttttagtgagcctgaaaaagctatcattgtatcaatttaaaaaaacatttctccagttactgccaaacacgtttttgcaaaggcatcttcccttgtttcaagtggccaattctatgctacttgaaggtctatattccttatactctgaagacagttgtgagaggtctaaagtgttgcatcattaggtgctgtttatttgtttgtttgtttgtttttcagtgtcagcacatcatgagctttcttcatggaccagaggcaattgctgggcgtataaatttctttaaaattttataagtatcaagatagttggtgagatatctagatgtcttctaactctgaaattgtcttccaactctgaaattatgtgattcttgaaacctatcagaatctgaatccagattccaatttttagaagagatgctgggctacaaacagattggctggaagccatctaaagtagctaaagatgagatgtttctgattctaatagttcttttctatctttctttcccccaaggctctatgtgaagcatttcttccatggcaagggagaactctaagggtaactaaatagattctgctatgagggcaagagatactgggtcttaaacacataaacaactcgtttatccatctgatgttat

SEQ ID NO: 552 - DNA, 2231 bp, Homo Sapiens
tgacaaatggtagtttatctatgactggagaaccctaggaggaccagcactggctctgtcctcataggctgtgaaagcccagcaccactctgtccatatatttagacatttaatttataccatttaatttaaattatccgttttattgtttttctgcaaatgaatctgtggataagcgcttctaccaatggaaaaataaaaggctaaaacctaacagttttaaagttcacagtatacatgggaaagttatttgaattttcagttggtgatgacagtacttgttcccagaaaactgatataactcactaatgctcagtactgaaatacaagagtttattgttgttgttgacgtattgctgttactttgatatcctttaaaatgtagaatctgaatcattgatgtcatgaggcttacttagagagtcgtcaaacaaaaagtcagatgatgtgaggataaagaagtctgagagtttgttggtttgcaggtgacttcctgtgtcccccttagttagcttccaggcaggagaggctatcagagcagctggaacattttctataaaatagccacacaactcaaagaagacactattgaggcatcatttctaggctttcccctttgaaaaaaatcaaattacattttgaatttttcaggattgttttccttctctgtagggtttatttctttgaataaaactagtatctgctaatgattagaatgataatgtatgtttcatgtttatacttacataactgtgttttttacttaaggttttgtccaatgtaatgatttttggatttgaagtgtattaaatgttaatgttttttctaacttctaatttttttttttacaaattctgaagataaacactaatattttggtattacattaaagaaatacctaattaccagcattgtcattttgctttcatcctgcatctctaatctctaactttaaaaaataggtgaatatttctcatgctggttcttatgttcatataggtcattgtcttgccatggaggaacccaaaggctactactggccatctatccaaccttctgaatacgttcttccttgtccagacaagcctggcttttctgcttctcggatatggtaatattttcactgactcttgccagcaaagctacatgttatcagccttcccagggttatacgtgcagcacggtagttcttaggcattatattgattgcaaagaagggcaggaatctctgtgtatgcctgtatcattcactcctggggaataaagataacataagtggatgactcagaaaggcagtgttttcctcccagccacatgctaatcaagccctttcacagaaaaactgaagagtttagaagccagtgggtagcaccagagcaaagtaccttgtatgtggatgaacctagcctacccttggaacatgcgtctggaattccgaaactttttaactattttgactgattattgctggaatggggagaggaggcaaagaggaaatgaagacaagatccagattgggatagtctgctgatggaaactgtcagggtgtagattttctctaaatgtttaacagaaacctcagagactagataattgcagggattcatggaatagcaagtcaaatccatttctctacccacctcactcccaattagagttttcctgggggaaattcagaaatggaaactgcctaagcataaatactttgcatactataaatattgctgggtttgacactttgtagggagcaaagaaggggactgtagagatgtatggacttgagtttgaaatgtggctccatctcttcctggctgtgagaacttggaaaattcgttgatttaccaaattccatttaatcttctataagatgtgaattataatctgctttgcagagttatgtgaactcaaaatcagattttacctgtaaagttcttaaagcagtacttggccaatgtatcctaggttaggatactgctggtattttgtttccaagatgcatgctactgatttttttcccataagaatttttagcatgaaatttatttcagtgcattacagttttattttcaaaggaaacttaacctagaaatcaaggcaaatcccaaaagttattaactaatcttttcagttctaatatcatttataggaaaacaggaaaagaaaacttgtagaaggaaatagtgcaaatggagaaacaaactggggtgagagaggagagaataaggaagggt

SEQ ID NO: 553 - DNA, 2334 bp, Homo Sapiens
tcagatcctgggaacaaaactaacaatttcccaaacacttccaaaacatagctctgacctctactccatcaaaaattctgatttaatttgaggagattctgctctatttcttaaatcaaatgtccctatctctcttgcaccgtgaatgctctgaatcgaccagtaagacaagaacaacattaaaaccaacagtgagggcagtttcagcatcatcttgctctcctccaagacttcccctggttaccttgctcctttctccctgccagaccttgagttctcttttccaaaacatggcttgagcacctccttgaagaagtcttcctcatgtctcttatcttgttctaatcatcccatggctagcgtaagtagcacagatcccatctgcattccagctatatgtgttcctgttgtttcttcctgtcttctcattagcctataagctctattgtacaaggtctacacactcacatccactgtagtacccataaccatgttgcacaatattctgcatacagagggaacttaataatttttgcagtttgacttttgggtctctattctggctcctgggtaatcatttatcagcaaacaaattagttatcagtgaaacagccatggtttccagagttaatcatttgtatttccactgctggaaaaaacaacacataccactttccttgcagagaggcatgcggtcagaacgtcactggcagatctcgcctgagagttttgacgcttgtaactctgccctggaaaggtgaatcaacttttattttgattcatgtgtttttccaggttcctttagcctaaatgcataaaagtcagagaaagtcatcaccataatactgataacaacaatgacaaagatatacacatacagtcagtggctgaacacccaccagcaagattgctggaaaccaagccgcaccacacctgccggagcatccaggaccatctactcagtgcaggctcagcagccatgcctacctttgtccatcccaggtatggctcccccaggtgccagggctacttctctctcttctagtggctgctcttcctgctggcacgcagcacctgcctcccagctctaagcctgtggggcagccaggagagtcttgcctctggcctccgttggtcccatacttcctggcgagtggctttgcacggcagcccagccctggggaacttttcaagggagagggcttctttccctccctaactcccctaccctcacccaaccccactccatactggccctttaccatcgccagttgttgccttgccaggtactgtggaacacctacatctttccctatcacagggcttggacacacaggcgttggagtcagatacgctgtgtttcaattttcaaccccctacaccaattgcttctcttttctgaacctcaattttgtcatccacaaaatagagatagtataataatacctgccttatggtggtgttgttagaattaagcagtaacgtcactcgtaatgataacagctgtactgaccaagggacttgtacgtgctgggtgccatgcagtgttttgtacctcttcttggagcccagcatggcgtctagcccagaacaagtagtctgcagcttccttccccctcttcttctttcttttctcctccctccttcattccctaaatcaaataggacctgggggtgcagcatctggtcccttatgggggctttttcctctctgcagcatcttcccttcttctacaggccatctgagagaacccagacccctacccccagactctccgcccactagaaacaggagccttttcactctcctgcccaagtcccccacctaacagggtagctccatttctgtttccagccaggtttccaagctccatccccatgttggggctctgcacctggtgttctgttgctccagggaacacagatggccaatagctagagataaggtcagctctgtgtcctcctggaccacagaatgtgcccctaagagccctttccttccacttcagcacacaggcaggccatttgcaccaggaatgctgcaaaacactgactggacacagataatcaatgcttaagcataatggtctccaacggagcaggagaaggtcaggaaccagcagggcatagccatccccctatcctgggggaggcagtcaagaggaagggcccctggggaaagagggagctgcacctcgcatcaggggagggggtgagtggaacaccaagatttactggacttcaggggccatcctattgtgggctagcctctgaagaacctttagtagattttgccacacttggccctggctctggtgcacatgcctccattgc

SEQ ID NO: 554 - DNA, 2500 bp, Homo Sapiens
taccaagcaacacaaaaaatgctccacacaaatattataccccccagatagtttaacacactaagaattcctttgtagttatttttatgctttcactccagatattctattttgctttaaaaaaaaaaaagtggagaaaaaaagcagctatatccctcattcttcaaaaatggttcctctggttgaaaagaaagaaaaacagcatataacaaataccctgattctgaagtgcctggattactttctcaagtactgtagtgtctgagatcagtaaaaaaccactttctcagaaagccactgattgtctaaccctcatgagtaccgtcatggaatctagagacaacacgaggagacacctctcgttcacgatcacagatagtggaaagaactttgactcaagcacctcaactcagcaaaacagctcagcagcctgcaccctggcctcatccaccgctcctgtccagccagcaatcaacctggagaggacccctcatgctttgggaggagcacgtggaagctggttcaagtcacagtgctccacctgggaaggaggtgattttgagcttgggaaaactgccgctaatactccatagtcaccagtttttttcccaaaaaacgaattaaaaccagaaactagcagtaaatattattcttatttatgcctcataaattaggaaaaaccagcacaaagacatgtgaaatattctacctgggatatttgaaataaaattaaatgggaaaaaaaacacttttacatgttcataacataccaattttaataaccaaattttaggtaaatatttttatcccaagacatagtacaatttttttaaaattaaaaagcaaaacaaagcaaaattatcgtgaagggaaaaaataactaaccggttacttgagttcacatttggaaaaaaataactttctaggtatttaaatgcagagttaaagagtaatgaacatgtatatagcccaaatttataaactatataattcaatgttacattttcccctctgagatctggttaataaattaaatgctgtactttgcatatgaggaactaaagtttacctactggactcagtggttttagtgcaggacactcttgtgcgttgccatagaggtaggcatgcaacccagaaaaaactgaaacaggtaacctgtcatgctgacagttacaagagaaagatcccgtgtcaacggcacgcctccaattgtgcatctcccttacctacagcttgttcaccagagccctgagcaggttgtttaccaggtcgggagtgttgactcagaagacagatgactttcagcacatgcaaaccgagtattgcaaaagctatcttccacccgtgttagtagctcacagttagtctccagcagccctgcgctccagctgcaaacatctcattagactaatgcattcagcacaggcagaaaactcgatttaccatagctacagcaatgaatttccattacgatgacagcttcaaccacatcatgtccggaaaaccagccaaccactggcttttaaagaacacacacattttacatgcagaaaacgaggcctctgtgtgtgtgtgtgtgtgtgtgtgtgtgtgtgtgtgtgtgtgtgtgtgtgtgtgttttgtgtttccttcctcttagcagcctaagagaaatgtgcagtgtagctttttgtcgacatgagctgcaaggtaatgacacttctgcttctttggtagttacatccttgtaataacctgaattatgtcacaatggttagaatgggtgtttccaacatttcagttttcattacccctcctctgttgccatagaaaccagactgtaacatcgtctctttgtcccaatcctgcagcagtgtgggccaacaccaggcttataagacactggtgatctgacagagtgaatgtttgactttggacaaataaaacaaaaagaaatattacaatagcatcattgttcaggagaccctgtgtgattcccagagcagtgtgcctatccaggtgtgtgcacacaccatggttgtacatattaaatcagcggctgcccacaacatatgtgtacagttcattaaagccggccctgactttggctccaggcctgtatgtgtgtgtgtgtaagcatctctacccacctcaacgtggtgggacctgcacaggatagaaacagggcaagagtgactattcattcccatgccccattgcattttctgcagcaaatcaatatatatcggcgaagggatcttttcttttcctttctttttgtaaagtggagcagggctccccattgcccatttcatccactctgggatattggcatattcacaggtatttcctacaagatgaaacatccattctacaaacatgtggcttactcctagggatgagcagcaaacaaatttagccgggactaaatatcaaccagggctaacgaaggcttaggccacaacctggccagttactgagagtgaaaaaaactgcaatggacaacttgaggtttctc

SEQ ID NO: 555 - DNA, 2442 bp, Homo Sapiens
tgctcttctctctcataacctcaaccatctaacctatactcatcttcattgagtcaatgaaagcaatgtcactgttggtgagagtatattcaaggaaaaatatttttttctattccatataattacattttattcctttaaacccatattgatatatagttgaaaagttggctaccattttttttctttgctacttactaatggtgaagtactgtgctctttcttgcaggtgttttaagatcaggatgacatggttttcctagagtgtctttaggagggccatggtgtataattttataaccctagaacaaggaaacaaaatatttaaaataaagatgtgaagaatacccttatagatggtatctataatctttgtcacaaacttaaattttgactcaattgtttagtattgtttctaataatttactgtatttatttgatttcagcgttaagaccatattgtccttctgaggtcagattgtatttcaacgccctgatatttccttcaaacactaacaaaaaagtggacttcttgaagttcagtaactactagttggctaacttgcttggaaaattgcaaccttttttcaagactcccaaccccttatctaggacttcaacccattctttaaaagatcatttccataagcagtgtcccacatggtaagtattaactacgtggatttgggggtaacagctttgtctcttcattttttttttaaattctggaagccaatagatgatataaagtccagcagagtcaatgaccccaactctaattgttattacagtttctaataactgtacattcaaaacatcaattagaaactaagagtcttaatttgacttcgtaaaaagcagattgagaaatgacttcaggcttctactatgattcaatgggtcttatgtacttagaatgatttctcttttaaggtaggtaaagagtttcaatagactaaacatagagaagcatgttgaaagttatggtaggtcggcgctaagcaacaaaattgaactctcagtctgcccggcattagctatgtgccctccagatgccggaagaggagcgaaggaggatcagaaaccccctcacctcaacgatggttctctcccctgtgcttcaccccacctccccgtccctagccatttctagtctccaatccgggtcttacatttaccctggctccagagcacagaccttcctgcagttgggccggcgcgttgcggcgttgaggagctgcggcgcgcccctctcaccgcgattgttcacttgccaggcgccacgtgtgggcgacgtcactgggctttatgctttcatcgccgctatctgcctacgtgagctgctctcctcccatcgcccccgcctcccctactacggagaaaatcttgcacgttttcccttgtgaaaagcagagttctctttttctcattaccaccagttgatgaggaaagaaaatgtctgttcgcatacctgcgccgtactaggaggaggagggaggtcatataaggattcgggttgcccagggggtggcttgaaaaaggaggcgttcgcattcaaacaagaatgcctgaattaatgtagttcaatttaaagagctaattaggagtccacaggtgcttaagtttgcagtgcgctgccagtgtcatgccaacgacgcactccagttacacaggttgtcagtttcaggctccctcataaacacttcatgttcttgtccctcttccccgttggcaacagttttatggtgagaaaattcacgaagagtaacaggaacaactcttatgaaaatacgcagaactcctgacccaaggctactggctgcaagtttagcatacgtatcaagcatgggttaaagacatgttttctctctcagaaggcggatgagtaataggtgcattttcttctattcacagttgttttcaaagcgaaaaggagtgaattcgcttatgacctagaggaagagagatgggtcaaaagatgtcaagccaaggattaatatccgtcataccttggttctctgtaagccatgcaataagaggcttgagatttcaccaactctggagactcacttgggcacaactgaaactataacaaacttggtgctcagtgccattttcctttggcagtgttacaaggtaatttcaagggatcagcacacagacattgttttagttttcttttgctgcttatttcagttcatgcagcactgactaaaaattttggaatttagactgcttaacgcttatatctacatccaatatcaaaattcattactgacagtttgcctttctaaatatttatgaaatctagtcctcaatctgtccctcacttctatattcatgttttcaccatatcttgcttaagttattaattggacatttcaaatacctatatgcacaaaatctctgcctacctatttgttctttctttctagtgccgaa

SEQ ID NO: 556 - DNA, 2386 bp, Homo Sapiens
acaatttaactaccttctagtaatctgagcattgtgtctcattaaaaaatatttcaaaaaatgagccacctgtagaatttataaaggacgttcctttaaaaaatgaatatactttaaactgctcacataaatagtttctaacacatatatcagaattagcaagttaaggctatccctgtaatagtccacttttgacaaaatcacttgtgaaataaaaaaaagaaaaagaaaaaactctacttgctgagttcctgcaaaagatactgtttaacttgtcagattgattttttaatcaaaattcaaaataatggaataaaaatttaacagcttaaaggtcaaagttagttaatgcatatcttcaaatttgcaactgatttacttataagtaaaaacatccacaaagtttaattgattttccacctcgtacactgagaaatagtattttgtacctcttgaataattcacaagtttgaatcctaaggcatacatatatatgtgtgtgtgtgtatatatgtgtgtgtgtgtgtgtgtgtatatatttatatatatgctgtatttatgcctaattattctggctacaaaggtcaaaaggacaaagtggccacaagttataatgggttggagaatttggatggaatgtggatctaaattactgtgttacgttaacttgttgaaatcttattgctaaaattttgcactgctaggcagtaaaacagaagaaaaaaaaataaattgagaaagtgttaatttttaagcaagtttgacaaagattgagtttcatatgacaaatattgtcagcaagacaggattctgtcagtggaagaagtttaaacattaacaatttctgtcaggctgttgacacaatcatggcagacatttcccaagatgccgagatgactgctggcatttgtcaacaatcctgtcatagtgacagcaataaggccatgtctggaaatgtgacagttttggctttgtgctcccctgagcaatagcccaggtgttcagagaaagtgtgggaaaacccatatttctgcattgtcattcgaacacagaaaacacaggaggaaaatgagctgtcactccaattcccatgatgccttgctgcttagcataactctacagtgcggccctgggtccactggtccatattctgacagataattaagaaagcagcagctttttctagacggctcttcctcatgatttgcattttagccagaggcgaccagttataaaaaaaacatgatggaaagatggtaagaagccaattagatggatggatggctgactgacagctctctggtattacgactccagatttcagactacatagcctggcagttttctacaagaaccaacttttttgcaggttggtaaagctgttaaatgtgggactatatatagctctatataatttttgcaaagttgtacattttccttaaataagcatgtattcttttcaatcagggtttgcattaaacaagtttcaacaatttaatcacaacttgcatcactaaatttagcaatattaaaattctagacaacttgtaggcacattagctgtgccagtagagaagtgattaaaaagctgagaagtactttgagccagcagagataaagtgagctaataattacaatgtctgtgcaaatatgctttggaactttgaattgtacattgtttgcttttaagcaaataaaaacatagaccctaaatttcctctccgtctttagatcttgcacacatatatttggttattatccctgttcagggtataatatatgcttgtgtgtctgttattttagctaattttgaaatttttaaaaaataaactgttagtgtcaagcttccagtttggccatgatattctatagcttctagccaataggagtcaactcttcacaatattttacagtttggaagcttcaccaatgtttcctgtgtactgcatgccgtgtgtgtgtgtgttgtgtgtgtgtgtgtatatatatatatatatacttgtcatatatatattaatatatattatatatcagatacacacatattaatatatatatcagacacacacaacacacacattgttaaaagcaaacaatttgctattagttcggcatgtcttcatttgtagtttgaaataagaaatttttctttcaaattgtaaagatacctcagatttgattttaatcttgaaatatgaagggtaggcaattatttcactatacattgaagttccagtaaggaatattaacccaaggcagaaacgtgagcatattttcttactgtgggtaatgaatcttctacaaactgaggataatcattaaactaatggtaggtctgaatgtttttagttgcttaaaactaaacaatatacattttaaagttcca

SEQ ID NO: 557 - DNA, 2300 bp, Homo Sapiens
accaccgtttattggatttaaaagtcctatctcaccccttactcccacttctttgggaagctctaggatacatttctttttttttttttaataggtacggatatttttattttatttttattttttcctattttttattatactttaagttctagggtacatgtgcacaacgtgcaggtttgttacatatgtatacatgtgccatgttggtgtgctgcacccattagctcatcatttacattaggtatatctcctaatgctatccctccccactcccctcatcctatgacaggccctggtgtgtgaagttccccaccctgtgtccaagtgttctcattgttcaattcccacctacgagtgagaacatgcagtgtttggttttctgtccttgcgatagtttgctcagaatgacggtttctagcttcatccatgtccctacaaatgacatgaactcatctagatgcatttctattcttttactcatcaccttgaaacttttaaaatagttactcagtatttcttttctaaacgtgtctgctttatccccatccaagcctgctgtaaccacacattgaacacccccaaaccttgctcaagctgatcttactatttttgtcttaaattttaaccacgttttaaatgcataaaaattatgtattatacataattatgaattacaaataattaaatgtacttatttttaaaaacatgattgaagaaattctcttttctcgcaatctcttttctaagactaaatgagttcccagtgcttgcctgacacacggtaggttctcaataaatgaagcacacctcccatacccctccaaataaacagttgtctctttaaacctagacatgagtgctcagcaggcatgtatttctctgggttggattcatttcatggacagttgtcaaagactgacccctttatgttaattttctgaatactgtgcttgactgtgttgcaagctaaacagtacaggattaaatgttctcatttctgagctgtgaagtgttgaaactgatcaagaaatgaaggcagaatgtccgtcctttgggagaataatcagccagtctatgttgctgccactcttggctgccgattggaatgcagctgttaaggcagctgtttaactgtttgcccaacttgaaaggacactgccaaatggcaaatattttctataacaacattttacttttgctaagaacaataacagtgcattttattgagctccaatggcgtgccaaacacgacagatttattactaggcaggttcacaacctggactgaacatggatgctcatttccatttttcatatatttagaaaaagaataaatgggctcccaaaggaagcctctacacaaaacatctctacagcttaattatttgttgaaatgacagcatattaacttgagaaaatgaaatatctcaaaaggaaagatgagagtctagaaatatcacaggaaaaaaataaggtttaagtattttaaatctctctaatgtggcctaagagagacttaactcatacttgtccaggacaggtgagggcagcagtaacacaaggaaatacatcatctgttgaatcccctgcaacttatgggtcccaggacttctgagtcatgcagttaatctacattgttaattagaatgttgatactaagtacttaacaaacaattatgttgaatttgacagactgtgaaccaggtgaggtggggtgggaggttatcagctgttatttaatggtaaaaccggtatgctaaatgtaggcagtcaaaattaagaaaacacattcaaatgcggaagtacaattttctattagaagtcagcaataactgccattcacagaagttactgtgtaatccccacaaacatttatcaagactgcagaggtgaggggtggtggggggtgcattctcacttattaaaccccacagccaaagctgaagcagagatgtttttgaaggtgaactgggctaatcaaaggcatggccagtggagattctaacctactttttctctactgtttactagatgttaattaaatcacaaatgacaacagtctaatagcaaaatgcatgcatttctacaaagttgacatgatttcttggacaaagatagacaaagttcaacatgctggataatggtcactgagggcatcaagatttgtgatcctctttttcagggatacagaaaaacagcaaatacaaatcatggatgaaatttataagatcacttccacagaaagggtccagctgttggagaaaaaactggctgtgcaactgactgaactgaagtct

SEQ ID NO: 558 - DNA, 2441 bp, Homo Sapiens
gctttattctggtacataaatctaaaggacaggaaatggaacagaataacaaaaacaaacccccaaacctagaatcattataaatagagtagcataaagaggtagaaagctttattttatggcatgctgcatttgtttcaaatacttgatttaaaaccagacactgctggaaatactacatgactttcttactggcaggagctattttgaaatgattgtaatataaataggagcagagaagtttactaaatttccttttaaggacatccatgaatcagggcattataaaactggaaatattgaaaaggctttcaaagatactgtttaacagtgaaagaaacgaagaagaggttacactcttgctcattcttcggtctcccttgtaggcttccctttctcacattctaaagaagctgccattagcttcaaaaaaaaaaaaaaagtctcgggaaggtgaccagggagggtgacgtagagttctgttaacaggctaattcaagaacagctgtcaaaaccacacagaggagagctaatcggggagataactatttgctgtgctgtaggagattaccaagtgagtcttttaaggctataaattcaatcatttagttgtatgaaatagttaactggcaagaaaacagctatgactctctgtctatttatgcccctgcccacaggccatttttcagactgaatggctgaatacagtattacagactcttacaccataggaatgaaagtaaaatgtctccactaacaacaaatgtttcctaccgcaaataataacccaaatctttatttttacaaaagtttgatatataagaaaaggaaacaaatcagactttgcttatttaatgagataaatacttcttccaagtgtgcatgttgcgtgtttttagttagcaagattttttttttaaggaatgatgaaagtcaaaacattttttaaagcataaccaccaatagaaaacaggaagccaacttacttgtcctttgtgccagcattccactatctcctcatccgtgttcttgccttccaggagggttaactgctgagcccaggttttcagaagggcactgaactgttccagggcctgctccagttgagccacttggcctgagaattcctgctccgaaagggccatctggctgaccaggttctccaaacagctctgcgtttggaatacactgtcttcccactgcttccagtcggcacgcagggcctgcatctccgtgtgcatgagctcacacccactggcagttgtgttctgtttcacttcgggagccagcgactccactctgctgagacggcttgcaccaatctctctggaatctatcagctcctgtaatggaatatcaccatggtaactgaagagcctgtgagtcacttggactgcaagttttcaactgtgtacacagggggaccctgtcctgccaggaagttttaacaagtgtgccacaaggacccagaatcaattcatctgtccactcttaaattataatagcgggagttgtcatcacgagtgcctaaggcttatggcaaaaaaatcccgagaatcctcaatatcctgaaacagactaaacagagaccctgaaatcaggcattattcgcacacgtgaaaatgtttagtgactcaagtgtttgcctgtggtggattgctcctgtgaatgattaaacccatatttccctcaaagtggatgctcaagtaaataaagatcgtggcagaactgtgttctgctcacggtctctatactcaattcatcttcttcaacagggtggtggcttaaatcacacttccattctactaggaatcaagcagactcatcacagcaaaagaatgagccctactcgattccaaatacctcaatactaagtaaacatttttgtagcatataaaatgaataattcattcatagactgacttactcaaaagtttaaagtaacctctagactgagtacatttattagtatttttttaccttaaaaaagtcactagaaatttaacagtttagctatagccaagttaacaatttagctcgatcttaaagcacacaaatactgtaaaggaaaacaagataaaattaaatcacattgttaaattgatataattgcagcatttctgagaatagattctcttactaaaatttttcttggtgaaataatcatccgatgtttatatatttacatatctattgctaaaggcaggattttgttaatattattacaaaattatgactttactaccggattaaatagaaataaaagataatcaggcacaaaaatgttcaagaagaaaatcaatgaccaattagcaagtaaagaaacattggaatgttaagtatgaagcatgcttaataaattatgttaagcataaagtatgtcttaactagtctatataatatagtttgcatctcattaaattaacttgaaataaatatat

SEQ ID NO: 559 - DNA, 2311 bp, Homo Sapiens
acatttgtgctcattcatttttttctgtcttccataagaataatcattactgtgacttctttctacattctattacttatttctttaaaagaacaccctttattgcccaaacgtcatataattacaaaagtagagagattatacctatttccagcctcagaaattatgaactgatagccaacctctttcatctatattcctacccatcctttcctcaactcctttgccaaaccatgttattcagatgccgggcattacattacaggattttctaacacatcatggaaattgatcatcacaaagttctcattgttagtttctctccctttcaggtcatggttgctttcttctttttggaacaccctgatgtcaaatgatgcttcaggaatcacaaaaccaaagcaagaagggaggtacaagtttatttattttattattttaaataatgtaactgtaacaaaaagcattttattttttccttcctcacacttccttgaacttgcctgtattaactgaagttcaccttccactttgactctgtctgcagaaatgtccatttctggggaactggctttagcttcaccccgctctaaccaggtcaaaaaggatgatagttctttctctagcctaaaggaagcagagagcagaaacaaatttattgaaaattatcatgctagcagattaaacctttgtgaagttggagggtccaacacaaaccatagtaaatacagcctcagttatctcagtcttagatatgccagcacaaaaatccctccttttattttcatttgtgtccctgcactcacatttatattggataatatgtaaagacccatatatatcctctccactctcaggaatctttgccttataacaaagatcaagagtttcctacagtagacccacaagttcacgtcttttgcatctgggataactactccccatcactttaagaactgctaatccagaatttcctatttagtagtgcagcaactcaaggaaaagtgctgctcacctctgccagtgggccagcagattctccagcgccgtctgtctctccttcgccctccttaggatgtcctcgtattgctgctgtagagccgcagcctcctgaacacaggaatctctgttcacaaccttcctggcactggctgagaaggcagtgatcgcgctgctcagtgactccagggcctggcagagatcctaagaagagtgcgagaagaatgcagtgaaagcacaggagccaacgaggcctgcatttttctttgacaccgatcatcgcaaaatattttccctcagtcataataaacaggaatagcactaagaatgggtacaaatatacagtttgatagaagaaatgagacttagtgttcaatagattagtagggggactataggttacaataatctatcctatatttcaaaatagctagaaaatagtttgaatgtttcttgaataaataaaacacaaatattttaggtgatgaaggtcccaattccactgattttacttttacaaattatatgaatatattaaattatcacatgtgcacccccaaaaacaaataagagttatatctattttaaaaggtctgtgcccatgatttgcagcaagacatagtgaaaatgagaagaaagtgacttcataaatacagaaatcaaaaacgaaaatggagacacttcttcaaataagaatgcactgctatttatctaaaaactttcaactttcccttaacaatttaggtaacttgtgaagattattagtcattttatgctaaatacgtatttaaaaaccctattcttaacttacaaaacccacatgtaacatgctataatcactccaaaaaatacatataaaaagaattatggctgaagaagctactgtctatctcaatagtaataataataataataataataataataataatgacacagtgcctcagaatgtggcaggccctgcattacctgcttcccatgtattgactcttttcatcttcctgagaaccctaagaggtatgttatttcattaccttcattttacagattaggaaatcaagacacagaaaaacaacttgctttaggaaatctaaatatcggaaaagtagaatattagcctctttggtcctccattattaacttagttgtctataaaaataatttcatcacactgaattctcctacttttcctcattttttgtattaagaaattacaaataagtaacgcaaaagtgtattctcattatcaatatttaaacaatagaaatctcactccctcttccagatggcctttgtcaatggcttgttttct

SEQ ID NO: 560 - DNA, 2454 bp, Homo Sapiens
ctctgggatcaagggattgtcccacctcagccttccgagtagctgggactacaggtgcgtgccacctagtccagctaatttttgtattttttgtagggatagggttttatcattttgcccaggccagaaggattgcttgagaccagcttgggcaacataacgaacccttgtcagaaagggaaggggaaaagaaaggaaaggaaaagggaaaggaaaaaagaaaggaaggaagaaagagacaaatataattgtgttatttagagaacagaggcatcactgggcatggtgtcgggagcttgtagtcccagctactgggggagctgaggagggaggatctcttgagcccaggagatggaggctgcagtgagctataatcacaccaccgccccctagcctgggtgacacagagagaccctgcagcaaattttaaaaattaaaaataaaaaagagaatagagatgtcaaaaattttcaaggaatctcatcttgtgtccaaaccacgagaactatctgtggttaggtgtgttcatggctgcattaattaaaagcgtgctatagtcccactactggggaggctaaagagggaggatttttttgagccctggagttcgaagccaacctgggcaacatagccaggccccataactttttttctatccattttttttttttactatgcaaatctcactacacagaccctataacagaaaaaaaaaagaaaaagaaagaaaaaaggcgggcgcttattctgctctgtactcagcagtctcaggcaagtgacagaataatctgaaaacctggtccagagggaggaaacgtagtggccagggatcagaagcgcgtgagggacctatgaagtattcattctgcaagtattagttctttcctctgggagagatactgggcttgcccacgccttcctgagtccatggttaagactcccgctgggcaccagcggattcctggtgcccagagcccggttcctcctaccgggtgcgctgggaaaagggctgctcctgacagaagggacactctaagagcagcccaggaaccggtgcacttgggcggcctcggaagaagccggggctcctggaggcggaggcgaggcctgggacccaataagaagggcgcggctagagaggaggggctggccaaaagcccttgaaataaggcccaggcagaaccgcggttctagtctcccagctccagctcggcctttgggtttgctgtggtgtccttgtctcctgcaggaccggccgcagcatggacgctcccaggcggtttccgacgctcgtgcaactgatgcagccaaaagcaatgccagtggaggtgctcggtcacctccctaagcggttctcctggttccactctgagttcctgaagaatccgaaggtagttcgccttgaggtttggctggtggaaaagatcttcggtgagtggaccaagaaggggcagcccccatgcggcttctttctgccacccatacccacagcccacatattctggctgcgttccagggcgatcctcaccagtagccaatgccctctggctgtctcctccttccaccttcccctcccaagacccccgggagccaccggtccctcacagcctctctgctacccgcgcaggccggggcggagaacgcatcccgcacgtccagggtatgtcccaaatcttgattcacgtgaatcgattggaccctaacggcgaggctgagatcttggtatttgggaggccttcttaccaggaggacacaatcaagatgatcatgaacctggctgactatcaccgccagctccaggcgaaaggtacggggctgggaatagggctacctggagcaaaccctggctccgtaggagtgatcctggggtttcctggctgctggggcggcagtctcgccctcccagtcggcctgcggttggtgggtgggggagggggcggttctcgctgccacggatccagaaggccaaattgaaccctcgttctgggatttctggctcctactcccgcaggccgcttgggtgactgtccttttttggagaggatatagagacacagctgtggcctctgcacactgctcttcttccaggctcaggaaaggccctcgcccaggatgtcgccactcagaaggccgagacccagcggtcttcaatagaagtccgggaggccgggacgcagcgttcggtggaggtccgggaggccgggacccagcgttcggtggaagtccaggaggtcgggacacagggttctccggtggaggtgcaggaggccgggacccagcagtctctccaggctgccaacaagtcggggacccagcgatcccccgaagctgccagcaaggcagtgacccagcggtttcgcgaggatgcccgggacccagttactagattatgaaggcatctcaggccctggagccagagccagtcaggggttaaagtgaaagcccgtatttccg

SEQ ID NO: 561 - DNA, 4898 bp, Homo Sapiens
aatttatgcatccctcttccgggagggtcccattctcccagtgtcctgaccccattctccaggcactgagaccacagttgtggtccagctgcagaagccagcccagcagactggccctctgccagagacaggaagtgggggaagagctgtgcgttctgctggccaccaaggaggggtgggcgccagaggctggagctgggccagaccttgtggtcttgcggaatgaactgcaagggaggagttgtgagctggcctgctccactttgaagggtattgtgaggggcagagcccgtgcaaggcagttctgtcccctttgttgcctggaaggctctggggtggagagtggggaataagccctggaaggcaggaaagaatactgaggtgggagtctggaaagttgggatttggtaaggttttgccactaactcactacatgacttgcattagctctttcccctctctggcctctgttttccaacctctgaaattggaaaatgtattgcactctctgtggcagacacatctctagggaatacactagtagacaagccagtccctgctctcagggcctttcactctaccaacagatgagcaaatatagaataggccaagtgctgaaaaagtctgggtagaataataaaatggtgttgggggcagagagtgagaagtctgggacggcctctcttagaagctgacataagcagaagaaacgaggaaagggccaatgtgggtatctaggggatgcacattctgggcagaggaaagagcaagggcaaaggccctgaggcgagaaggtgcctggcaaattaaccgagaaaaggaagtagcatggctggcagggaataagtaaggggagatgagggccaaggcaggtggggcccagttcatggagactgagggactttgcgctttattctgaactgatcggtgggccccggggaagctgggcctgggcttgggtgcagagcccacttggtgctgtgcatatgtgtgtgtgtgacagtgttgggtgggggaacacctttgatctcccctcatttaccctggcttcctggacaggtccttcaggaagagacaataacagggccgggtctagggtgaggcatgtgaaacctggagtgaatgaggcacttggctcaggttcaaaacttaagggggcatcaaaaaactcagtaattaagataaaacaatattttcctgcaatatgtataaaaatccaaattaatgccaaaaagtctatgataaacaaaatgccaacattttagataaagacaggatctgaccctgaacttgcgtgattaattaccttaatcctggtcctgtttccaatacaactttatttaaaaaaaacaaggcagctggcccaaagaactgtagtttgcccatttggtatattaaaatattgccttaaaatattcctcatcagtctgggcacggtggctcatgcctgtaatctcagcactttgagaggccaaggcaggcagatcacttgaggtcaggagttccagaccagcctggccaacacggtaaaaccccgtctctactaaaaaaaattagccaggtgtggtggcaagcacctgtagtcccagctgctttaacttgggaagtggagattgtaatgagctgagatctcaccaccacactccagcctggcggacagagcaaaatcctgcctccaaaaaaaaaattccttatcttggcatccccgaaatcttgcacaccaggtgagtgtctcacttacctcaccccagtcctggtcctgggccccagtgctcatccctcctgaggctgagaggcaaagggatttccccaaagaaatatagtagatggtgggtctggaaactgggctcccatgccaggcctccagcctggccatcatatcctatcatgctctgaactggaatgttgattttaatgtgttgatttttaaaaactttttattcaagtataatagtcatacaaacaagtgcctgcatcataaatgttcagcttgctgcatccttacaaaatgagcacacctgtataaccagcatgcgtgattaaatttaaagcataatttacatttccaacaaaacagacattagtactgggccagattcagaggacttttgagatcaagcaggcgacttggaatagtaaggctccgggactgagctgatgcagagtttaggggccctggattgagacgagaaagcagggggaggggtgcagcactgaggtctggggttcgggagggggccctatacgcgggaggaaacggagagagacggtgaggattgccttcggaggtgggtgaggcccagcgtgcgcgcccaggtaagcaggtaagaatgcagcagccgccaggcccaggcgcgggcgcgtcccgtccgggtgactcagcccgtgccaggaagcgggagttggctcagctctccagagctcccggacagcagccggatcccggccggctcctggggcactaggacagacccccgcggctagcagcccggcctggggggcggaacactctcttcttgtcccgccccaccttcctccgggccgcaaccaccccagcccatcgctgggacgtggccgcgggtgccgagagcgctgccggcgccgtgggggccatcccggtcctggccccgacggcgccccaggacctgcgatagccgtaagtagcgactatgggggctaggagagtccaagaagtggggagctgggacgcccggcctcctgcgtcccagctctccacttccagacccggctggactcgggactagaaaaggtggcctggtgccgccgctgccttccagtgtgctcactggccctcgtggcggggagcccagacgcggctcctaggcggccctagacaagtacggccgagacgctgtcaccccagggggctgccccacctgagcatcatcccacgggcccgcccagccccacctggagagccgcaggctccaaagtcttccccattctcggggaccaggttccggggtcgcgctgagggcccctgaaccctcttggactgcctggcagcggcttcttcctaccaccacggctcaccatccagacgcgccgcccggctggccccaccgggagaggctccctccctcccctttctccccgaaccctcatcttagaagccctcggattcagtctggatcccaaagaagggctgaattcggaggacctctctttgcccccaaagtcggttttctgacacacattcccacgcacagctggtaggggcaggagggtcgaggatgctctgggctgctgcggcacagggcaggctggttggtcactaaccggatttcccggacagacaactctggcgctgtgggcgggtggcctgggagcccagatccctgtccctggcttaggaccccgggaggagaccgagggggtgggtaaaacgtgactgagaaacttgatcgcgcccatctttggggcaaagagatttggaggccgcaattattcagacagttccacgaagtggttgaggtttctctctttctcctgattttccagaaacttttgcagagtttggacaggcaaaggaaaacgtgcagcccgcggatctccgggcctcagagagcagggagtcggggagactgaggccccgctccgagagcgcggaggaagcgcgcccagccggcttcctgtgggggctcgggcctcgggcgccccgcggacagacgtgtccggctcctggctgggccaagcccggcgcgggggaggggacccgcagaggggcgactgagaaggcgaggagggggcggggagagggtgggccagggaagaggggaggggagaggcgagtaggggaggagcgaggggggctggagggagagaaggaagaaggaaggggcgaacggcgtgagctggcgccgaaatgggagaaagcagcgagtgagaggggaaggggcgccaggcgagcacccgggagccagcgggacctgggcaggggcgcccggagcaggcgcgcatggcgggccccgcgcggggatccggctggaagagagcgtagcacggctcgcacgagtgagtggacgtgggaggcgcgcatctgcgggggaatcgccccttgcccgcctccggcgccgcccgctgagccctgttttccgcaggtccggggccgatgtaccaggtgagcggccagcgcccctctggctgcgacgcgccctatggagcccccagcgcagccccgggcccaggtaggaccgggagtggcgagcgaagctggacaggggcgggtgggcggctgaaggggccagttattagttctcctctccgtccccagacgcggggagaccgttccagggagcttggtgggggtagggacgaaaagtctgggtttgaggacttggtccaaggagagtagggggctgggcgagggaggcagggccctgaacagaggctgcggctgcgccaagttggctccaactccccgcaactcccgacaccagacacacacacacacacacacaaacacacacacatacactccgcggtgtctgtccgtctgggatttgtgtctcaactgtttctgcccagtgtgtaaatatttgtgggggcctggtgtgggggagggggcgttgtctgaatctttctctacttcccttcccccagcccaaccagagcccagcgcttcccgaaaacttttgtctgccgcgagcggctgcaggacccagcccctcccctctttcttgccatcccttctccctcgccttccttccctctcgtgccggccagtccccgccgcccctgccctgtgcacacacacgcaccccaacccagtgtcttcagcccaagtgaaatgccccgtcccgcgcctggcgccgtctgtaacctacccgcgattcctgggggagcctctcacgccaagtacggtttgtgactccctg

SEQ ID NO: 562 - DNA, 2417 bp, Homo Sapiens
ggccgagacgggcagatcacgaggtcaggggatcgagaccatcctggctaacacggtgaaaccccatctctactaaaaatacaaaaaaattaggcaggcttggtggcaggcgcctatagtcccagctactcggtaggctgaggcaggagaatggcgtgaacgcgggaggcagagcttgcagcgagccgagatcgcgccactgcactccagcctgagtgagagagcgaggctccatctcaaaaaaaaaaaaaaaaaagacacccgactccacccccacctaatgccaaatgaggttggaggtgaatgtctctctcaccatacccaatttattcctccctcgaactgaccatttctcaattgcgtatctccttccctgctcaggaaaccactgtactcaggccaacccaacccatggggaaggtggtaaggagggcagaaagtgtgtgggcttaacaccagagcccaaatctcctcctcactgctcaccagctgtgtaaccctggacagatctcttagcctctctaagcctcagttttttttgtttgtttgtttgtttgtttttgagacaagagttttgctcttgttgtccaggctggagggcaatggctcaatctcagctcacggcaacctccgcctcctgggttcaagcaattctcctgcctcagcctcccaagtagctgggattacaggctcctgccaccacacccggctaattttgtacttttagtagagacggggtttttccacgttggtcaggctggtctcaaactcccgacctcaggtgatccgcccaccttggcctcccaaagtgctgggattacaggcgtgagacaccacgcccggccgcccgttatgaaatgggggtaaaaattgcttacaggtttgtggagagaagattacaaacttgtaaagtccctagcactgtgcctagcatgtggtaggtgctcactaaatcgtggctgctcttactatgatgctaagcatgggaatacggaggacacagctggagaggagacctgatgacctccctggtggagggtggccagggaaggagtggaagagagagctggggagaggaaactgtggccataaagaggaagagagaggcagagctggaggtgacatcaggggagagagaggagtgggttcggcgatggccatgctgggcgaggtgtggagagcacagctgtgctatctatcagctgcctccagctcagacaattcctgtgcccatctcatttttgtctgcccatcgcctctgccgggttggacacccttaccaccacggtcaccgttgccacactgtcggctgctatttcttgcctcatcttccttcctgctcatgatatggcagaaggtggcaagggaagcagctgccctccgccagcagcctccctgccactgaaggctgaagctgtccacaggcatgggtaaagagctcaggctccaaagacagatgagctgggttccgttcccagctctagcacttaggagcgggatgacctcagcaagggagatgactcagctaaagcttcagtttccttatctgcacagtagggataacagggctgttgagaagaaggaatgagattatgcgtggtaagcacccagcccagcacaatgtctggcacacagcaagtgttcaatacacgttcgtgttcgctattttcaaggccaaataggtttgtgacctgtgcagccacacagggtcccatgctcaggacgggtcccaaacttggttaatgctctgtcaccaccaccttgaaacggtttttttttttttttcctaagagacagggtctcactctgttgccaagactgtaggattgcagtggcatgatcatagctcactgcagcctcgaactcctgagttcaagtgattgtctcacctcagcctgctgagtagctaggaatacaagcaggcaccaccagctattttattttttaattttttttttttttattattttttagagacagggtctcactatgttgcccaggctggtctcgagttcctggcctgaagagatcctcccgcctttgcctcctaaagtgttgggattacaggcatgagccactgcacgcagccttgaaattcttaatagtttttgaacaagggctctgcaaactatgtagctagtcctggctattattaacatatatttattgagtctgctggctggcagtggctatagaaggggacacctgtccagtagtttgttaaagatgtgggacattagacggccttgggagcctcaaaggagggatttaaatacagtgatgtggcaccatgccaggttgccagcaattagagactaagagggcagtgagacccccacacatactctcactggggccgggcacagtggttcatgcctgtaatcccagcactttgggaggccgagatgagcagatca

SEQ ID NO: 563 - DNA, 2464 bp, Homo Sapiens
atctctgttataaaaatccagtcttccaagcatggcacacttcttctctaagggccagaaatgaatttcaaactatcttgttgtatcttttcattagaggaagaactgcttcttttttttttcttttttctttttctttttctttttttttttttttttttttttttttgagacagagtctcgctctgttgccccagctggagtgcattggcaaaatctcggctcactgcaacctccacctcctgagttcaagtgattatcctgcctcagcctcctgagtagctgggattacaggcgcatgccaccatgcccagctaatttttgtatttttaatagagacagggtttcaccatgttggccaggttggtctcgagctcctgacctcaagtgatctactcacctcagcctcccaaagtgctgggattacaggcatgagccaccgggccaggcaggaactgcttcttttctcttttgctatctagaaaccagcaaactccatgatggctatttatctataatttatttttaagaacattctgccaatgacatctcaagcaagatgtgacaacagttacacaaagcagtctacagcatgcagtgtgtctcaatgcctctgagaagtagcaacaacttttgttctcagatggccctcagtccttccccgtgtcatctttctgtcctagactgtggcctaactgctcacaaggattcaacggcatgcaaacagctgttagttggttttcttaaaagaggtattgttgattggaaagactggctcatatttaaactctgccctttttgcaaatgccagattttctcaatagtattccagaggaaattttgttttgaacacagttactgaatttgaccagactacagacatagcaccacccatattgctcaatgctaagacacagcatctttgattttctgtatgtcataacgttctgaagattgagttattgatgagaaatttttgcagctacacatcctcctatagttcttgctctccattcaagcaggccctagggctcatggcaagatgatttccttggggagaaagagcctgagacttagaaatttaatttgtataatgaatcctggctttttccctcctttagggatctgattcttctttctcttcctcctcctcttctgtcacaggactctatgctccactccagcgtagtttggttgactgatgcttcattctctatatgcactgacatgacgtgtgactgttcaggcacagttggagaagttggagaagacagcacctcatcccctctcccagaactaatcattgattggagggccaatgcttcaaccttgatgtgattcagcaggtcatgcgagggctgccttcaacaggagcagtgtctcctcctccttgcgcagttcctgacccagctcggcatgtttcctggtgacactgctgctcgccacatggcccagtgctgcaaatatttttatataattacatttgttcattcaatttttaagtgtctttttaatagagaaaacaatcactttatgagctcaaaatctgcaaatcccttgtattttctaaaagactttcttcaattacaaaaattccccttatgttttattctaatactttataaattttgtttagcttgttgattttgcatctgaaatttacattacaataaaataaagataaaatttaatattttccctcagatgcattgccaagtatcccaacatagtttgttgaatatttcttttttctctgctgatttgaaatgccaattttctcatacaccaaatttccatacagatacatggctgtggctctgtccaatattcttttccactgatctgttggcatattcccatgccaccatctatgttcaattactgtaggatgaatatatatagatatatgtatatctatctgtctatatcagagcagttctctctcattgttcttgtcttttaaaattattatagttatccttgctcatttactgttcagcatattttgcttccagtaatcgattgtaagaaatgaatgtaataatttttttaaatggctctgatgttgaaaagactgtaaaaaaatgaagtacacattggccaacttagcataccttttgaaagatattgtttaagattccatattgatcttgcaagatcattccagggaaataagtgtgttattgtggtggatacacccaccacaatctcaccatttgaggatgtatctcatcattttgatgatggctccaaatccaccttattctaacacaaagtggactttgcaatcatagttcttgtccactaattgtgacacgtggattccatcaccctgttgtttctgaggcattctttgcacttgcttccattaggtttatgaaatttgtgaattgggcatttttactgaacttttaatctttcatcatcttcaaacgatcgaataggctaaaaatgctgcagactg

SEQ ID NO: 564 - DNA, 2443 bp, Homo Sapiens
agaggttgcagtgagctgagatcgccccaccgcactccagcctgggtgacagtgcgagactccatctcaaaacaatcaaacaaacaaacatatatatatatatatatatatatatatgggtcgggcactgtagctcatacctgtaatcccagctctttgggaggccaaggtgggtggatcccttgagcccaggagttcaagaccagcctggccaaaccccatccctacaaaaaatacaaaaattaacccagcgtggtggtgtgtgcctgtggtcccagctacttgagaagttgaggtgagagaatcactagagcctgggaggttgaggctgtagtgagctgtgttcatgccactgcactccagcctgggcaacagaatgaaaccctgtttcaaaaaaaaatactttatagcaacagaagggaaccctcatggaaactatggactttgggtgataatgacaaatctgtgtagattcattgattgtaagaaatgtgccattctggtgagggttgttgataaggggtgcggggcaggggcagggggcagtaagcgggggcagggaactctctcttccttcctcttaattcttctgtgaacttaaaattgctcttaaaaattaagtctttaatagaaataaacacataataaactctaaaaatactaagatctgaatgtcgaaaaaatttgtaattgttctaataaccatagataacaacagcacatagaccacattacaatcggcggttttcccgcatgcagctcgtcccattcgtagtgtgaaagtctcattagcttcgattttaagcagtgcgttttttttaatcttcccctacgttctggttcccatcttatttttgaggcccatagctgtctaagtcatggtatgtgcagagagagattttttcctgctgattgtatgaaaaattgtgcaaaaggggttgtcatctaaaaaagcgtgtgacactgggagagaccttgtatagtgagcagggcttcccatgagttcatcctggatctttcactgagaacaggatgttttgtcaaggatgggcaaagaggggcacagcagaaagacaaaaggatgtgccagctacaaaaaccacgtgggccaaggacagggggctgcaatgcaaagactggaacttgcagcacggcaaactagagcgtggcaagattagcgtttcagactccagacaaggccacttccctctccaggaaagacgatctcctcaccaacacaagcgcttggcgcttcccttttccgtccaggcgtcctggctggaacgaggaaactcaaaagtgctacgaaagaacaaaagtggcccaaattctgaaaattcttaaaattaaaagattgtaactcaaaggaagataaagagcatgacttttaatttctccaagctacttcattcattttcagtgccaaaaacccaatgccagtcttacatagtaatccacttactgtagttgaaacctgaggtgtgaaaagttccgtgttgacaaagatttgcatcagctgctgccgctaaacaacatgtaaaaacttgcagtttaattttagcttcagaacaaataagcgcttttccaaacccacccaggagcgcaggctgtcactaggtctacaggtgtgctctgaaatcagacactatcaagaaattctatcgtgctaaaatgaacaaggagccgggacggcacaatccatcattttttaatgtgttttgggaactgtcttaacaagtgtggaagtgtcccagcgagatgttgtattcagcttccactgtgcatatattaagccagcgtgcgtgtgtgtgcatgcacacatgttcgtgtctgcattctatattagaaggtctcaggaaaagagtgataaataagatgaagcggtaagagggcaccaaagaccataattaaaggcgcttgagagcagttagctggccttagcttactccttcaaccagccccatttattttgctgctccggtgtagcagatactgtgcagggccccggcagagacacaggggtcacggagatacaagccactctcggggaacccccagtctaattaacatacaaatagcagtgacacccggcagaagcgctacaaggcagggcaggctacaaggcagggcaggtgaagtgctttggtggctctgggtgacagttattgccacatatcatcttccaggagtcctggggccatctgaaaaaaaaagagatttgatgaactagtttttcttccaggggtgaaagttgttcagtttcttgtggcaaagaaatataaaatgaatggaaaaaagaagaggttatatgggtgaattattaaatgtaaggagtggaaagatattacatctgtgtaaggaacacacaaagatttttctaatttttagtcataacatttataatgacaaattacacactagccttgtgaatcctatgtgtaac

SEQ ID NO: 565 - DNA, 2189 bp, Homo Sapiens
tgccactgtactccagcctgggtgacagagcgagattctgcctcaaacaacaacaaaaaccaaagtatccactagagctcttggaacatatcacctgtggataaggggaaccactgtatacacagatctttgtgaagaatactgctaacaacccaagagcaatcacttattcagggctcacaatgagcccagcactggagttccctgctcatccttggaaatttcctgctcagatgcaaacatagctgaactctcaccttttcctgctgacagccactcacccacatctcccttactagagatagaaagaaaagaataaagaccaaaaaaccctgttgactattttttcctttcactttttgagaagtgttaatagaactgaaaataccagcaaggaaaaacgccctcgaggaatagagttaattggatctccaaaatgttgtcatgaaaggtgcattcctgggatatgaatttgatttccttcctttcttcctctctatttctttcctctctctccctttcctttcctgtctttcaaaaccattcgcactccttttatgaggcatgcagatcttggattattcttccactttccagccaactgcacttcaaaacagccttaataaggctgggcacggtggctcagcctgtaatcccaacacttggggaggccgaggcgggcggatcacctgaggtcaggagtttgagaccagcctgaccaacatggacctcgtctctactaaaaatacaaaattatcccggcgtggtggcgcatgcctgtaatcgcagctactagggaggctgaggcaggagaatcgcttgaacccgggaggcagaggttgcggtgagcggagatcgcgccattgcacaccagccagggaaacgagagtgaaactccgtctcaaaaacaaacaaacaaacaaacaaaaaacgccttagtaacagtgccctcaagaacctggccttccagttctctggcagagaagacctactgctgccgctagtcctcaagatggcatttgctggaggcggtaggcagaggccctaagtgtggattctaacccccgtggggactgaatctctgcggctgttgcttgcccaggcacgtttgcctcccatgaacttccttcatccacagggccccaaacctcatgccggcgggaggaggaaggagactgggcataactcatcagactttcgactgtaagagctggaggccgcctgcgggcttatctgtacccgggcctgtccccacccttccagaatgtaaatcctctgagggaatgtgtcgtcgccatctttcagtcctttgagtgcacccagtctctctccaacccaaaaccctttatccacggcaattgtgagaatgataagaatccccctcacccctcacaccgcaaacagttgcaatgcttagtgggattcacccttgtcgtcaccaaccctgctactccagccacgtgagttttccgcctgtcagccaagcaaaatggccttcctgcagtcgcacggccctttggtctctgctcagggcttcggggaccctttccagccattgccctgcacctacccaccagatcgccgccctggtgggcgctcctggccctgtcccccgcgcttagtttgtcattgcgcgcccagatccggaaccccagcctcgaagcttccggtggccgggaacaaagccggttttgctcactgttgcctggcaaagcaggcgcttgttagcacccactgaatacgcttatgtgctcagaaacggtcccattggttgggactaccttccccgatgcccatctgcccagaatcttccttctgggatgccgactttttcaacacgtgccaggagcccttcctcggcccggaatccccagagtgcccacagtggacagggcacctggatacaccccagactaacccacgtttccccggaggaccccagaggttggaagcccctccaagattaggggcgcagtgctcccctggcctgcggaagagtcagaggagtggggacaacattcaacatcagcctctactaccgctagcgcgactccccgccgccgctctactcacctgacgcgcgcagtggaccgcgatttaggggcacagggtctcccggggaccagcggctggagcgctccggccgagcacccgcagtcccggcgccgcggccccgccccggccccgcc

SEQ ID NO: 566 - DNA, 2367 bp, Homo Sapiens
tggctcacagttctgcaggctgtacaggaagtatggtgctggcgtctgcttctggtgaggcctcaggaagcttccaattgtggtggtgggtgaagggggccaaagcatcacatggcaagagtgggagcaggagaggagggggttcccagacgtttaaacacccagagctcaggtgaactgactgagtgagaactaactcatatcaaggggttggtgctgaactgttcatgacatgactgattcacttctgtgatctagtacctcccaccaggcctcccctctaacactggggatcacatttcacatacgttttggagggacacacatccaaaccacatcagcacacatggtctccaaatgtcatttagcccctcctcatgcgatgtcagaaggctgacgcctgggggtgtgcagctttccaggacatccttcctgaagggttgcagcaatactttaagtgttacatacccatgtgctatgccagtgtcagctttaaggatgtgtaatagccaagggttgagccatctgggaccaaatatccgctttgcatagacagtgtccatggtgtggattaacctgctcctgtctgctgctgggactgggtgccggctgctgccgttttcatttcccgggagcccttgctggcctcatagggtagcatcacatgaaggctgcctcccgatgcccagcgctgaggtgtgaagactgcactgtgttcgagacacgagttccacgtggttgctgcctccttcacacgtcctgtgatggatttctttttatcaggtggtctcttgtctgtggttagcatatacacataggacatgaaagacacagggcatgactacaagccatgcattttcccagggatcaggacacacagagagagttctccctgctgccctccgcccacatcataacgaacactcagctggagagctaagagaggggtcagggttgagaggtcaagagttctggggtccctgattatcttccgtcgtcgggagaaagaggaatctgtaaggcctaagcggatggcatggatgcatgtaatgaagaccgggaagcagatcctgggtgggagagctgctctaagcagaaaaacagccaactcaaatctacctctggctgagcctgagcgtcagagcaaggcagggaagagtgcccggaatgctgagccagcccaggctgctgcaggctgcactgcatggaccttagcaccagcaatgtgtgcacagaaaagccggtcctttccgttgtcaccgattgcttaccaaagtgaatctgggtagcgtcgactctgctgttgaaagtatctgattttctgctgcatggattccttccctagggccaactgtgattgcagacttaatcaccgagaaaacttgtaccctataggataattttcttggtttcatgcccataccaactgaaacaccagacagacttttgtaagtaccacaggcatgtctggtttttaagcttcagcagagatttttttttccattaacaatatgaaacagacttaaaagaaatacaacaaagtaatgttctcctgattttttttgtgctgattttgcatttccctaaactgacattaatttttaagcatacttaattttaagctttttaataaataatatattcagtagaaatccactcacatgctattcataatttggagaatttttgcttatgttgcttttgttgcaatggggagtcacagtactttgactatagaaacacacaccaaaattatgattagaatgtaagtaaaaaaacaatgtggtatgtagctgtctaacagcactggatgtaaaagaattaaacagcacaatacataacaatacaaaagacaactcccaagtatgtgccaggtttcttctgatgaattgcaaagaagggataacaatatatattattattatttgctactatcccattaaagaagtctggttctggcctccagtggacagaggcacagacaggtggagctgtacctgtggatgtacacgtatgcacacatacaagtccgtatgtctagaccggcagccttgagcactcaggccagttaatatcatcccattttttatgtttcagctgatactatttttgaactataaaataaaatgtctaaacatcagaaaacaagcattctatgtctctcttggaggcaggaatatcttttcattggttgacaaagtgcacttcatatctgaagttagatttttattcttccatgatgaggattgtgactcaatacgtcagttggtcctggctctcttgatctaaggacacacaatatttcaagagtatttggaatgcttagcttaactaagatggtttcagtatgaatgggaaatcgggaca

SEQ ID NO: 567 - DNA, 2309 bp, Homo Sapiens
atacaatctgctggccctgctgccagctctaacccattgatcctatcactgttttggggtcagtctcccatcctccagctgtccaaactctccaccttacatatttgaattccatgacaaatcatttttaacactgccttgcctgcaatctcaccatttttggatttctgtttattgaacttgcttggttaaatcttattctcttccatctctgtgtgcaattacacaactggtcatcactggtaaaaatctcaaaaccacccacagagacagtccagcaggccgcatcatgccaccagccagcctcatgcgcctccctcatggtctcctacccatctcctggctgacactggtgccttctccctctcctcaacctgcaccagctcgggcctcaccctcccgctgagcaccagccttgctctctcctggtccctggcaaggtgggggtgatctgaaggaagtctcggtctcctccccctgccctgtccacgggtgccccggcccctgtatccagggccctgccctccacactggggaccacgatgcacatccccgccccgcagagccagtccgtggcctggcctgcccgccccgtgtgcagctttctgccagcacagctctgctcaccctcaacttcactgtttttctcctggattctccccatcagcaaacacacatgctgttatttgtcccattttaaaacacaatcaaaacaaaacagagtactttggactgcactttctgccagccaccaccctcgagctcctggcctgtgcagctgaccccacggccaggtcctccttcacgttctcgccaccccaaatgcgggcaccgcggcgccaaacctgctcttcccactgttgtcaataaccgcagcctggccgaatccagtgattcatttctgtcttaatctctcctggcctttcggcagcgtttaacgtgtgcgacccctcccttctcctgtcttcagccttcctcgggatccgcgaggcgccctctctcccatctccctctcaggagtgtgtctccagccccgcacctgccctctctattctcagtgcatccccgccgcaggcatcaccctctgacttgtcatgccatccgccccctccctcactgtatctacgctttattacctgccttggctcgtacaatgtcagctttgcaaggggttcttccaaggtcttattttcaattgatcaatgccgaggatggggagcaatgcgtgtaccagagggggctgggcacacgcaggcttgttgttggatggaggagaggcagcatcccctgcatgcctgggtggtccccatctccaggcctgcgacaagcacttctcatcttcccatcctctgacggagccagtcccacccaccacgtggacgtgggtgttgtctgtggaccaaggtcagtgttttgttggtttttcttattgtttggcaccagcattacatagaccaatagaccttgttgttctccgcccggaggggctggtgctgtggctggggcaccgccctgggtaggccccgccccaggccatgcagttcccaggctcctttctgggaggggttggttctcacaaagggggaaaatcatgaaatggcaaacctgagtcacggcagcacagaggacagcccctgaaggcataagcaggaagggcataatgctttccaaaagagaaaactacatggactttactgactcatcactgagttctgagatcactgacacttacacatgtgtccacgctgttgtgagtcatggggaaaaatggaggagcaaaatgaccaagtggcagggtctgtaagagtctctcactgtagggatgggctgccctgaggagacactgcccaggcctgggtgccccgggccaaagtcctgacccttgcagggctgtgtcctgtggatgacatgtggcactggactgctcactgacaggtaggaactatgcactgagaggtgggaactgctggccggggggtgggaactgctggccgaggggtgggaaccgcctgctgaggggtgggaactactggctggggagtgggaactgggcactgagaggtgggaactgctgaccaggaggtgggaactgctggcccgggggtgggaactatgcactgagaggtgggaactgctgaccaggggatgggaactgcctgctgaggggtgggaactgtgcactgagaggtgggaactgtgcactgagaggtaggaattgctggccagggggttggaactgcctgctgaggggtgggaactgcccactgagaggcaggaactgggctgagtgctcagttttcctgttctgc

SEQ ID NO: 568 - DNA, 2697 bp, Homo Sapiens
gttggcggggcccgcctcttcccctgcccccacctggagaattctgggggaactgttggccagagcctccaggtatgcccagaatggaccattctccccagggtccacggaatcgcacaagtcacttaggttctcccggatccctgcagagtcggtggtgggtacagcaaatactcaggtcccctgcacttccctgagccttgctctctctattctccatccctctccagacccctccccctactgagctcctccccgcctcggcgaggagggggcgtcgagggggcggggcgccgtgcgggggccggaggggagggggcgtcgtggggcggggcttggcggcggcggcggcggcgcgcggggactcggaggtactgggcgcgcgcggctccggctcgggacgcctcgggacgcctcggggtcgggctccggctgcggctgctgctgcggcgcccgcgctccggtgcgctccgcctcctgtgcccgccgcggagcgcagtctgcgcgcccgccgtgcgccctcagctccttttcctgagcccgccgcgatgggagctgcgcggggatccccggccagaccccgccggttgcctctgctcagcgtcctgctgctgccgctgctgggcggtgagtacccgagagttgggggcacagagcttgggaagcgcgggagtcccgtgggcaaaaggctgcgcccggggcggtgggtttgggcggctggaacggccctggagtagtggagaggctcgctgggggtgcaggcttgcggcggaagggcgcaaggagcccgggtgtcgggaggctggcgaagcctccagggacgcggtcagggtacccctcccactcgcgccgcggggacgcatttccagcctccctgagtttttctggtctgagccgagagtttgctcgagaactgccgagagttgctggctctcgggcccagatggggagtttcttgtcgggggagaaaagaccatccgcacccaccgtggggagcgcgatggagaaaaaggaattccccaccccacccggcagggtcggcccaggtaagagttgctggtttggggcccgatgccggacagacctgcggcgcgcaaagcgcggagctttgttacctacgccgacccgacgttcccggcttccctcctccgagttcctgggcaaagctgagaccccagatggccctgcgggtgagggcggaagaagggaagagttaggggccgcccccatccatggcctctagctactggtctggaaccctgcgcccactccgtgccagggccgaatccggggatccgagggtcccaggctgtcgcggtgactaatgtgtgaaggccgctgccaaaatcgggcatggcctggctgcaaaggtgcggacggggtttgttctgctccttcctggatttccatcctgactgtcctcacagaggaaaggaagtatttctaagggaagaaaggcaaaaagagctcattctggcttttcttgggggggggccttagcattttaacgagggtgtggccctcatcaccagggcagacagcaccgcccccccaactcccgcagcttttatttcctggcttggtcacacctaagagtcatcactgaggtgttgaagtgccttacaggaaagcaccaagccacccgcacatcccaaatagcccggactggaaataaagcccccgaccctccacaacactccttggtggtcctcgaagcagctttctcttggggagctctgtcgaggagacctgtcctaggtgatcaccttccatctcctttgaaggtggcaatgggaagggcatgggtaaggaattgcctttctaatatctttctggcctgccagctgtggaggggttttggtgctggtggaatcaacatctcccctgcccccagttgtaaaaggagaggtaaatgtaacccaggaaagagaccaatctccagggatttggaggaggtgtttctggagttgccccgtttttcttgtgatgtgtgtggtggttattgctcgtggcagaatccacatctgctcccagaggaagtatggaagtttttttgcacagccaggatgggggcccagccatctgggcgagcagcccaagctcacaggccccctggctgtcctggttgggttttggtgtgtgggtctgcccaatgaggctgccttcactgctgctgttcagggtactagagtcaaggggagtttctggtgaagatggggctcttgctcaacaaatgctgaattcctaaattccttccatgagaagatgactctgatgttaattgacttaatctggtgactggttggtgtttagtgtgtgtgcgcgcgtgtgtgtgggggatcctgttgggggaagttagggcaggctgagggcttaggacaggaggtctgtagtctcctcaggggtggggggatgtcttgtgctcaacaaaggaacattttaatgagagccttaaatcaattccaccaaatgtgccttgttgtggaacctgtccatgtgctgtaaacaatttcagtggaggccgaggcgcctgctgtcttctagtgaaatcctgggactcaacccacccccagacgcatgacttcaggggcaacggttttttaatagatcacagtagatgtttgcatctcattgtttaattgtgtaattaactggagttgtagtgagatcccactgttaataaggctggagtaagga

SEQ ID NO: 569 - DNA, 2405 bp, Homo Sapiens
tgtgtaagccccgactaaatatagagcccccattctttgtgtaagctacttaagagaaaggattttatcttctaatttttatctcttcagcagaagttattattgctagttcaatcccaaatctatacataaattacgaagtttaataaccccttaaaaataagctttttaaaaatatttttcctgaaataatgttttactgaccttgaaaatttttcttagctgttgtcatgctcaacatttctcactgatgacatatgtggtgatgatggtagtgtaaagaaaaagcttgaggaaatacacacggtgctgatattttactaaaatgaatgtagcactcactcataattgtaatttaatttttaagtaaaaatctgattttccactatcattcccttaagtctggctcattataggcctaaagcctgtatgaatttacacagctgctttgaggctttgcatatttccttgttttcgattgtttgatttttttttaaaggggtatttttgcactgaagtaaaacacaactattaacactagcctcgggggaaaaagaaactaacaaacctacagcttgaaatgtttcaacactttgcatttaaaattttgcgcaccctttagaagttacaaaaataaaagccactccctgcaaaaaaaaaaaagaaaaaaagattgagaacaaactgtcatgatttcagaaaacgatagcagacgtgcaggtgctaataccagagagcttacctccgaataaaatggtgccttctaaacagcgactatttacatgttttagaatcctttcttgggcatgggtgcctttatattgccctattaccacaagatgcaagccgtgcagcagaatgttttctgtatggtacccagccaaaagtgaaacaagttgcccactgacagagaggccatttatagaacatattcatttacaccagtgctaggcagcaactgaaaggcaatgcaaagaagtaatttctctttaccttgcttggagcaactctgacctggagagccatgtacacatcctacgtcaaggaggtgatgaaagccccactccttatagcgatgacatctggaagaagacacaattgtcaccgtgagcttttcaattactcctggagactaagtgtgagacgcagtagtgcaggatgattggattacgcaaaacgagacagatgccatctgtgagccacgcgtaagctgctaagtgccaaaatgaacatccttattaaacgatggagttctcataccatttgtagtttggtcagatttgaaagatgagttgattgtttttagatagtgcggcaaataggcagggacttggaatcctctctggctgtatgagtaattactgtctcatacttaaattagaaacatgggttttcagttaggtcttgagattgtttccaaaggatgctgctgcattcatgttgaagcgtggcctgtcctctctgtttcactcacaagggccacagagttctgagaaagaaatcatcagttcctttcacatcatggcaaagaaatgtaaaacttatgactttttgttaggaaacaaaagggttcccatactctaaaataatggccacaatattgtgggtagaatgttttcaagaactgccaggaggcagtattggagctctgtctctctgcgtcctgaggctccagaaccaatccttcatttacaattcattctcccatctttttactggcaccaactctattattatttttattttaatttttaattgctgtgattacatagtaatatagtaatataccccatagagtttatggggtacatgatatattttgatataggcatctaatatgtaatgatcacatcaaggtaagtgggatttccatcacctcaagcatttattctttgtgttacaagcaatccaattatacccttttagttatttttaaatgtacaattaaattattattgactatagtcactctgttgtgctatcaaatactagatcttatacattctctctcttttttgtatgcattaaccatccccacactcccccttttctcccactacccttcccagcttctggtaaccattcttttactttccatctcaatgagttcaattgtttccatttttagttcccacaaataagtaggaacatatgaagtttgtctttctgtgcctggtttatttcacttaacataaggacctccagttccatccatattgttgcaaatgacaggatttcattctttcctttggctgaattctattctgtacctgtaccacatttctttatccacttgtctgttgatggacatttaggttgtttcttaatcttggatattgtgaaacatgctgcaatatacatgggcatgcagatacctctccgatagactgatttccattctttgg

SEQ ID NO: 570 - DNA, 2393 bp, Homo Sapiens
accaacattaccagatgtgggatcttccaacagcagagaccaaagctgagtctccaatatagcaccattcccccgggaacatcagccaaccacctggtgacagattgattacatcaggccccttacatcatagaaggagaactgatttgtcctccttggaatagacactattctgaatatggattagctctccctgccagaatatgtactagccagcaccatctgcactcacaaaactgatggactgattccctagaaattcactggccttaccaggtaacccatgaccacgaaacatgtgggtcatggtaacaagctggtaagaggcttaccaaaaactcagctacagatggtaccaattaggggacaacaccctaaaaggatagattctatcttacagaatgccagagggagagagggagacagggagagagggattgatacatgggtactgtttcttccaccagcccaggatcaaggaatggttgtgaggtgattccccttattattccatagctaacaactcaattgcaggacttttgcttcccgtcccaactctgagccctgctggctgtgtgtcttagtgccaacaacaatggagcccttgaattggcagctgaaacaagcacctggccttttggggcttctcctgccactgaaacaaagaacagtactcaattgctgcagccatagatcctgattacaaaagggaaattagattgctactaaacaacagggctagggaagtctgtgtctaaacccaggagattctctgagatgccgcttaatatctccatgtcccatactaaaagtcaatggaacatgcagggggcggcctgagaatccagaacatgtcctgctccccaccacccccaccccactccctcccagggaggtagcggacgctggagcttcttaggccagaagtccaggggcaggggcatggtgggggcgcctttctcaccccgagaaaacgcagcggtggtcacggggaggggcgccaccatgcagcacccaggcctggattccagctagcagtatcagccttctctcactttcgggcagcgacaccgctggtgtagaccgtctcaggtgcgtcttcgttcagctctactgtcctcagccccagcttgggctcgccctcagcctgctggagctgttggatgtgttcaggcctccaggcaccctggcctccccccacccgccccgcgaagaccgagggaaagcagacgcgtctccgcggcaacccggagcctgcagcccgcagggaccccaccgccccaggtgcaggcgtgtacatgccagttgcagaaaatatcacaccaaaccagtctgagggagtcaaagcaaactataatatttcaggcgtcagagactctcctattacagaatttgcctgtttggatagcatgacaccttttccacaagattttattaataagctgcacaaacagtttataggctcagtatcacacacctgagaaaagagttttcttaacgttacattaaaatccttcccagctaacagaaatagaggccagaataccatagagcaaaactcagaaagcctgaacacggaaggaaacttcacatatcaggctccgaatggcttggtgttagttatccctataaatcttttgtgtttctactatacaatattctccggcgtttctgcttctgatgtcaacatcagagatgtatgaactgaaccgcgccaaagtcagaactcggcttcggccacactaggcatggcccaggtaatcccagctactcaggaggctaaggcaggagaatcgcttgaacccgggaggtggaggttgcagtgagcagagattgtgccattgcactgtagcctgggcaacaagagcaaaactccgtctcaaacaaacaagaaaacaaaaaacacctttcaagtgcactgtcttccaacagaactaatggagctgctagcttcctccagaaactcttcttttatggaaatgtgcttcctctgccaattaggaagtctgctgaatagacttcctggccataaattcccaagagtggttaaagtatcctaatggacagacaagaaaggcaaagatgaatcttccacttcccttggcttttgtacagtagttgatccagccatacctaaacctccattcatattgaaacctacaccaaaaacaaacaaacaaaaaacaaacaaaaaacaaacaaaaaacaaacaaacaaaaaacaaacaaacaaaaaacaactctaaaactaaacacaaactagattttacacctacagtttgggatgccaaaaagaaaagttgttctgggatatgctgaagcaaaattgtgtgcatgggggatctggctgctaatacactttgttgagtcaaaaactgtgttcagatgagtaag

SEQ ID NO: 571 - DNA, 2378 bp, Homo Sapiens
actggtcttgaactcctggcctcaagtgatctccctgcctcagcctcccaaagtgctgggattacaggcatgaaccaccacacctggccatttaatttatatttttaagaaaacactgagattagcagaagtagttacatcatttctgaaaatataaaagctacaatatactccccccctcaaaaaaaaaatctgcaaaaactttgcaataaactcaccttacgggcatgttctgattgagacagctggaaatctataatcatttctatttaattcaacactgcaaacatttattgtatgcccactacgtgctaagcactatactaaaagttgggaaaacaaacaatctatgtacctgcccccgagtcattaccagatagggtaagtgtggaggctacttggatttaagaaaggaattctagtattttcaagtggattcagcaagtgttccttttcgttgcaaaattcccaaacttttacgtctatttgaaatagaattcaacttataaatatacaactttcagaatacatctaccacatagggaaaagtacccaagcgtatttgctgcttagtccaaaagcatgagatctgacttgcttgttacacagacaaaatatactcagcacaggagagtctattttcaatctggctacgtgattttaacatttcttcttaatgcctactcccaagctcagaacaatagaaataaacattcgcacactggttttcttaaaaccctacatttggaactgcatctttttcatgtcaattataaatgtaattttttattagtctatccactaattcttcctaaaaataaactcagactctctttatttctcataactaaaatttttcaaccacagaggagagctgtgtgcatttatttagtcatgtttttgttctcctctctctctctcctctctctgctctcactccctcttcccttcttcctcccttccctctcagcttctcctttgggacatcgagggacaaagttgcaaggcactactatagatctcccatttcttccttttgttcaccagaacgttaacaagagatacaacacctagaaaacagagagcagagacttttctggatcaaacagtaccttttttttctgtttctgtctccttgtgactcaagggagaaatgatcctttctttctaagtgatcttatttctctctgtcaagaatccgtggacatgttatctggttagagctcagcctgcagccaccacgcaggtaactcactcacgttagactataactcacctaactcgtttgtgtcccagccaaatgtgtaccagagtaaaagttcagacctgaccatgggtaagtttaatgattaacataagccactcaggctttttcctcagggcttgttagtaatgaccaaaggaaaagtgtcttacatttttctccacttactgcatgtgccccagataagaattttaagtaaaagtccacccagtgagacaaacaggcattcaacattgaaagaatttgccagcaaatcagcgattgaacagagggctcaagagaaaggaccactagagggcagatccccattcatgaacagtctctcactcttcatcccgaagagtgactcgtaaataccaggttatgggctgttattcatatacccactgtaggggtatgggtctaaagaagtacagaagggaagtaacttggtccaagtcttgctgagaaagggttgattgattctcttcatttttctactcctcatcctccctcttgaccttgcttttttaaccaagaggaggtccttgacttgtactcatcaccctccagtcgtacccagaccatgggcctcagtcatcggttgaactggtgggcctaggaaggtcaacaacaccttcttacttggtccatgtctgacttctctgttcctgtcccactgcccattctgattcacatcccccaattcctgatcatgtttgtctacgtctggcgatacctgaccagaagacgtccttatcttctatcctctccctttcctttgagggagaagtcattttggtaaaatttgatagccctgagtctccaccttcaaggaccagcagtagacctggagaagcatctccagcaaaaccagattaaagccatggaaatacgaccacaactctgatgacagtagtaaaactatcctctagaaagtgtggaagtttacatcaactctgctgtatatcacagtttggcaacccgtgacaagctgaaaaatttttgtagccctgaagctagtggtgtagagagagggtgcttggccagattggggcaggtagggggtcagtcaccccaccaccctgcctgcctgctgaacctctctcagtttccactctggatctcttccatg

SEQ ID NO: 572 - DNA, 2351 bp, Homo Sapiens
gactccttactgtgcctctgacacctgggcttaggcccctctcatcattccttcaaccttcccttctttcaaggcatttccaatcatctcattctgttcaaaactctgcaacaccctcccattgcccacagggtacaattcaacagctttacacagcaaacaaagctgttcgcaaaccagatgcttcttatgtgtcaggtctcaccatttcttctaccaacatttttatcccgttttgactacttaagggtttcaaaagtaccatactgtctctcacctctctcttttttccacatttcctctgcccaaaatgtcccagcctcctttgtagggctcctccagcattatctctgctctttagaccttgattttaggaatcctaatgttgcatcacatgatttgtttgtttgcttttgtgtccatctctccgctggattgtaagctccttgagagcgagtttagtaccttttattttggaatctctacatctgtgatattgtataagccaaaacagatacccagtgagccagcagctatgttttacaaagcttttttcacattcattaccttatttgatatgcctagaaatggcgccttttagaaaccaggtgtaactggtagagcaggtttgaggcatttttacattgtcaaatgataaaaccaaaattaagaaatattcagaagtggtagactagggttacataaagaaaaatagcagaagattttcctcaaactcttgcattatcttcacattatctctcctgctagactatgtgacctctgagtataggattaaaagcaaaagaaactggaaaataaaggtaaatcatatagcaagaaagcagaaggattttcagatgcaacacaataaatgaatctatctcatcactcccttgttagtcactcctcaaaaaatttactcccacaaaagaattttctgaagtgtcttctatcttcaaaccaaacaaaaaaactttcaaaatttatgacctatttatttttttgctctttacagccctcagcttcaaatttccaaaatgttatcaagtattacatttaatcttataacaaacttacatcccaggtaggatgttgcccataggactcatgctgggtgatgcctgggtgatccaaacagggaaacaatattcctttaagccacattagctctcaacggtgtcactggtcacgcgtagagaggcaaattcatgagcagcattggggagttaatgaacggctggccagatggtgcctgtcagaaggtgttgactttttagacaactgggactgtttcctgggagtaaatgagaggtgcagcagggacggattgcatctcaatcacacagaaacagacagattcactgctaatgaaaataatcacatagccaggcatatttttcctcttttgattttgtttgttttacctggtagacatagacgaggatctagctgaaactataacatcatattaaacgacgcaatggagtaaatatgaaaagctacctataaactattagtattcttaattaggaaaaatcaaatagaataaggaaaaataatgcaaattagtggtaaactaacctggaattaataagggtattttgattgctatagcatgaactacttgaaaataaataaaatttgaaatacaatagtgacctgcagatgttattgaaatattcaaactggtggagtccattaaggatattctggcacttttgactttccagcataatacatctgaaatgaaccacttttactaatttgaccattttcacttgctgctttgctgaactgcggaagttttcctattacatgcttagtgacatctttggcaggtaaaccttgatactcaatgcccacatttcagcagatataataagtagaaaacttcattgacttttttgttgctatcagagaatattacctaaacatttgtctgcctgttgtggttactcttaggtattgcataaaatcagttaaataaatgccatcacaaaactatggatagcctgtttggtcacagtaacagactcagcagattgggcaactctatttcttaccagctatgtgacctcaggcaagttgtttagcctctccttgccttggcgccctggttaaagtgaagattctatgaaatgaatgcaaagagtttgacacagtagctagcatgtagtcaactctcgtaatgcttctctttcctgactacaaagagctctcagtccaggtcattcattcatttccttcttatgtttccatcctccttgattgcacacactgggtttgtcttcaaccttgtgtccatcctaaacaggcttctagaaattcagagcgatgtatttgaaaatttg

SEQ ID NO: 573 - DNA, 2435 bp, Homo Sapiens
atttccccaaacacatttggggtagaggcattggaaaaaagcgaaaatgtgaaccaaaggaaagaaatattgtaacctaggagaatgttctttgctaggcattcacagttaaggtagcagggtgtgcgtgcacatacacacatacacacacacacacacgatgccacttttgttccagtgcgagatagcttcacgggtgccgggcatggtgacatacaatggatatcaaaaccgtacagtcagtcttagcaaattaggtaaattagagatcatttgatggtattctattgttgctattgtaatcaccgtaattttccctggtaatggtgcttcgtgatgaagtgctgttctcataggataattgtgaaagataccgaaagattcagggatgcagcatctggttttaaaagctcttcagattcaaattggcattttactttatcttgaaaatttatgagagattcagatcatgccggcttaaatggaaaggtgaaagcagggtaatttcaatctatgaattattcaatctcagcctggtgaaattgccatccatgaactgatgctctgacagtcccttcgcagagcctccattacgcttgtcatttttatttctttatctacgatctcttcctcagttaccgagcttgtcccttagggctcagcttcacaaaccaagtatttcaaattggcaataacctaaatgtgccgctgtttcgaatcgctgtctccacaggctgtctttttttgttttttccaaattattaaaaatcacatccatgatgatatttgttgggctcttcgattagatgaattaaaacacacacacacacacacacacatacaccacacacaagggcatcactgcgaagaagagttatgttccgctaacatcacaagagaagagaaagtgatgctttctgcttccttctttgttgtcagcatgacccatcctagctgcatagcatcacgcagaaaggagccagggctaaaggcggcttgcctggcaccctgatttccagccagagttgatgaggactgcatggcaggcaggctaatccagacaactgtatacttagcgagcacgattatttaggaaaataaggaaaagccgttggatgaccgaaattagactgtcattctcccgggctccacctgcacacagactgcagtcgcaacgattctccacttgatggctggttgtgtcactgctagtcgacagctgtcccgcatccagagaggactgggagtgatttaggtcagggagtctggtttctcctttaaaccgtgcgctaactgaggagtggggatctgcgccagccccgtgaccagccttaaatgtgagctggggagtcacacagcatcagtgcggtgagtcgctcgcacaggccccagccagacaaaccatagcaagcatcctctcctttgtcctagcctttattcctgcaggtagagcagcgtggcataagaagcccccaaactattcacacacatggtgggagaccagccgtgctccatcagaggcggtttggttacaagtctccgagcagtacctgctcagctgaaaattcacgctgccaagttagaagccatcgtgtacattcaggatgcatctctgctcctggctaaacaaaggtaaatactcctcatgtaagacatgctaagtagtagcaggagaagaaaactttaaaactctgttgctttgtgcctagttgtctgcttctgctttgctgcattgcgactgggaaactgcaggagctggagctggcagttgcgataatgcagaaagcagcagctctgacacagcagtcagctgacttgcggggtgttatcattcaatgtcctctgcagaatcagaccagtttctaaggtggcaccagacagatgaccttcaatggaaagagaggcttaaggagtgcagtttttctccatccacacctggcagggacatcttacattgcttttctctcaagcagagtttttaattcatagcctttaggacttaactatttctgtcctgcttgctaagatggcaggtaattcttagggtgaccaccccaatgtgaacataagttaaagccatcgctgcccctctcgctttggctggtttcagcgttgtgagaatgattgcgggagaattcctgcccacattttgtttgaaaaacacacttcttttttaacaggtagaaatggccttaagctacttgtatgctgtaatgaactagtcaattgtacctaacagaatggcaagagcaagagggaaaactcgaaggtaaattagttcagcactagccttaaatcatggtccagttgctgtaaggcagtgtgcatgctctatcgtgaaacgcaggttgtacaacccaattaatctgacaatggagcaaaagccttatatggtattaccccagtggtttgaggaattgctaaaataagaaggc

SEQ ID NO: 574 - DNA, 2423 bp, Homo Sapiens
gtacttgccactatctattcacaatagcaaagacatggaatcaacctaaatgcccaccaataatagactagataaaatatggtacatatgcaccatggaatactatgcagtcataaaaaaaaacaagatcatgtcctttgcagggacatggatggagctagagggcattatccttagcaaactaatgaaggaacagaaaaccaaataccacatgttctcacttataagtggaggataaatgatgagagcacctggacacatagaggggaacaacacacactggggcctattagagggtggagggtggaaggagggaggggatcaggaaaaataactactgggcactaggcttaatacctgggtgatgaaataatttgtagaacaaacccctatgacacaagtttacctatataacacacctgcacatgtacccctgaacttaaaataaaagttaaaaaaaatagaaaaaaaagaggaatgcttgcaatttttgtaaatatattattttttaaaagttatttacttttttaaagcactgcattcagaatgtcagattattgtccagaaagttggcaacattagtattcgccattcccccacccatcgtgtaagagactcctataccagacggagcccaggctgggaatcaccattccttttaacttttgccaatctgataagtgtggaatgtgtcttttcgtatttatacttctttgattattggtgagagagaacactgtatcctaccacagatgccatttgattttctgcctcatgcccatttttttctgttggtctggtagttttttcttactgatatataagcacttgaaatcatttctaaggatttgtattaatttgctgtccttcgcatacattgtgactatttcccctcctcgagccagtttcctcctaactctttttgagagatcctagatggccggcccattctttgatttatttttaagctcaaataatattagaaataacatttgaaatgtctagaccaacccttttgcagtgactttactgggaggttgcatcagcatctagacacttccatacattgaggaaaaacagacagccgtgtttaaggacctcagagggcttgctatcacccatttataattttcccagaacttatgagtcccaggtcctcattgcagtggtaagcgctgagtgctcacgggggtgtgtgtgggacaggatgtggtttgagttctgtgatcctcaccccgacctcatgcgtcgggaatccttgcagccctgtgactggcctgtgggggcttgggctaagtccctgccaagataccaaaagactgcagaggtgggcaaagacctcaggcccccagactagcaatctacaaacactagtcatgactacacagttaagggtcgtccatctgcttccccttctcctagcctgctttgtgcaaacaagtcccaagcaggagaagatgaaggtgagtgagcttcagagagggcatggtagttactcttctgtcctacttctagaccctgccctccactccttcttgtaagactccaactcctgctttcttcttctttgccagttcccctaaaccttgcttttttttctccttgaatcttcttcattcctatggatgggtattccttgcgttgaatatgactagggaagaaagggtctccatatgactagggaagaaagggtctccataccttcttcaggtggaggtcccctggagacctctctggccacatcagtctctgcttcagagctgggtctgaggctgggacagcgatgggctttagagtaggtggggactggggtttggaggagaagctgagtggacttgtctcagacacagctcagcaacaaccccttgaagaggaggaaaaaacgaatgtggaagttttaaggatggataaaatcagagagttatcagagaaacataaaacatgaaaaaaaaaatcagagccctaaaacaactggatttggagtcaggcatcttggattctggcctcagttctatgcccaattcatggctcgttaccttattgataagacacatgtgtctggcagcagaaggggcagtttaggaaaggataataatgaatgcgataacttggaggcagaaaataatcatgaagttaggtaaaggcaaactttcatttacataatgggttaccacttttgactttggacaaattaacctctgttatctcattgtaaatttatgggtaacagtaactaccttatgggtgggtgaataacaattattatgcatataatacattctacaaaatgcagttctaataacatctccccatccctcgcctctaaaattaactagataacatcctgggtgaacttctattttgagaattgatatggtttttatgttacctgtggtgcttaattgagtgtggagactctgggc

SEQ ID NO: 575 - DNA, 2464 bp, Homo Sapiens
cactgtctcccatcacccccagatgaggccatcaagttgcaggaaaacaagctcagggttcccactgattctacattatgatgacttgtataattgttttattacatattataatgtaataacaatagaaataaagtgcatgataagtgtaatgcacttaaatcatcctgaagccaccctccctcactggtccatggaaaaatcattttccatgaaactggtccctggtgccaaaaagatttggaacagctgctctaaccctcccaccaccttcactcacttcttgtatgttgtcctgggctaagggctgtggaaatgttcatggggtctttgttctaccatctcaaactatgtgcaaatcctaagaaacttgtgagataaagtatttggctagtgggaaaaaaaaaattgataacgtttttaacattaactggagtgacagtttggtaattggctctctgagaaagcttcagcatattctgaaaattggcaggtagctccagagtgagctaattagttaggaatgacttttaatactcactacctttaatagcctacccttggagaaaagacagataatgaacactgggaaatctatggtgctgcaacttgacctttgtgccatttgggggaaatgaggaagatgagtcataatttattatttaaagtcctccttttataatgtgttgttgtgaaagatttgacaaataatgattgctcctttagggactaatttaatcaaagaagcagaaaacaggaagaatagaaaacttgtgtgactaagcaatgtttaattttatttgaaactggctccaccaccctggtgataggaacagaaggtcctatggagtcttcccatagcaagaaaccaggcttgtaacagggtgtaatagagtgacaccccacacctgatgccctgtaaatgcagagtctgcaaatgcctctcttttgatgctttctcaaggtaagtcataaatgaagtcttactgctttaaaaaagtagcttgccaacagttgcccaggctccccatgggactgcgcttcactgagcacctgaagaaagtattcactggaaatgggctctcctgggagactgtctggatcccgagtgtctggcgttcatgttcccacacctggctgctgcttcttgcccttccttggctgcaggtgtgagtgcttgtttgtttaaacctcgctcagcactgcttggaaaaacaaaacaacatggttacttgtctgggcattgaatgttcttcctgaattttggtcctgcccattggcccagaggcggaatgggtggggcaagtttcggtgtgagtttgggaagtttcgagaagacgctatgggctgggtctgttaggttggggttgctcttggttttaatccttttggaatgtcttgagggtcaggagcgttgccattgatggctatgggagttgtcaggctgtggctctctttctcacagagaatgccagaggcactcgggaaggcatttgccagggctctgacagatgtaaagtaagccttatccatgttgtgttctcacctggacacctggaaggtgctcagtatagaaaagtcacgagctagatgagataccagcttgatgtcgactccctccccaacaatggctgcctgtcttcgtcttgatgcctgccagcaggtaaagggggtgtgcccctgggacctgggtagcagcagtccttgggaaacccagggtttgtcacctgtggtcacttgacccttggtaaattacctaaccttttcattccacatctcaaggacagcaaatccatgtagcagttaggttgttagaagaaatgatgttgacaaccaaatgtgaagctctgatatggttcttttccggtatcatagctacttgctctttaaagaactggtacaatgttgggggcagaaaaaccacatcatgcagtgatgttgctcagtcaggcatacaggtagagaagagctgtctctatccttagctccttaggtttgtccagggctgctcagtgtggctgaccctgtcttgctcactgtcatgtaacctggaacctacaacatcactgcatgatgtgtagacctggaacctactgtagtatctttttcttgaaggctgtattgtgcagtagtttccaaacttgagcatgcatcagaaccccctggtggcagtgttaaagcagattgctggaccccactctcagagtctgattccataggtctggggtggggcctaagaatttgcacctctaacatgttctgaggtgctgctgctgctactggttcagggaacatacttagagaaccactgctctagtgtgctggaaggagcaggagctttggagttaagcagatttaaatccagctatggcacttacttaatgttgtgaccttgagaggtttttcttaatttccccaagtcttagtgaactcgtctgtaaaatgggaataatacttacttcaa

SEQ ID NO: 576 - DNA, 2499 bp, Homo Sapiens
atgatctcatattctgcctctttaggaaaaagaatgttcaaaaaaccaaaatacgaagaaatttgggcataaattattgaaggctttagagtttgctgcacccattcaaacatcattgtttttatatatgcacaattattttctttgagcttaaaaaatgggtggaaaatttaacttctccattttaatttgagatttctcccataaaagttcactgaagaaatttctcctacttctgggtagcaatcaaggaataccccagtcaagtttttaaagagtgggtttacctctccaattgcattccaatctatattcattcctggtcaaaataaaagtataaataagactctttcaatctaaccacaagttagatttgcagtaaattcctccgtcttagatcactttcttttttacagttcccagacaaactgactttgatttagctagtaatttaatgaaattcatcagttgattgtaagaagtccgcttacatacaccagtcattctctcagcaaatactcatggaaaataaaagcaatgttctccccataaataaatcctacttctttcttgcaactcaaggcgggctgtcagatcggttgcataatagatattggggagctcactggccgggagccttaagaggagagcagctatctcagtctttctcacttaatcttggcttcacgtcagaagctgtgcagcagtgcagtagaatagggcctggcaaaacctttgctagcaaagcgccttttgtgccgggctgtggctcgctatcgacatctcgtccgttaccaaggctgggtttcctactgatttccctcctcctctgctttcacaggctcgcgcggccggacattgtgggtgtgcgtgctggatttctcccggatgctctccgactaacatggatgtcccaccattccttgcagtggaaggttgttccttggcgcagtgagtgaagaacatgcagcgattgctaatgggtttgggaagcggagactccttcctctctctatgaccatgccgtgatcgtgtctgcggtcaccactcgacgcatcctcatttctacccgaacccaggagccgaacgctagatcggggaagtgggtgccgtgcgtgtgggcacagaaacaccatgaagattattttcccgattctaagtaatccagtcttcaggcgcaccgttaaactcctgctctgtttactgtggattggatattctcaaggaaccacacatgtattaagatttggtaagattccccatctctcttggttgcctggtatccgctcccaggcagccggatgtaaacaggcggttcgctctgcctggcggtgggctccgtggattctgatctgctcactgctctgtcgtctcctggggcttttaaagaactccttgtgctttcatttcttctcttctttatttttatttttagccgcgggagggtgaagggagggccaatgtgtggtagtggtctctgcattacctccccacagtagcttgccacggagatgatgatgacgatggaggcacggtcagccgccactcccgcctgtctcccccggcgccctgcgagcttggaggggtgcgcggtccgcgcaaaagtgcgcgccggggctgcacgcctctcagcttgcggggctggtgagttaacacctggtaactctttggcgagttgcgcctgtccgcttccgccagtgaccagggcagttctcacgtgcaaatgaaaggtactaacccttttgatttctttttccagagagccttttcgattgttttcaccgcttttccagtccctggtgcccttactgggatgcagagctttaaaaaatgttctaagattcgaggttctacttaacacagggaggctgctacttagctggaacgaaatagcgtcaaaattagaacggcattttgtttgtttttaacttgctgagtccccctctcacagctttctggacgttatggactaattaatgaaggatagtatctggggcggtggggaagagtagttgtttaaggagggttgactaagtctgcatctttcactttggcaagacgaaagacgttaggtagttacatttttttatggaaatgtattgcttttctaagaatcagggtttctttggagcttgaaggaaaatctaaacgtgggattccagtggaaaccctggtcagagggtcagagtgattgcttggagaaaatgaagcgtgggcgatgctcaggttctctggatggccaaaggagttttagtaggagcagaactagtcagggaaagttccctaaagcagataagaggaagaaaggagaaagccaacaggataaatgctcccattgtaggcacttcctctgacagttcaagtggattcagaccaaagagtgcaggacaccatgtaatcctgagcatctgtctttgagataaaagcagacacattaagtcactcggtcaaatttaaactgaagagtgattgcctgcatcttctatcatgccaacagca

SEQ ID NO: 577 - DNA, 2422 bp, Homo Sapiens
tatggtgtttctgaatttatcatcctgaaggataggtttattgcctactcagtgtttcacttctggagtcttcaaaccttccatcatgatgcagaataaattctggagcaaccctgcctgacaacagaggattgactgcaatcgtttgaaaggacagagctccacaacacattttctgaaatgttttcttatgaaggaaaagctgatagggaatttgagttaaagtagacaaaacagaacaaaacaaaaccaaaaccaaaaaacaggtgttaaaaggatgttttaaacaggctgaagtattaaatcaccatagagagcagtcttagtttactctgaaatccgtttctattcttctattaccttccacatattttgttttgctgcaaaacacagggagaactatttaccattaagttgcccaattaattttctttaaggcatgtaacattttctaaagaaatctgaaagtacttgttccactgaaaaaaatgagatttatcttctatatcataactttgctcccagtgaaaaagccaggataatgaagaacaaaatccatttttgtgaaggaaaacacttttatttcatggtatttttaaacatcattttgtcaactctccatggaataaagttgacaacaccccttgaatatatatttgcatgtctttatagttttaatttgttatacttttgctcttcctctttaagcaacattttgaaaaatctacaaagtaatacaaacatatctacagtactaggttgcaaattggaatttggaagcgctagatctgctgattttatttgctatctgactatcacatttgttctttttaactgatttattaggtctgtattctagagtatattttattctgttgcaacagctattaatgaattctttgatcgtggatttttgtcacatacatctgtattggttcagggagcctaacctgttggaacattctgctgaagagtttgcttttatatctagggacatttatcattatctaaggccagctgcctgacttctcttcagtgctctgtttatagggtttgaacatctataaatggaaacactagctaaccagaaattatcgctagggctctctgatagtgtcctaggctctcacaacttggaatgtcctgcaatatctaacatgtaagcacgtcgaatcattttctagacagaatctgaacctctgtgtctctcagtctttctctctttctcattctctttcaatatggaacttgaaaagcgtgaaaaaagaagcttattaaacaagaatttagaggagaaactgacggtaagacatgagatttagcacacacagatttataatgaaattgacagggtagtagagcaactgtcatagactggaaaagttgtgctagccggcctctgtttccatgttttgctggtcaataactttaaaattaatgagttccatgggctttcctgaaaataatgtaataaagttatatataaaatgccattacacaaatgagggcaaatttgatttagttaaatgatgtggtttatcgtcattttaaaaactggaatccatttattttgacctctcattgtgattgcctcagcactggaagattgttttatttacgtatgcgaagcttagcgagtgttcaaatccattttttctcagagataccaggaatatatgccaagaaaaataagtattatagaatatattaatgttttattaagtttaatgaacttctggtataaggataaagttttttgccatagaagttatacaagtaattttgccttgatactaagcaattaaatgtcaatgattaatatggtgacttacatttgctcaaatacaaaatagactataaccttgagttaaatgtgctgtccatggctcatctgatgagcataggtcactaattatgtttgtaaatttactgtggttatagagttaacattggaacaggtcataactaatgttaatatcagcataaataacaaaaagtaagataatatagcccataataagaccaaattcatgggaatacattgttctagatgtatgaagttgaggtttatggactattcaagatattaaaactagaaaaatggaaaaaagaaccatactgggttgaaaactcttgaagtgtattagaatttcaaggtcttaaagtaatatatttaataaaatacacaaccttttcttaaaggaatcaggtcatcattttcagtacccactttgtacctctgccctaggtgattgtccagacatgtaatggccacagagtattttcctttctgactatttggaaaggccatgtgtccttgtagagctaaccagggattttgaatcagaaagggcttggtgaaaattcttgcccacaactaccaaatataagaccatggttttgtttaatctttctgagtctc

SEQ ID NO: 578 - DNA, 2662 bp, Homo Sapiens
tacagcatacttacctgaaaaataatggccacatatagcaatatctctgcttacagaaattccaaattccttcctattatgggctccatagctacctattatttcctattttcttctacagccactaaacatttctagttttctagcactttccctgtaaaactgagaggagggaacttgtcatattcatctttgtagcaggatgttgatttgtaaacgaagtgttgatgcattgttgatgttacttatttaataaaggtataatagatattagcagggcagataggcattctaagaaaatggcttgacataagagctgaaagaacttgtttagaattttagaattatcaaagggcttcatgttcatttcaccttgttagggagaggatatctccttttgcctagagcatgtctcaaccattcagagttaaaatggctgttccagcccagcaaatgggaaacaaatttgagttttactgaaatgggttaagggctctaattctcgtctagtgtgttggttacactgggaaggaacatctgtctagttataatagtcaagagtaccggtatgataaatttgggtaggtttcagagtgcttgctcacagctagcaaggaggatccaaaaaagatgcagaaagttgtgtaaacaactgcaattgcactgacactttcattcatatgtttagaagagacatatctgaagaaaattctttttaaaatagtttctcagctgagattatacttttttagtgtgtagctcacaggaagttctagttgccaagagcatgttcgatatgagtagatctctacctaattcttatgcataatgaacccaattttcatctcttctagaaagatactgaaaacatgtgtcgtgatctcaatgttacaaccatgtagcctcatctttcacaatacggtacaatcaccaacgaagtttaaacttcatgtctggcatccaaggtgaacatttccatagaaagtaggaaatatttagatgtctgtttgccgtggtggtggtgttcctatatactttttgtgaccctaaagatataataatgtttgacatttttgttagccagtaatgtggacttaagacatcctaaccacactgctgactctaaccctttaatagactttcacgtagttcttgagcctcactgcaggctccagtgctagtcccggaggaaatcagaaaagggttgaaaccactgacacagccatctctttagctcctcctaacgcaggtgtacagtttcctgtagtgagcagatcggggcctacagggacactgcatgcttgcactgggctgttactagtttcatggaaatatgtactaattgtgtcactgtgttttcttgtcacactgccccctttctaggccgctctggcaccgtttatttaaactgtgcaaccatctggcccaggtgccgtagagattgatcagtagcacaaggccaccacaagcacaaccgccacccggccatcccagctatttcctccagcattctagacatcatggcgtccgagggtgggtccaacgggcttcgagtgttcgggagataatgcacacttcgcagtggatcttctcggggccccgagcgttgcccgcccattaggtggcgccggtcccctcgaacaggtcgctcaacaactcccgcccagcagccgcccttactgcgcgcgcgcagacttcggcgtctacttccggtgtggcccaggcggggtccgcagaaccagctatgtcggcctacggcatgcccatgtacaagagcggggacctggtgtttgccaagttaaagggctatgcccactggccggcgaggatagagcacatgacccagcccaaccgctaccaggtgtttttcttcgggacccacgagacggccttcctgagtcccaaacgcctgttcccgtacaaggagtgcaaggagaagttcggcaagcccaacaagaggcgcggcttcagcgcggggctgtgggaaatcgagaacaaccccacggtccaggcctccgactgcccattagcctcagagaagggcagcggagacgggccttggccggagcccgaggccgcagagggcgacgaggacaagccgacccacgctggtggcggcggcgacgaattggggaagccggacgacgacaagcccactgaggaggagaaggggccgctgaagaggagcgcgggggacccgccggaggacgcccccaaacgacccaaggaggcagcccccgaccaagaggaggaggcggaggcggagagggcggcggaagcggagagggcggcggcggcggcggcggcgacggccgtcgacgaggagagtccgttcctcgtggcggtggagaacggcagcgcccctagcgagccgggcctggtctgcgagccgcctcagccagaggaggaggagctccgggaggaagaagtcgcggacgaggaggcctcccaggagtggcatgccgaggcaccgggcggcggagatcgcgacagcctgtagttaccagcgtttccagaagagcccctgccccgttcctgctgcggcctggccgttcttggggaatctgaccacggcgtgcaaactgggactgcctttccctctcctcagcccgtcctcctccaacccgcgctcctttgccctgccgggccccaggatggcagg

SEQ ID NO: 579 - DNA, 5352 bp, Homo Sapiens
aacacaagaagccctgagtcttttgaagccgggcaccaaagttaaagattcacttcccgcattccccatggccccctcttgcagcttagctcggctctgagcccccgaaacgcccttcgaggcgggggctttcctgccaaggggcgataggtgggccatcccgaggcgggaacgatcaggtaggtgttggctggctttctcctgggtgagtagttaggggaaccgcccctccaggggacttagatgacattaaattatcccatcacacaaacttcccgtggaggtctgcccccaggagggcaactatcggattaatccaaccatgtagacaggcaatatggatcactttgtctttaaaacaatcgaaaaccaaacgctcttttcgtttattgtagaaatttttctactaaggacggggctgaattggagggactgtgctgacaaatcctctacttgaaaatcccccagctaaggagtatctgcccaaggtcgcggccacccagatgttcggtccccactccttcctccgctgaaaagtcgcaccgatgactaacgttgcctgccggcctggtggtttgaaaacgaatgccgggcattgatgcaaggatatcctcccctacccctgggattctggtctaagcaaaggaggccgaatggagaactaagacaattatctaagtaatctaaaaagctcaaagacatccccaagcggaccttgctccagtggtctgtgatggcagcctagtggacagttttctagtggccctctggggttaattgccttaatcttccactctgtctgccccagcaaagggaaagatgctaaagcagctgtggacttgcagcctccctcctgtgtgtgcagagcccccaggaatcactgccccagtgcagcaggagaagcgccttccctcatgccctaagcctgccttttctgttgtcccccagctcctgggccaggtggagccccccctgaagctggtttctacctgccctcgcctccccactgcagcccacagttcggctttcagggctgaacccagagcccagaggatggagaagccagaaagcggggaggtaagggagagggcgtctaggcacaccacagaggtgattgggctgtgacggggacaatccgcacaacacgagctaagctcacacccctagggagtgatttttccggactgcccccatcccaatctccacctcctctgctttacttgaaaaagaaaaagaaaaaagagagctccttctggctcctggtgacccatatttaggacaccatcccatcccccagcacacacattcctacagtgtcacctggtccccaatccgagcatttcctggagtgctcgccacattccccttcctggtgcttttctatggtggggccaggggaggccttgttttgaacatcgctgtgacgtcactccccctcctccgagctaagcacccctcggtgggccctgggaattgttgcccggcctgctggggaggggcggagtgtgggcccagggagggttccaccaaacatccattaccgctgtcgcctgcggggccttcaggctgcaagtacgtgaggtgtcagaaaagaagccgaagggttcccgtgggggctcttctgccaaatgagtcaagagatgtgcggaagcggatgattgaagtaccccgtggagtagcagaaaggggcatcaaaaactgtaacctgaaaataaaagctttaacctgttccccaaaagacttcatgcctgcgtcttaatgttcaaataacaccactaacaacaaaaatgaaataagaaaagtgcttgaaatacaatcaagccgcttactggaggcttgcttccgagtaagtttataaaacacaaatgcaaatatcttttcctggcgaatatccagagctaaaccagtggaaagttgatcttgataaaactacgtccctccattttttctcgcacgccagacactaatttcacaacggcgacttttatacccaaaacggagagctgagaacaccgctgcaggtcgatttgcaatttacataacaagctgtttacacttcactgggccgatggagggaggaggcagggaagagcaggaggcgacaggctggtgggggagggggcagcggggcaccattgcctgttgcaaaactcggggccgaaggcgtttcccgcattcggaaaacaaagcatccgtaatcgctgcgttcatctccgcgcaccgctagcagtgtaaaaggcagcttcaagaccgaactcaccacttgctgaggtgttcagggagaccacttaaatctcctccaggctgaagccacagcactccttaaagcctcgaccaggcgggctgataagaccttcagggtgccgggctgggggctgaacaggaattaagtgttcaggtcctggggcttcaccaccaccctcgcccctgtctagtgtccttggcaaccagcaagtgctgagcctcctgttggtgcttctccaacccaccagtgacttggcccgcaaaccacctggaaaaggagtctccagagaccccggcgcacagcaggccaggaggcagctgccccgggattcagagcaacctcggggcaaccctccctcctccaaaggctaattctagaagaggcaggtcctctttccttcgatgtcaatgtccattatgaaacagtaatttttaaatattcaggtgacacggagatgcgcctgctacacgtcagcgtccttcacatgtaacagccgaagctgcaatttgaattttcctgccaacgtgaggaagccgggattcgaaccggggagacaaaaggggtcccgaacatgtccttggatttaatagatggtcggaaatcaggggcagcggagctgttaaatgcgtcacgcacgcttcttcgcagtctcctgagctcgccacttcccccagcttctagtgaacgacttgggattcagcctccgggagggtctctcctcaagtcgctaaaatgcagaatcgccgtgccgggggagggaggcctggctctttcccgctccttcgtttctttccctcatttctcttcttcctgtcccattccaaccacccagcgacggcgaatctcaggcgtgtgcacaacgagcgggggcccttccgtgcgtgtccccccagaatccttgaaccgccctctaggtgcgaccctggacgttcccccagacacacccgttgtctctgcgagccggcagccccgcgcatgtggagatggagactggcctggggaagcgttaagctcttagacatatttatttgcttcttgtcatcacacctgctaatgtcaccgagcccgcagcctgacccctcatctgagccgaaacgggcctgacgggatcagagggggcggcggcgcggcgagccggtgggaccctcgcgggcgggcaggggagcgcggggcagcagccgggctccggcagccctcgccgcccgcaccctcaggccgccaagggccggccccccggggaggggggcgagaagcagggcggcccgcagcggggcgggctcatccttcgcgggtgaacggccgtcggaaactcccagcagggccccgcaccccttgccttcatttcggctggggaggggtcatggaggggggccagatgggcgacgaaccttcttccccaccgcgagcagggcctggctgtgaccgagccctcaaaatcatgtcctttgtagccgagttcaggacaggagaacctccaagtggagaaaagccggagacgtcagtgacccgagtgagactggcgttggagaagggagggaaggggctgcgggaggggagaggcggcggggaggagaggctggggcaaccccagcgctggcgtcggcggggctggcgaaggaatgagagcgagccagcacgaggcggggcggagacgccagggccactcgggagccgtgggcgaaggaagggtctgcacggggtcccgggaggacccaggaagtctgcgcgaacggcgggcgtgggtccggagggcccggggtgggaggtctgccgggcgccggcggcaggcaggtggactgcggggggcgaaccgacggcgggccgggcgccggcgcgggcgcagggccggggcccgggccagggcggccggcgcgcgtgtggtcagccccgcggtcctccggcctccgggagcgggccggcagggctcggcctccggctcattcggaggcggttctcacctcccattggctgccgccgctggcggggcggggctccgctgcccggaaaaaagtgtaactgcgtaaaaaagtcctcgcctgggtgacggatgctcaaaagttcagaagttttcccaatgcttccttaagcggctggcgcgcgagagaccgagaaaaggtgacgcggggcccgggcaggcggccggcgcgcggccccccccccccccgccctggttatttggccgccttcgccggcagctcagggcagagtctcctggaaggcgcaggcagtgtggcgagaagggcgcctgcttgttctttctttttgtctgctttcccccgtttgcgcctggaagctgcgccgcgagttcctgcaaggcggtctgccgcggccgggcccggccttctcccctcgcagcgaccccgcctcgcggccgcgcgggccccgaggtagcccgaggcgccggaggagccagccccagcgagcgccgggagaggcggcagcgcagccggacgcacagcgcagcgggccggcaccagctcggccgggcccggactcggactcggcggccggcgcggcgcggcccggcccgagcgagggtggggggcggcgggcggcgcggggcggcggcgagcgggggccatgcaggcgcgctactccgtgtccagccccaactccctgggagtggtgccctacctcggcggcgagcagagctactaccgcgcggcggccgcggcggccgggggcggctacaccgccatgccggcccccatgagcgtgtactcgcaccctgcgcacgccgagcagtacccgggcggcatggcccgcgcctacgggccctacacgccgcagccgcagcccaaggacatggtgaagccgccctatagctacatcgcgctcatcaccatggccatccagaacgccccggacaagaagatcaccctgaacggcatctaccagttcatcatggaccgcttccccttctaccgggacaacaagcagggctggcagaacagcatccgccacaacctctcgctcaacgagtgcttcgtcaaggtgccgcgcgacgacaagaagccgggcaagggcagctactggacgctggacccggactcctacaacatgttcgagaacggcagcttcctgcggcggcggcggcgcttcaagaa

SEQ ID NO: 580 - DNA, 2428 bp, Homo Sapiens
catggaatactactcagtcataaaaaagaatgaaataatgtcttttgcagcaacttgatggagctagaggcgttattccaagcgaagtaactcggaaatagaaaaccaaaaactgtagttctcacttataagtggaaattaagctatgggtacgtaaaggcatatggagtggtataatggactttggagactcagaaagagggagagtgggaagggggtgagggataaaaaaatacatattgggtacacatacatatccggtgatgggtgcactaaaatctcatatatatatgtatatatatatatatgtatatttatatgtatatttcatccatgtaaccaaaacccacttgtgctccaaaagctattgatatatatatatatatataattttcatatgtttttatatatatgaaaaaagacagcaaatccctgtcttccaaatctcaagtcataggaagagaaaaacattcataaaattctaggtttggagatttgatttgtcggctgaaacctctttctgttaatgttgattccttacactggaaaattcctagactattatttgtatgagtgagaatttcttttctgattttcaatccaaaccacatggaaagaaggttaaaatggagcccgtgcactttgaatttattctcagcatttaggctgcagtatcacagcccaatttccaccagtaggaggcattatctaaacatgttgagaaatattcattcctaaggaatgacattgtttccttatctggctcaattcagtctgagaaggactgttgtttctgatgaagaaagagctccaccctcggccactgccacagctgctctgccaataacaaaggcacagcattttccctctgtgcatctccaacatggatgcttttcagggcattttaaaattcttccttaatcagaaaactgttattggctacagcttcatggctctgctgaccgtgggaagtgagcgtctcttttctgttgtggcttttaagtgcccctgcagcactgagaatatgacctatgggctggttttcctctttgctcctgcctgggtgttactgatcctgggattctttctgaacaataggtcgtggagactcttcacaggctgctgtgtgaatcccaggaaaatctttcccagaggccacagctgccgtttcttctacgtcctcggccagatcactctgagctcattggtggctccagtgatgtggctttctgtggctctgctcaatggaactttctatgaatgtgccatgagcgggacgagaagttcaggactcctggaactgatttgcaagggtaagcccaaagagtgctgggaagaacttcacaaagtatcttgtggcaaaactagcatgctacctaccgtcaatgaagaactgaaactctcccttcaggcccagtctcaggtaagaaaagacaaactcgcctttttctctcagcatgagctcgaagtattctctctgtgctcctttcagccagggctgtctgtgtcctgtcagaatattttgaaactaaatggaaactgaaacatgatgcagcattgagactatctcaggaaaagcttttgaaaggctgggtggctcaataaagttgctgactggattatctcttttccggttctgaaaagaaaatatccactggattgtccacatataaatacttaagtactttaaaacagtctctctgggtctgtaaataaataatgcctaacactaaatcataaattgagtgttaatggcagagctgtaattagaaattactgccttctatcaattatttacattcaagttgttttctcaaacacacacatgtattattcatctattaaaatgtagctgaatgaaatgagttattacttttcaaagttgcatgtaatataattagtgtggagattctcttgaatgatttctggcaactgctatctctgtgtataaatattgtcaagattgagaagaattttccttgtatggtaggaatcagcagtttttaaatagccttctgtgaaaaagtgactgtactctctagggagattatgttttatactctttgtgctgtacagctaaaggggttcttaattacttcagaagctcaagatttgggcattgttttatttaacagaaggaaatcatatctttacctaattgatgcagggaagtagcctgtcattcctccaggcacatgaacacaaatccagatgtacagccttaggaaggactaacttcccatttataggtagtaagaattgcattcccaaaagcaaaacaagtggtaagagttgataagcagatccacaaattgtcaggaatgctatctgtttcagaataaaggcacagaaatagcattattttactttttcgacaaggatttgccttggtaacaacaaatcaaggcaaaatctgtttttaaaatca

SEQ ID NO: 581 - DNA, 2443 bp, Homo Sapiens
acgtgatctgaaggcactcagtacacgtttctgtctgggcaggaccagttgagccacttctcgccttatcaacttccaataattgccacactgtgtgtgcaaccagtaagtgagtggcacatggagtctgacctggcactccattcacacactttgtctgatactactttcattgtctgggctcttgtttttggagaagagctgccgaaaagtatcaccttttcctctatcactaacctttacctttacctctatccctaacatgggatgccgaggtgcagaggcaccagcactgccctgccatcactctagtggatacggacccgattaggcgtccttcttccttctgcccacaccaaggccccccaggccgcggccgctcaccgggaaccttcccaggggagcggcggaggggcgaggccatggtgcggggacctgcaagagggccctgaccctgatagagaggggccgatgggcggccaggtgggcctgcgggtttaccttgttgaggtgagggttccgtgtcagcaggtagccgcgctgatgggtgtggcggcgacggggggcttcgggctccatggctggcgccgggttcggcggcggggtcaggccggggcgggccgcacgcgcggtgcaggcggcggatgctgctggggtgacggtgctgactgcagctgtggcggcggcggccgcactgggaaaggcccagcggctgggggcgggcgtgggtggcgagagggggtggacgcgtcgggaggggcccgagcgaagccggtgtccccagcagggcagcctgcgagaagcgctgagtcatggcaggagatcatccgagccggcgtgtgaggaggaggaggaagagcgagtcctggcagcgctgctggtggcggagcgggggtggcggccggagcccttggctccatagggcctctgcccaccatgggcttatgatcaccgctgtggtcgcctctctccatgtgggcatgcctaaacgcagtgcactgggtggctctgctgaccccagagacccagggcgggggcagggagcggggagcgtcaggccaggatccccctgcccgggaaggctggagaaagtgcgagaagatgccagaaggtgcgaacctgagcggttcaggcagagccggcggtcgctcagacacctagggggattacaggacggaaggactcgtgaggggtccccagaactgttgacagaacacctcgacaggctgaggagaatcagactcgtctctcctgtcttgttagcgtcttggaagccctctttctacagatccacaaccttcgccgtgccatccaggatgccggccatgcccggggccctgaggccggagggaaccaaccttgacccagaatgccgaggcccaagggaactgggaggaagcccagagaggagagctcaggcgccacacctgtcagtttctacagattttccaccggaattgtatttgaatgtcaataagataagagtcaaggtgttagggtgcaaaggcccaatgaacagtcctgtttatcttgtatattatttctctgggagttctagaaacctgatgttcaagaaccactgctctctctgaataatgatgagtaagcagtctttcaggccttcctcccaacctcaggtgatccgcccgcctccgccttccaaagtgctgggattataggtgtgagccaccgcgccgggccatttttttattgttttattgatatttatgcttggaggttcatggactggaggaatagtcagatcatagccaaaaggagtgcctgtctgataaaaataaattaatagcaacagacactaaagccttctgtgccccagtttccttttcagttaaataggattgctagtttctgtcccatttgtctctgcatactgatattacaaaggatagtgtttgagattatttgctgattttatatctccatatactagacacacatccaatcacagtgttttcatttctagttatgttaactttgccttatcagaaagatttcttacagtaattgtattttgtccgtatttacatttagaagcttctttgacctcgcctgaattatctagaattcgttgtttttatagagaatattttctaggcatcacaaagttctttttgaaaaaaatccttgaagttaaatgacacctttcattgttaattctatactccataaatactcaatcctacaacatctaagaaaaaggtgtactttacacaactcactctcctgaattaactgagacacattacagttagggtgttttatgtgagaggaaacagtttaacagctggcatgggagccaattcaagctgcttaagaagaaacaaaaatgttagtacaacagacccttattataataaagtacttattacatgaatttagatatactacctacctgttcctgtttctgagatttaatatctac

SEQ ID NO: 582 - DNA, 2489 bp, Homo Sapiens
atttccagcatagctagggcaggccctaccaaactgcaaagcaggaaagttgaacaattttcaaaagccaaagcagtttatgaccttaaagcatttagtcaacctagtttctgacttgcataatttagaccatgtctatattttgaagacatttctattttcattttactgataatttaaaagacagcctatttagcaaagtcatacttaagtgaatttgaaaattgcttagacttatttacttaatttatgaacactcttttacttataagccaatttggtagacacaacatataacagtaagtgtacatacaagtaaacacatctagacatgtatacacacacacaaatgaagaggtggagcttaaaacacccaaattgggtgcagtgtatactgcttgggagatggatgcaccaaaatctcacaaatcaccactaaagaacctgctcatgtaaccaaataatacctgttccctcaaaacctatgggaaaaaaaaactaaaaaaaatacttaaatggtatcacagaactaattagccgaatacagtatctagtacctggctgtcacccaatacttgcctcataccatcacatctagaaaacaagtagatattctttttggaagagccctgagggagctactaggaggtttgcacggcctgctctcctgccctcttcttgctctgtggctgaacttcaattctcttcgggcttagaccccactgactcgctcccgggcaaagcaaacgatttgatcagatggccacgtgcattcttccttttcctgaaaccagcaccatagggtaaaagattatttctacttggttgccttccagatgtttcacacttggacagcaaactgatttcaaaccactccttttcaaagatctctgagggagacattgcacctggccactgcagcccagagcaggtctggccacggccatgagcatgctgagccatcatgcccaccgtggatgacattctggagcaggttggggagtctggctggttccagaagcaagccttcctcatcttatgcctgctgtcggctgcctttgcgcccatctgtgtgggcatcgtcttcctgggtttcacacctgaccaccactgccagagtcctggggtggctgagctgagccagcgctgtggctggagccctgcggaggagctgaactatacagtgccaggcctggggcccgcgggcgaggccttccttggccagtgcaggcgctatgaagtggactggaaccagagcgccctcagctgtgtagaccccctggctagcctggccaccaacaggagccacctgccgctgggtccctgccaggatggctgggtgtatgacacgcccggctcttccatcgtcactgaggtaaaaaagcctctgtaacatgggagttcctgggacagggagaaatataaagcaaatcctatgaagttcagttccatatcaggaaagaggtagggggctatgtttattgtgcagttcgtgggtgtctggctgtgtcccaggcacggggcattctcttctctagtttaatccaccacaaactctgggtctttgaggaggaagctgaggcaggagagaacagctagcacaagtcgggggccaggttgccaggttgcttgaatgggagttgactgggagaccaggagcctctctgcctgccccactggcttctcccagaactatcaacttgctctgggtcccgcttccccaccaatagtactgtgggccccctccttctgctcaagagtgatgacgattgacctcaatgatggtgttgaggtggcctggaattgccctggcttggaagtgagaatatttggtggaatcccagctgtgccccttattagctgagcatcactgggtaagtcactgcctctctaagcctcatttcctcatcagtcaaccagggatgatgacggctgcctcataggggtgtgagcttcagctgggatctgtgaaagcactgagcaaatccaaactgagtcacaccgtgcagtccgatggggcccatgggatagggcgatggcctcaaaagggccttgcttgagtagtttacttggttatttgagcattttgctttgagaatcctttagtaaaaagtgtcaccacatttttttcccatcatgagcccttttgaaactattgcacggtaacaagtgtggatgcttggtgggttggagaagctgtgggccaaagcccgtcaggggccttctgttagtaacgagcagtggcgtggttttggtgcaggcactgcttccctgaaataagaggtaactgggccctccctgcctctggtcctgcccacttgtctgcccccactaccctcgcccaagctctccggacttcttgggtctctgttcttcctcttttccctttcctgagtggtatcagcggtgacacatttagggctattactggaggaaagcttagggtccctcccctctgggcctgagcattgctctacctgcttgcctgg

SEQ ID NO: 583 - DNA, 2388 bp, Homo Sapiens
ataaacacaacaagttacaaatatagtactgagaggtccttgtatggccccgcctccctcaggcagtatcttacataactatagttcatgattacaactggaaagttgccattggcaccacatcagaaactagtctgcagaccttgctcagatttcaccaggttttttgtgcactcatttgctttcctgaaaatattttaatgtttttctacatgacttatctccccgacatactgtgagataaggtttttttttctccgaataagcttagagaacaatgaatgtgagaggtgggaaggatgatttggtgcatctctgttttatccatggtgagtctggacctcagagcagaaggaccctcgtctctcctctggggagtcctggtgccaactcagtgcaggctgctaagttatccgggtctgactgtcttcttctctgctaaaatttgtcttaagcatgtaacacagccatgcttattaatgatgaggagacagccaatgaaaattaattttttcaaagatgaatagatatctagattttttcaagcacaactcatttaagaaaatatcacctcactgagccccaaatgagttaggtctcacttagaaagtgtcccctagtgccaggtaaagtgcctcatatttgcaatcccagcacttctggagacggagataggaggatctcatgagcccaggagttcaagaccagcctgggtaacatggcaaaaccctgtctctacagaaaatacaaaaaaaaaaaaaatagctgggcgtggtggcgtgcacctgtggtcccagctactctggagtctgaggtgggagaatcgcttgaatccaggaggttaaggctacagtgagctgtgtttgcaccaccgcactccagcctgggtgacagagccagcctctgtttccaaaaaaaaaaaagaaagaaaggaaaagaaaatgcccccgagttgattacattttaaccactgtgctaacttgagagatagtctgctatctctttacaggacatgagggctgataatcacctcattgcatggtcctggggactgatgaacaaaggctaacatgtggaaaagggcaactaaagaaagaagagccacctccaggttaattagtacaagtctcctcgctggtatgccctaatacactaaaacagcagtaaaaacaatctgcacattggcatcgaaggcacagataaacttgccgaggacccttaccacggcagagggatgctttatatgagtccttagtagattaattaagttcttgctagttccatttggaaatgatgctgtcctcttggggctatgcagagaagttcatgttgatgaaatgagctgtcctagaatggcagttcccgggcagcagagcctgggctcaaggaaggttgaaagaaggggtggcgtggagctgccaggtgcaaatgtcaggccagcaatgcagtccagcttgcatggacgtgcttcgcctaggaagttgtgacttggctgcattttccacttcaggtgagatggaaggttgaactctacctcacctcctggtgaggttgatgtttcctggtgtttataactttctttgtaaatacttgaaaggaatttaccattttaatgctggaagagacgtctattccttcttaagaggacctgagtggatcttgattgcaggccttatgctgggcagagctaaggagaattcaatttgtctccaatcttatttgaatgttctttttttttttttttttttttttttttttgagacagagtcttgctctctcacccaggctggagtgcaatggcacgatctcggctcactgcaacctctgcctgctgggttcaagcaattctcccacctcagcctccccagtatctgggacgacaggagcatgccaccatgccctgctaatttttggtatttttagtagagatggggtttcaccatgctggccaggctggtctcaaactcctgacctcgtgatccacctgccttggcctcccaaagtactgggattacaggcatgagccaccgcgcccagcctatttgaacgttcctatgcctgctacaagtgcagcagcagaatctccacacatcttgcgtgcgaaagtttcctgtagttcctttagcatagagaggctggggaaggttagagactgacttgtactctttagacatatagttgatcattgaacaacacacgtctgaactgttacacacagatttttttcaataaatgtgttagaaaatgttttggagttttgcaacaatttgaaaaaactcaaagacaaaccatccagctagaaatatcaacaaaaatagaaaaagttaagtatgtcatgaatgcataaaatatatgtagatacctagtctattttattctttactacca

SEQ ID NO: 584 - DNA, 2433 bp, Homo Sapiens
tgaagacgcaataaaattccccatttgaaaaacttctctgtgatttaagtaagtttatatttgtcctactgttgacaatttacaatcgttacttcaggcttttaaggagtccattgatgtatttaaaacaaatttaataaaatcagtgctttttaattaaatgacaccaaacatatatatttgtacaatttgttttgtagtttcaactcgactttttgttaggattaacaaatatatatatatatgtttggtataaatagagcaaatctcttgtggaataaaattaatcgtgcatattactccatcttttgtataaaatacacggcaggccgggcgcggtggctcacgcctgtattcccagcactttgagaggcctacgcgggcggatcacgaggtcaagagatcgagaccatcctggccaacatggtgaaacccccgtctctactaaataaataaataaatacaaatagtagctgggcgtggtggtgcacgcctgtagtcccagctactcgggaggctgaggcaggagaatcgcttgaactcgggaggcggaggttgcagtgagcccagatcgcgctactgtactccagcctggcgacgcagcaagactccgtctctgtctctctctctgtctccatatgtgtgtgtgtgtatatatatatatatatatatgacaaaggaattttttcctctccctcgtccctcgtttaattcaatctccgcaaccgttggctgcccttttatctctgacttctctgtaaactttcagtagagtagcatttgggggtagatccgccactgagactgatccttttattgtagaagagaacgcgcggttcctggaggccggacaccacagcgggagtaggaacctggcaggcgatgagcagaggcacgagcaagccgcccagccaaacctggcagccttgaggtcaaaaatgattttgtaatatccttgcggaggaagcctcttttagacgcctgagaaacaaactcagttgggaggaggtgttttgcattttacaaaatgaaggctttgcgaccggtttagagctgtgtggtccctagtgggtctccaagctccggggtaccctaggccggtattacatcattaaaaagaagcgcaaatcccatttctgaagcttagccgaaggcaggcgccggcagggagagctaagaggccgcctagagagtttgggccgggagtgggagtgggacaaggcgggagctaacttagctggagtagacgccagaagaagttccgttcagctgaggtgccccgccccaatcccaggctctcggggaccccaagaagggagctacccggtgcttctccgagcggtccttacagctttggagactctgctgctgcccaggggtgtagtcgtcggagccctcgggcctgctggggctcagcaggggtagtgggagcccctaccctgggagaaactgccagggacaaacactgtttgctgacgcaaagcctgttccgcaaaggagttctccctgtatatgtcctgcagctcaaactgatttagaaagggatacacaggcctgcaaggcgctctcgggatcatacagcctcacgccctcttcttttcctctgccatttctttatgtctttcgccttcaccctgggcagcagaccccagcaggcggggaaacccggggactggtgtccgcattgccgaaaggctggaaagcagagcctcgtctacatccacgatgtttctagaacgtggcccttagaaataattcaagtgtgagtagggcgccgaggacaggacaaggcgtttgccccctagtcctgctactggctaaggagaatcatagcagtagagccgcaccactgctgccgccgcctccaacttgcgttaagttcggctcaggctactggattgggcaggaccagctaacccaggtcccgaggggcagtgtgtcacagactgcagcccactccaacctcggctcctggagaaggggcgtcgaatctctcttgggcatgggagggaaagacattccgagttggctgggcggagtggcagccttgagagtgacgagtgacagcaaagcctcgtcctagcaaggccttttaccaacagcgcggcatgccctttcgaggagagcgccaggccctcgcactttgcaagtcaagagagcaaagaaagcggggacagggcgcgtaatcgcaatgtccggtcgcgcgtgtgcacgtgtctgtgtttgcatgtgtgcgtgagcatgtgcacctgctcaagtgtaaatgtgtctgttggcagttggggtctaagtacctgagaatgtgtgtcttctgttgctttaggagattaaaatgtcttttcccagtattgagctacattgaggaaacaaaactgaaataaactgtcaggcctctctcaagaccagccggattctatgttaaataaaagtcag

SEQ ID NO: 585 - DNA, 2281 bp, Homo Sapiens
gactattatgcagcaattagaataaataagctgcatatttactgacttggaaagttgtccgtgatatcaacataagtgaaaaaacaaggttgcagagtaatgtatgtagaataatgctggttttgctttaaaaataatacaggtgaatactgtgtatgtgtccatagcttgaatatacttgtatgaacatggaaatagatgtggaagactatctacctaacagcattaattattttaaatatataaaatggggcagaggtgggagatgattattttatattcagtgcctttttacgatgagcagtattggctcagcaatttttttaaagtaggaaaaataaagaaaaaagttgtagggtaggccagggctgaaagtatatccttgtaaccaccttattgttatattaatcagcatttattcatggagcacttattgtttgcaaagatgagaacacaagtattggacttaacagtctaccagagggccaataatttgactggggagataaaacctcttcacaggaaaataaaagtattttcatgatgagaacagagctggctaatttatattcattttttgaaatgaatgtagtggaagtggtgtaacgagtacaactcagacctggcaatcttttcactctgctacatacttgtataaacttaagacaaggcttttaacatctgcaccaccatctctcaggccctctacctctgaagttgagaaaggaaacatctggatatgatgcaattagcaatacattaatgggcatgaaaggattccctcccttccccactccagcccctgtgtcccacccctatcccccaaccccttcccagagcttggaattcattggggctatttctccaaaacattctttgaagttaagcctttagctccacagtcattagggagacctctgagaaccaagtcagccccaacagccagttcagaatcttggctaaacatgagtccttttactcaatggtcaaaatgcaaaaccaggcaacttttgctcatggtgctaagttgcaaactatctgtctctagtctttagcgaatgctattgggaagcatcaggacaaaagtcgtcatccaaaaattccaattctagttttctcttggtctgggcttaaagccagaggcgattctccataggtggcatgccagtgccatctgactgctgacatattctgtgtggtggttgagaaaactggagaagaaagagccagggtagtcaaaggactgctcgttaattttaagatgtgcaggatgaagaggagaacaatgcaagggtaggcactctgaacaatttgtgttattgacagcatcagcaaaaaataaccagctggctctcagccagggagttccccatccagctgctgtgtgtgcatcacaggtctaaagagcgcccacggcctataacactgatcagtctgagtctcagtccatcctgccatgggttgcagaccagaccgtgtttcatgggcctcctattttagaagaaaggttgaggagaaagaaagttacatccagtccttctgtgtcacctgatatatttaacagcaaggaagggagggagggagggagggaagggaagggaaggaaggatcccagtactttgggagtccaaagcacaagtattgcttgaggccaggagtttcagaccagctgagccatataatgagaccctgattctacaaaaaaaaaattttttttttaattagccaggtatggtgatacatgcctctaataccagctacttaggaggctgaagtaggaggatagtttgagttcaggagttcaaagttacagtgatcaagccactgcactccagcctgggagacagagtaagactttgtctctaaaaatcataatactaataacaaaatggaaagagcaaattttgatgctttactgttttgtgggcctgtgttgtctactttcccttcatcctcagctttgtatttcacagtgttggtgatatatggaaaaaaaactaagacacagtcctttaggaattgccaaaactcctatctaaatgtgagtgagcaatgaaaaataagatacatgaaatatgagggctgagaaagtgtgttttagggatgggagtgagagctcctcgtactgtgtgggtagactaaagcaagctgccaatcaagatctccttaagattatttagcagggggaaggagagaagagggggcgatcacttagtgagctgagcacaagaggaatacctcgcagctttagagaatgtttagaggtagaagtgcgagtggg

SEQ ID NO: 586 - DNA, 2313 bp, Homo Sapiens
ccactgggaggagaagggaaggtgtcctgcttcccagggctggggaccacaggcaaggccatgggcttgagggcacttctccaaactctagcagataaattatgcccaaatcccacatcttactgagaaagcaggtgtctgcaattagtcacagaagggaggtgggtggtcgtgggcagagaagaaaaaattttttaataaaaaaataaaaattaggcaaaatagaacttgacagtcaccatgcaaacagaagaaacactacgaaagtgacatcattagcatggctgtgggcctgtcttatcctttggtctctaaagcaggagacaatgagagctacttactgactcatttttagtatttgataaaagaaaaaaagtcaatcaatcaggcttaccttattgacttactaatgtccttgtcactaagggataattttaaaaaggatttttctatcaaaagaagagaaatcaattcatagacctctttgggctccaacccacaattcgtataggataaaatcaagtttaaaatagagagtgcacccataaggttgagaagacatcttgtggtgactcctttgcataacatgaaacaaggttggttggcctttctctgtaaagagcaagatagtaaatatttcaggctttctgggccaagaaatacaatcaaggatattatgtagttacttgtataacaagagcaaaaccatttttccccacaacttttaaaatagatcaatttcaaaattttatgaccagtacagtttgcattttatattgttttcatgtgtcatgaaataatattctcattaaattttcctgcaagcatttgaaaatggaaaaagcattcttagcttgtgggtcacataaaaacaggttgtggcctggatttggccctggggccatcatttgctgacccccaacatagaacacttctgagtcatgtcagggtccttaatcagttaggtcatccaagctcagattgaactgggacatggtttcagaatccttctcaacactgcatgcctgccataatgtgggtagggagaggctgttggctctgcagtagccacctgatggctgcttaaaggaccgtgaactcagttatcaccagcattttccctactctttcagatctgggtgcagttggctcagtcctccatccccagcctcgggaaagtctctctcccagatttccgctcctcctcaacaagcttgcatgttgtgccaaggagcaatcgcttctgctgctacgaattcacttgcccttgtgaattcacgtgcccttcatccttgcctcatccagaacagagaatacaattattttaatattttatgtattttttataagcctacagagttttaatggaagtttggagagacaatggcagtttacacagcagaagtaacagcatctgctcagtgtcattgtttaagtcatcatcatagctaacacttccaggaaatttatttcttttgccaggaggttttcacatgttatttaatcctgcaataatcagtagaaataggctttttctttttaacagttattatcctgttttacaaaaaagaaatgaagcttaagagattgagcagcttgctaatcacagagcaagttaatgatagagatgaattttgaacagtcaagtcaggcagtgacttatgcctgtaatcccagcactttgggaggccaaggcaggcggatcatttgaagtcaggagttcaagaccagcctggttaacgtagtgaaactccgtatgtcttaaaaatacaaaaattagtcgggcatggtggcaaacgcctatagtcatagctactagctaggctgaggtgggaggatcgctcaaacctgggaggtgtaggttgcagtgagctgagattgcttcatctcactctagcctgggcggtagagtgagattccatctcaaacaaacaaacaaaaaccacaatcaatgacccagaatgcaatcaatgacccagagcccatgcacctaaacacaacacagttatccctctacagcactttaagtgaacatcagactttgttgttgttgttgttgttgttgttgaaagttcttctatcacctccctgggaattctcactggcctgaccacctcataaaatgtcctggcttctacccacgctcctggctcctctccttgcccatgtctttctcacctcttctcccagattgttttcatgaactcttaataccttgatccaattctttagagtaatttagctcttgctagctcatgttcccaaactgagctctagcagaagccttctgagggacataatgtcattttacag

SEQ ID NO: 587 - DNA, 2339 bp, Homo Sapiens
tcgtcatccttccttccacccatcccaagagccactactgggtagtggtaacttactcatggggttgttgtctagattaaatgagttaatacagataaagaataatgactggcacatgggaagtgctaagtaaagatcagttatcatggtttattcactctttctgaaaaaattttacccaaagacatatactggccaggcgtggtggctcacacctgtaattccagcactttgggaggccgaggcagaaggatcccctgaggtcaggagttccagacaagcctggccaaccaacatggtgaaaacccatctctactaaaaatgcaaaaattagctgggcatgctggtgcatgcctgtagtcccagctactcaagaggctgaggcaggagaatcacttgaacccaggaagtggaggtcatagtgagctgagattgcgccactgcactccagcctgggtgacagaatgagactgtcttaaaaataaataaataagtaagacagataccattatctagtctatagagatgcaatcaaactaaagaattctagaagggcaactatatatacacacaaacataaatatttcctaaatgaaaaaccaaataataaaactagaaaaacatagttaagtatattttaatgcagttatacaatttaattaaaatataagctaattattgaaatagaagatctataatatacattagagaattatctaagtctaaaattccaaattatttgacaacctggaagtacataaaatggtgggacaagagaaactaaaaagtttttaagtttctcacttcacatttttgacaattagaaataaataggttcaaatacaaattttagaaaaataagatgtactccatccataaagaaagagatgtaccttcaataatcatagtatttgcctcccataaatgagataaattaatatatagtccttctctaacatagatgtttcccagatgtctaacagtggtctaaccttttttatttttacagtgctcccaaagcttgctggcacataaacatgaatgaatgaacaatgtagaattcactcaagaaatttcaaggagagagaggaggagatttacatcacacagcaaacaacctaataaatctgttaaacgccatgcatgtgaataggcgttttcctctttttgaccctttctttccacatagaactcagtgctccttcctcgtcctccgttacagtatttatcgccttccttcttccacgccggggagcagtcgaggcttgtgttcttcagcggacttgccaaatcatcccctccagcatgctgctctctcccttccacagatcatctgttaagaaaatacatttttcatgtcgttaatttacatatacatgtgcattatatatatgtttatacaatgagagattgttaggaaaatcactaccacatatacatgcattatatatattacatatacatacatatgcattatatatatacctgcacacacatgcatatggaaaattgttaggaaaaacagcacagtggtagtgttagtgctggttgtctttcggtggtgagattatacatttttttctataattttctgtattttcctaattttctgtgatccatatatgtttttaatcatcaaaagatgttgaaatttaaaccatgttctacgtacattttacatccccatttaaagctttctcatggttctccatggcctgcaggatgatgcttgatgttcagcttaagagcttcctctcctcacttcccacccctctgtcacttgtagctcatgccctaataataccagagtgtttcctgtgcacacccagctgattcacgtctctttgtctttgctcacatgtctacctccacctggaagataatttcccttcccctggcgaccttcacaccacccttctctcctcagagcaggcacagctgcccaggaaacatttctggttgagccttccatgggccctaactgcattttaccctgaagatgaaatgatctgtgcttctgtctaccctcctttctggacggtaagttcccaaagggcagaagccacattttactatcttcatatcatagcttctagaaggttctgccaacatgatacaagctgcaaaaatcgaactaaactcaagtgacactagaagtaaaagacctctggtccacagcgaatatataaagtggataaagaagctttctctctattctatgcatgttcacaacactactttgactaaatattcaaattgggactgccaagcaccaagacctaaaaatatctgtcttttgagagacaaaacagatactactagttgaaaataatgtcccc

SEQ ID NO: 588 - DNA, 2463 bp, Homo Sapiens
gacccccttgcgagggggcgcactcacaagagggactggatggagcggttggtccgcagagcctcagccagctgcttgatgcggctggggctggacacgacgcccaggttaaggttgagctgcgccagggacgtggccccggccagggcccggcagatgcggccaaagtcgcggtcgcagaggcggcagccgcgcagtgagagcaggcgcacggcgttgtcgcgaaggccgcggcagatgtcccgcacctcggcgccggacagcggctcccccgaaatctggatggagctgggcagcatcgtgcccacggctgggcctccgggtacggggccggaacggaggttggtggggccgcgggcggggccggggatagggccggggtcggggccccggcaggggtcgcgggcggagtggggccgggggtggaggcggcggctgtggcggaggctgcggctgcggcggaggctgcggcgggggcggagaagagctaccgggactgagccggagccggccagaggtgcggaggcgtccagggcgcgggccgggctgaagtggggcggcgctggggcgggggcggcccgcacggtccgtgtctgggcgttggggcgggtgcgcgttccgggggttgggcaggcgctgctcggcgcttgtccttgtccctcgcggtcgcggcggcggcggcggcagcggcagcgagcggctcaagggcttcggcttaccggtctcggctaggaggccgtacccgctccctccttctctgccgcccggctccccccgaccaccccgcgggcctggccgcacggctggcagagagagcctgaggcgggcggctggcggcagctccggctccagctccagagagcgagcgggcggcgagttcccatggcaacggccgcgtcaccggcgctcgccccgccccctgcccggccaaggccacgccggcccgcgaggttcgcgtacactgggtggttcggggcaaggagctgggagcgataggccgctcttcccttgggagtggggtcagccaactggcaggcggcaggcggcagggctgagtgggtagggctgacggggagcggaatggaggcacgccccgtggagatggcgttgggcacggttactgctgcttctgcccattcttccatccttccccgttcctaaggtccatacccccgccggaatccagggcactgttccctcctatttggaaggccccagggccctttcatccgcgccgcgcctcgctcccgcccccgtgactcgaggcgcagcgtgcgtggtgatcccggcccatggggacttccccgcttgctcctcgccaagatggcggcctcatcagggaggccccaggggccacggctgggcagagccagcttgagctgctggggagaagggtaccccatagggtccctagggcaggggagcctcagatagatgcaaggtcctggtgccacaccttctcaggtacgcagggcactgttgacatctgagggtgtgtccgtgccgcgagactggggcagccaatacaaagaaggtgccagggccagggccctggagcactggtgaggacgtgaaggcggctgagccacactgcacggtgcaggcggtgctgtctcaactttgtcctctggccagggtggtgggggactcacttgtgtaacgcaggacaaatgaagggcacctctgtttgtccctttgttaggagggatagatgctgctgacccagatttactagtgttaagatgattattttacataaaatataatattcaatatagtgaagggaggtcaaaggccctattcccactcttagccacctgaattaacttattaagtggagcatattaaagaggtggtgggggtggatggtgctatgttaggagtggtggttggttttaagaggaaagacagaaaaactaaaaggagctggccccagtaccaccaaggcaaagccaaatttggcttcaattaagagctccacaggaaaattatcaacacaatgcccaggtgcagaagatccttgttttgacacggggtttaagtcgggatgttttgttcaattgtcactgcttccttggcttcccaagagagcagctgagcccagactcaagctggctgcagtgttccatcaggcttatggcttttgtgcttgaggcctccctgccgcttcatgggtcaggtgtgatattcaatcactgccttctatgtagtctggcctgtcccacctttatcttgcctgggtgaggatatgaagaagggaacatatgacattaccactgttgactgagtaggaaagtatataggaagcgggatgacagggaggaccactggatcagccgctgcagttccagacttcaatcaacattttaattaccaagtctatatttagcaagacaatgtgggagagataaagaggaaggaaggggtaggtggggaggggttctcaaaggagctgacccattt

SEQ ID NO: 589 - DNA, 2458 bp, Homo Sapiens
acatgaaactgttgctcaataggtgaagacgttcatgattctgtgtcacttctggcttctaggtttagtctcctcccatcgtagagagaaagagagaaactctacacatacatacacacactcacacacactctctcttacacactcagacttagcacttctgtacaaaggtccacccccttcttcctactttcacagttcccttcccctctcccactcctctatggcttccagcgctttatcttttccatttagaactttttaaaggaagaatgggggcgttggtggctctgggatgggcaactgaggtttggtttagggtttgctttcccatgacagataaaatcactgaagtgatttcaccgctgcttctaattagaggggagctttaaaagaagccacgggatttggggctcccggagccgcacctggccaggagggaggtgagggtgaggagattggcctcgggccacactctcccagagacggtgccagtcccattccgcggctatgagatcgaattgtcctgggtctaggcctgggacgcctgggccaggcccagttaccctcccgggctgctgtcgccgggacttggagacgaacaaagaaccagttttaaatcgtcttctctgacatgtcaggcaaatatgtgtaaaaggtcagctccacgctgtggagcagagacctgtcccccaggcaccaaaacctcccctttctaaccgtgcccgagagcctccgacccctgggccctgtccaggcggctttgcacctctcggccttcccaggggtggggtggaggtgcctctccctggagtccccttatcggttccgcattttattcatccctgggctacaggactttcatcccaatgcccatcctttagttgatttaaaactttctgggacctgccttagaatcttggtcaaggctgggggtttctgtgggtagtttttttggtttgttttgttttgctgagaatttaaataaattagatgaagtttttaactcctaagtgcatcttccctggctttttccagacggtggaaatagggcggtgactaacttttcagagtggaagacacgcacgaagggcgcacctgcagctctccgggattcaggcgggggtcgctgtgctctcttaaaagtgagcggcggtttcagcctgccaccgcttcgcctcgccagctcggaggaaactctggctggaggcgacctcgggcccagccggacgggccgggccgagcctaggaggggctggcagacgtgtcccagggccagggtggggcgtagggagcgccgtctccaccctcagtacttttggggtgggggacctgagcgtgcggagagcgggaggcagagctgagagcggggttaagcgcgaagctaaggcgccgcatagggttgggtgggaatggacagggtgagctggaagcgaagcaccccagccaggccttaggagagaggaccgtcggcatctgtgcacatcctagcgggcggatgatgtgggagagaggcggagggaggtgaaatgcgggagctagaatttagctttgcagtgaggtcacttggggtctgcattcagctccgatatatacatgtaggggctgtgtgatcctggggaagttaccgaccttgtctgaactcctgtttcctggtttgtaaagtggctaattggtgggaattcaataggagaatgtgcgcaaaacgcttagcacagcgcctggccaacaatgcgctctcaagaaaggctgctgagccttgtccaggacggtctacaccgccccacgtccaagatgagttcacagcgcccaagacctgttcaatttaagatgatgtaaactgcattgcccttcttagacacgcagcagccaggagctggtcatctgcacctcccgcgatttcctcctcagaaccccagtcctgccagatttgcgtccttccctggctcctcaaacacctgctgcaccgctcagagcctttccccaccccgacctcctccgcagctccgcaccagcgagactgcgccccgtggcacctcgggggtgccacgattggcgggggatgggggatgcctcccagcttcatccgctctccgggttccagacaaccattccggagagccagctgctctcagtgcgggcaggcccaaggccactaactgcacttggcgacccacctccgttcccaagaggcctcggaaagtgcggcctcgggtctcttttgaaacagagacccgcggcaccccgcttctccccctgggataggagagggagagccgcgggagttccgcagccactcctggcgctgccaccacgaagcaggttcactagctaacagggcctgggacactgagccgtgtcgcaaacttttctgtgccccactcaatgagggaagcctgagctgcggtgaggggcgggatgacctggtgttgggttgagcggagctcccagcttcagg

SEQ ID NO: 590 - DNA, 2656 bp, Homo Sapiens
actatattgaatttaactttttctttaactaccaaggactccagattcaccgtcaactttcttcctgcattcactcttactgttcagttctgggttaaaagacagcggggcctgaacgaagtgtctacaaagcacagtatttggagaagctttgttgttgttttttaaaataatttttttaaaaagggatcccggatatcttttttgtttttttaaaaaatctttttctcatgtacgagaaatacagggaaaaaaagcaatcaggttaatgaatcattctggtttactggattccaattggtagagaatttaaacttaaaaaccaaacaaaacgaaagagctcttcagttaccttatgtcgtaaacgagttaaaagttttgttatttctgaaaaatcaaagagcactatctgtacatggtcataactgcaaaggaaacaacggcgtacccaggacagggggagcttactttaagaagctgcgtctttctggatcatgttccttcggggctgaccctttcggggagtttggcttttaaagcgcggatctcgcgacgcgcggcttgcaggactgcggggcccggcggccgagacgcggcatccacaggggcccctccgcgcggccgcggcggtggtggcgggaacctgggactggccggcgaggggccccgcatggtaaccgtccccgaccgcaagtcataggctgtgggcaccgcgcagagcgcaccccccaccgaactccccccaccccacctcaattctcgagaccgaaagtgcggagcgcggagtcctgcaaacttgaccccgagccaaggtgcgcgaggcgacggcgagtgtcccccgggctccctgcagccccggggctggaagctccggcctccgcgcacctcgtcctctgcccgcccgaaagcgaaacctggccggcgggcaggaggggagagctcggcctcgagctctgcctggcggggccccggcctggaggcatccccgacccgcacctggcggcgcgacccacctacctgcccgtccccaaggcgccgccaggagcaacagcagcagcggcggcagcggcagcggccgcagggccgggcggccgggagcccgcatgggcggcggggctgggtcacatgtcggggggcagcagactgctcagtcccacgcccgctggggccaagcgcggccgcgcggcctcagctccgcgcctggggctctgcgtgccacgctccaggcgacctgagtcccagggcgcctccgccacagccgcgtcccccaggcttccccagaaaccaagggcgagcgactcgcggagcccccacgcgcgctcccccggctacccagctggatggcagcgcgagggcagttctcgcggatttatagtccccagccactcggctgtcagtcctgagagtctgagagtttccacctctcggggttcatgcccagaccaaccaggtcactaggcaggtaaaacctccttctggtaatgagcgaggcgagtgcattgcaaagagattctggtattcaggccggtctgatggtcagttaaagttcaatatcggaagacggatgaaatagagcgttatttctcgatatacagttaggcactcagccgtagatcttacagtcatgcatcatttaagatgacaggattacctcctgagaaatgtcttaggcgagtttcttgtgtgaacatcttagagtgtactcacacctatatggtatagcctcttacacgcctacgctatatggtacaggctgttgtttgctcctaggctacaaacctgtacggcaagtgaccatactgaatactgcaagcaattgtaacacaatggtaaatatttgtgtatctaaacatgtctgaacgtagaaaaggtacagcaaaagtacagtatgaaagattttaaaaatggtacacctgtatagggcactttccatgaatggagcttgcaggactggaagtcgctctggctgagtctgtgagtggtgagtcaatgtgaaggcctaggacatcactgtgtactactataggctgtataaacactgtattacacttaggctatgctaaatttattaaaaaattatttcttcaataataataaattaaccttagcttactatgattttttactttctacttttaaatcttttaaactttatttatttatttatttttgagatggagcattgctctgtagcccaggctggagtgcagtggtgcgatctcggctcactgcaacctctgccttccggttttgatgattgtcctgtctcaccctccagagtagctgggattacatgtgtgtgcccccacgcccggctaatttgtttgtatttttagtacagactgggtttcgccatgttggccaggccggtctcgagctcctgacctccggtgatctaccctccttggcctcccaaagtgctgggattacaggcgtgaaccacgacacccgacctaaactttttgacttgtaataacgtttgacttaaaacacaaacacattgtgcagcagtatgaaaatattttttctttgtattctttctataagctttttctatttttaaatttttctttttctttattttttctttactttttaaacttttttgttataaactaaggcacaaccacacacattagcctaggcctgcacaggg

SEQ ID NO: 591 - DNA, 2242 bp, Homo Sapiens
ttatatatattatatattttatatatcatatatattatatatcatatatttttatatattatatattttatatattatatattatatatattatatattttatatatattatatattttatatattttatatattttatatatattttatatattttatatattatatatattttatatattatatattttatatattttatatattttatatattatatataatatatattttatattttatatatattatatattttatattttttatatatattatatattttatatttttatatatattatatattatatatattttatgtatattatatattatatatattttatatattatatattatatatattttatatattatatattatatatatttatatatactatatagtatatatatttatatatactatataatatatattttatatataatatattatatatattttatatattatatatattttatatatattttttatatattttatatatattatatatttttatatatatattttatatatattatatatattcagagagagaaagagagaatccgggtaccgtgactcatgcctgtaaccccagcactttgggaaactgaggcaggaggctcacttgagcccgggagtttgagaccaacctgagcagcacagcaagaccccatcccggaaggagggagggaaggaaggaagggaaaaataacatttaagtgaatgaatgaatgaatgagaaacagagcgaagactcgcgtgtctaggacccctaaccccctccccgatgatcagcgccgcctggcggcgaagctcgggtgcgcatcacgtgaagacagcaggcagcgcgcaagcggggccctggttggggaggcgggcccaggaggtgccctccgccgtagtacctaccgacactcgcgtgctggagaggggaggggagctcgggcgccggccgcgcgggggcggggcggtgcggctcgggtggcacagtggtgaactctgcggcggctgcgcgccgctcacgctgttcctccagctgctgttacctctgcgggcctctctcacccaaggggaacggagttgttatttcccgctgtttccatagcaaccgcagcctcgcgcggggagcgagtcagtgaaccaggcctggcttgcgcctggctccttgggatatgctggctgcgtggggcagaggcggaagaacaggggtttggaggaagagggagaaacaggtgacatgatcatgcgctcattcatcatgcgctcattcagtaaatggacgcctgctgtgtgcaaggccctgtgctagttggggccacggcggtgaaaaggaaaacctacaaaattttgagtgcctaccctgtgccaagctttacgccagggaaaggattttttcactgccgcaagaaggctaaatgtctgactggctgtccaagagcccacatctgtgctatttgtgtagattgttagctctgtctgaggaataacagggagaggagttgtgagaatagtaacagccccagtaaagagtcgctttgtccagtccagtctgggacatacatattgtggcaccaggaaaatgtttaaagagttgaaattttgcagctcatctctgccagtgtttccttcattcctcctaagacttttctaccatgtgtcatgtccaaattactgggtgttcctaactcatcatgtacgaataaaaagaactgccattaattgaacactataaccatggaccaggcattatgtaaggcactttatgtagattatctaatattcacaataaccttcagaggtaaatattattctttcctcagatgaggaaactgaagggtagagaaatcaaagacatttacctcaggtcacacacacaggaattcaaacccattctaaggattagaaaacgaaagagagagagagagttcaaacccagttctgtcttattccacaagctccataaccagtcatatcactgtgaaagatgaatgtgtgggacattgcaatctggagagaaactttttttttccttcgagatttctgttctgaagaaatatttttattaaagccatgtaatacattaatgctttgaaagttaacagttttcaaacgcaggaacaaaaaaccaaatacccgcatgttctcacatataagtaggagttaaatgaggagaactcacggacacaaagaagggaacaacagatactggggcctacttgagg

SEQ ID NO: 592 - DNA, 2371 bp, Homo Sapiens
atatataaacagatagttccagtgcagtggatacatacggtaatagaggttctaagatgtacaaaaggctgtaggggcctaaaggacggagaaaggacactgatttctctttttcaattttccaagccacctgcctattccgtcttctctttctcgagatcaaacattctcacttctctctaaagacccaaccttgtcatcatggtgctcaatcttccttccacactgtgatgctggggaaagccttggggcatttctgttctctcgtgaatccttgaagcctcactttaaaaaatatatactcactcctttgtccatcgtaaaccttgatatttgtaaatatcgataataggaactttgaaaaaacatacgcccttagaaacaagcaagcaaacaaaaacacgtagaatgtcagagcttctccccactccacaccctttctttaaactgatgtcaaggtgggcccagtgagggtcagtgacggaacctgcagtctgagaaagacatggcagaagcataaggttagaggctgttcctgctgcctcattaaaaacaacaattttcccccaaatctggactgaaactgacattcaacgccaagtgtgatctcagtttaacctgccctggtagatatgcatacacttcccatgcgcaccatctcatgtgatcgtgtccacagctttgtgagttgagaggggtgggagtgattatccccaaccacaagcaaggcttccgggcttcaagggttggagaccacccagggctcggccagcatcagaaccaacggcttctaattccaaatcaaatgatggtttatgccacactacaaccctaaacaaatgaactgtgatgtgtctcacttccctgtgcaagtggaagatgctaatacatgtgtatcatgagaaaggacctcacaattttcttcttctgggttctgctgagacgtttctttgattcagagagaacttcccaggatcagcaagaaaagcatgtcatcatttcctaaaccctacaatccaggaaatagtccatcattttataaaattataaaagcgaactatttgagtttctttattatctgcccccttctccccaagctggtcttgtacaaacatgatgcacgtccattgggtgacaagtctgtcgtaagtgaaacgtttacaggcactacaggaatgacctggtgcctcgcccacttcattagaattctaattggggtgtgtaggagaggattctataaatggtaaggcaatccttggcagcctgtctgtcagcactgtccgtgccattcccagaggagcctgagaagaggcagaggaaggcgaaacatggctggtgagtgcatggcatcttctccatcaggtccttgccagaagcctgtgcttcccctgggccagcctgccaagccagagtgtccggccaggacagctgcctgccttgggggctctgaaggccagacttcctattttagggtgctagccagaggcggctctttctcagtggtggttgggtccctctagcatattcttggggtagaacatcattggaatgtagctctgaataatgggcagggtgttcagtgcagctggacatcgcatctccttaggcagaggacaagctttgccttgtttgtgtttgcgtttcttttacacatccgtcgccacccgtaaagccaaagcagacaggactcgggtctcgtgtttctcagtgtagctgtatccagctgtcagcagtgtcagcaaagaagcacatctcagaactaccagggagtgagagtggtaacatgtaagttgatttgaaagaaaccattgtttatttcaaatcaacttacttaggagcattaggaatgctcctaagtaagctacacatcagaagcatcagacaggctctgtgtaagtgacttgatgagctgaagcctccccgtagcaggagcaggtgtgccacaagatgtcctggtccacaggagagcaccagggaacaggggttacaaagaacaacaggaagtgcaggttcccccactctatgcttactgtcgaggatatgggcctttgttaatcagcacccctgctaagcagcatgctaattattatctgtcttgtgtgctcagcctagtaggttgacagggacgccaaatccaaacaagatatgagtcaaacttgtaaaatattgtgaatggcgattagggctgctggaagattggccaaagacatcactgagccaaatgcaacaggcaaatgctggctacttcagaagccacaaaaactgggacaggtgattgcacattaggccccctcccctgtctcccattccttgctgtaatgtacagcatggctgggatgctaagaagaggagctctggaccctacacactg

SEQ ID NO: 593 - DNA, 2419 bp, Homo Sapiens
ccagggctgtcaggccctccccagccctgcacctgccgcgccgccccacctcgccaggaagtctcagagaccccggggatggggtgggagcgccttcccatcgcgggctcaaaaagaaggaaggacgcccccaggggtcgtagaaggaggactagctccaagccacaactttcttcggacccaaggcaggccggctggggctccgcgcctacacggcccctggcgggggtccgcgcgccccgggagccccgcggctcggggaggaaagaggagacaagagacaggcgaggattacggggctgacccagccggggtagggaccatcgtggaaaaactttggcgaggtggggggacgcggaaagagagcggcccgcgccctgcaccttgcgccgggcatcccgcgccagtgcctcgctcccagtgccccgcgccccgcgccccgcgccttgccttcaccccgggccagctgcatcgcgcccgcgccgcaggaaccgtggagttggaaagtgggggcgccgcggctggggggctgcttcagctgcgcctcggccagcgatcggcgggccgggctcaaatccagccaggctgggcaggcggtggccgcgcgactggggaccgggcgccccgccctcctcgctcccctcctccttcctctccctccctccagccccttggcctttttcagcccctaccggatctgctcgtccgctgtcctctcttttctctcgctcttcatatcactctccaccccttcgccttgccttcgcctttcttcctccccttgtctcctgccccctcctcttctcccctcccctctaggggcggagcttctcccctccctcccagacaatgctgtggctgcgtccccttccccgccagctcgtccaggctcccgccgccagcgattcttccgggctgggggtggggaggtggggggggagtgcagggttggggaggatgagctggctcccctcacctccttgctgctgccctctccaagagggatggagacttggcccaagctcctcggttcacccggagctgtgacagccactcccagggaacagtcacgctgccctaccaagcccacctccagcggcctggattccccaggcagaggttgtgggattttgttttttctaacatcccagcttattcccaaaagggtttgagccggacaggggctaaacaggccccttcgacttggcgggccggccagacgtgacagcaatgccaaggaggccaagtttctttgtccatttctcacctcccccttttccatccctggacctcctggcgcccccagtacacagaggcccttgagcagcccggctgcaggttccctatctactcagagttctccccctcacgtgcctatccccaaccctgcagtgtctgcggaccaaaggggaagggagcctcaggccaacccccaaggtacagccagaccagctcatccagcctggaagccaagcattctttactaaattcattgtttggatcttggaatgtgtctcccttagaaacaatgttataaatggtgatctgcttcccaggccagccacaaaagtctgttgaacccaaaatgcagctgtagggtggtgctgagaactgtgtcagctaccctgaaaaaggaggccactgatcagctttatttgtagaaaaaatatgtatatatcttctggttctttcttcttgggctataaacactataaattaaataagttaaagttctcccattaagtttccccatatggacccactactctatgtgttaagcttctttcctttgcaggtaatagaaataaccttgggggaatgcatttgcagacgcagtggtttctcgataatctcatctaatctcagtgtcagaactgcatggagagctcagtataagaggcaaatccagagcctaaagggcttcccgtaacccagaaagtcttccctgaggggttctttcttctccttcatcacagactggccctccctgcaccccagacacttggtgaaaggtggccatgacttctatctccggggcttggagctctgctgctcaggaaagcagccagatgctgctagaatcccttattctctaatctaatctcccaaaagagcagctcatcctcctgtgacagtggggctagggatgagctcaggttgtacatactgggctaccagaaaccctgaacctaggccctatttaaaactaaacccattacttttgtttttgtttttgttttgttttgtaattttgagatggggtctcactctgtcacccaggctggagtgcagtggcatgatcatagctcactgcagcctcaatctcctgggctcaagagatcctcctgcctcagcctcccgagtagctgggattacagccatgtgccactatggccagctaatttttgtatcttttgta

SEQ ID NO: 594 - DNA, 2480 bp, Homo Sapiens
cagtatgaaacataaggtccagcatatattattattcaaatgtttcttgcttgaataaatacatgattgtcagtgaacatctgttgaatgaacaaaggggttacatttaacagctaattgcagtgtttatgctacttaaacatggtggctttttaggtgttcttgtctcagtttttgagagctttgctccttcttcactgggatttagacatgtagttataaggagttaaattctacagaggtgtgcaaagatgataagctacaggcagcagggcggtaattaatatttctctgcttggatactgagatttccacacctgctggataacagtgaattcataagggattatatacttaatggtaacatttatatataacaaacatttatttaaaaaactcatatgaattaactaatctctagaacgttcctatatgggatcctctatcagtctttgtatttataagcatttattgaacaccttttgtataccaagaaccagttatttcccaaaactttggtgagaccaacagactttatatcattagctagtgagtttttctaaaagtgttggcttacttataaccagtgagttgtatctcttttgtggcattggccagattttataaactgtagcttcttgtttatttataatggacttagatccttggatgagatgtattacatatgtgtgaaggattagagggcactttttaataacaacaggaataatactgctttgtgctgctaaactgtagatcttttcttctaaagatttaaagcccattatagacataatttgattgttgctgtattgcaacagtgtttttccttctctcctcatccaggcagatttttttcttgattaaagatggcatgaatactttctcatgttatgacctatttgataaacagctcaggatgttacaaaagcaaagcaggagatgtcttaaataattagtggcagaaagcttgctgctgctcgggtgttaatcttgccagaaagctcagatatttgtgggttgcactgtaaatttctgtacagatgtgtgtgaggttgagtttcagccatacgcctgtaacagcatcaggaaacattttgtcatgctacttccttgggtgatcttctatgaccaaaagaaaaaaaaagtcatatttctgtcttgtgaaattgagctcgaattctgggtagtttagtagtaatcagtatatgcctgaatcacagctgcgcgggatggtttgtattatataccaatggcaactactgctttaaatatggaaattaaatactttaggttcaggctgattccaatctgcgggtaggaaacgtctgatctatcccaagataagtttaaaagtgtgtggagttttctctggggctacaaatcctgttcacattcatatgtatttcttttgagacagtcccttgaggtctcttggcagccaccttcttgaacgtgggaagagattgggatccctaggaatgcaaaaaaggagaaatcaaaatgtcctcagaaaattccagggtgtggttggtccagagacccaatccaacagttccaagactcaaaagatgagtatcaaactatacttggcttccctctcttcaggcatgagacatccacatttacccagaatcagttcctaatttggaagcttcttgtgttcccagcattctcagatcttgtaccaaattttttgtaaactctcctaataatgagtagttatgtatagcattatagttgtggtcttgatgcttctattatcagttgatcattctggctctgtttctttgtggctctgtggccatgaaacaacactttaataggtacaagatgactggtgaaactcacctagtaagctctgggctttccttaatgtgtataattagtgtatattatagctcacttaaaaatgtgttaacgggtgaaattaacatgatacctcagaagttgttgattatttatttatttttttgagacagggtctcactctgtcatccaggctgcagtgcagtggtgtgatcatggctcactgcagccttgacctccccaggctcaggtgatcctcccagcctcttgagtagctggttccacaggcatgcgccaccacatgtggctaatttttgtattttttgtagagacagggtctcatcatgttgcccaggagggtcttgaactcctgggctcaagcaatccacctgccttggcctcctaaggtgctgggattacaaacatgagccattgtgcctggaaagaagttatctattattatcttgctagacaatctgtctgtgacctcctaaatacctaacagaatatgctgagccctgcccttacccctccatctattttggaggtcacctgtaatgttggtggatgctttcagtcacaccaacagcttcccacctcaggcatttgtgtccctctgtctgagggctttcattggtctgagggctctctcagcctggctcggggcaggt

SEQ ID NO: 595 - DNA, 2464 bp, Homo Sapiens
ttgcagtgagctgagatagtgccactgcactccagcctgggtgacagagtgagactccatcttaaaaaaaaattaacttggaaactcatgcctcagaaagcatgactccagccaccctgaatacccttagtgtacagatatgctttgagtggtcacatagagagggcacaggggcaccaaaggaagggaggaatcaggagtccccatggaggttctatagaggaatccaaattatgtctccaggagcttcttctataaccagttgctgtctcttccccctgccccaaatttagtaagatataattgacaaaaattatatatatttatggtgtacaagctaattattatataacatatgcatcgtctcacgtacttatcatttttggtggtgagaacatttaagctctactctcttagcagtttttaagtatacaatacattattattactacagtcagtatgctgtacaataggtgtccagaacttatttatcctgcataactgacactttgtaccaattgactgatatctcctaattccatcgccttcccccaaccccttgacaaccaccattcccctcttcttcggtgcatttggcttttttagattccacatataaatgagatcatgtaatacttgtctttctgtgcttggcttatttcatttagcataatgtcctcaggttcatctatgttgttaaaaatataagattttaatctttttaaggcttagtagtattccattgtgtatatggactgcattttctttattcacctattgagggacacttgggttgattccatgtcttggctcttgtgaatagtgctgtagtgagcatgggagtgctgatatctctttgacatactgacttcatttcctttggatatatacccagaagtgggattgccagatcatatggtacttccatttttaattttttgaggaacctccatactgttcttcataatggccttactaacttacatttcaatgagcaggaaccagtctttctcttgtacagtttcagtcatcgccctcactgtcccatctcttgcctcctccctttaggatgtctgtgggcactgaagttttctcttcagactggatatgagccagcatcccagcactttgtgagttgagtgtcaggacaaggtgcgacttgattctcccagaaatctttcttgttttagagatagcctcctgggccagggactcttaaggaccaaagttcaattcccaccactccccattacactgggaacttcagaatgtgtgagttccacgtttcccggtgctgacagatcagaggaggaccagacgcgacaacatggctgctgctggaggggctgagaggtgactgattagcttaagcctgcacagcccgtggaggaagcacctcgttcctgccttctcaagtgataaagtctatgctggaatacagagctccctgctctgagcacctaaagtcttgatttttctgggggaaaactctctgtagctctttcttctagtattatttgtgttagtgagtaactccttaaccaggttgtgagctcctggagagttgagagtgtgttttggtctttgtatctatgaagtgctgggttatgcctttactccagggccatgattgaaaaaaaatgttagagggagaaaattgcaagatgatcaccacattttgtccaattgaaaaggaatgtgccaaccagtttatacagttccatttatttttggaaaaaatatatctccatattacctgcttcctgccttcctttaacttctctctctcttttaatcaaaataaggaaaaaaaaaccacagaatgctatccacaatatgttaactgttggttatctccagatgttgggattatgcctcaaacaacaattctgagtaacttaaataaatatggaatgttctggaagctgtggggtaggatacagagttgagggaaagcccaagacccagaaattagaaggtcagtgttaaaaacatctctcagatgtgggtagtgagaaataaaggagagcccttcgtgcagggggtcatcagctccaagcattttctcatctttatacatctcccttcaagattcagaaccctaggaggagtctgattgacctagcatgggttatacgaccagccttggcgagaggagggcaggattctttaaataatgggaaacctgtgctattaccaaagatagggagaggagaactgcgaaggcaaaatacagatgaccatcacgaacaaggggtacttttcttttctatctgtggtttctaatgtttttgctacaaacaaaatacaaaaaatatttaagaaatatttatgtattatatatataatatatatatttataaatgttataataaacattttaacatttgtccttttaatagtaagaagaaaagatagcagcaacaccattaagaggaagctagttcactggaagggattcaga

SEQ ID NO: 596 - DNA, 2482 bp, Homo Sapiens
aatggggagtgactgctaaagggcacacgggatttcttttggggaataagaatgttctaaaagcgattgtgataatggttacacaaatctgtcactatactaaaaataatggaattgcacatattaaatgtgtaaattacatggtatgtgaattatatctcagcacatgtttaatttttttttaagtgggttgtggttatgtagcatgtaccttccttaggtgggtacctgccatagtctccatagttccatattgactgccctacactgggacccagttaacttctttgattttggcctctgttggcatttgacattttagcctcagttcatattcatgagcattttcctttttctagtacctttatcatgataagttcccttttcttatccttttcctcatgaaaattacctttactggtcatcctagagcacatctcctataatattttttgacatgtagttatcaagtttctgacaaagaaatgtatttccttattagtaacaatattgctataaaattatacgttatcaaaccaaactgtcttataaatacaacctggattctgggtttcataaacaaacacagtgcactatgccaaccgaagaataacaggaagtactttatgaccccacattatctaacagttctcccctaaacatccctgtagcatgaccaggcaggagatgctacaagactgggaacagagctgcaatcactggcatttttaaacagcttgttgatggactgggcttgtgagaaaaccaacattacactgaaactcttagggatactttaaattggtggattagatggtcgcttgattaagtttgggttatgtaaacagtggagtgtttagatttaggcttggctgttggagtctaggcagctgtttgtacttaagtccagctagaagtcttgttaatcaaagaactgactgaatttctttctttctcccacccctgcctgcttcttttttttgtacctgtgttgtttttccccctgttcaaaccctttgggctcaggactgtaggtaggcaaggcagagcattttgaatgtttctctgaggaccaggaacttatttttttgattacacagtgatgtgccccacagatctccctcactgtgaggcaatcacttcatttatccaagttctacaaagcctttattatttcggttagttcatatttttgaagctaagtcatcagtttgatgcgtttgttgtaaaatgtggtttaacagcttgttagcacatttattttttttttaatggaatccaaaggtatttcatgcttgagcagcagtggatttaagagccgatgaaaagccccgcgagctgggcgcagtcagcacaaaacaatgcggggaacattgtggagtcctacgcagagctacccccagcagtggcgtgcgggtttcttgaactttaagttacgttttttgcttttctttttccctgacagtgtctcataaataacccatgttgccttatgcgtgttggtttcagattgtctaggatgtactggatcatttgagcagtctgcgttcatgtggtttttctcccctctgaagatgattcgattctgttttgtccacaaaggggagacgtggattgctgttttctgtcctccaagtgtggctttgtaaagctgtctcagaactaacgggttggaactgaaaactattatggagcttggtgaatgtcagcgagcctttgaaaagtaaaagctgggaagcgacaaactctttccacagttccatcccaaatacaaacgaggtcattttcttgggaggcagcaaaagtgagcattctgtgtttgaccaaagacaaccttttggttgaggttttgattatccagggatgaaatggaggcaaatggtcttctttgcctaaatccagacctacctttgtaccaggctaggtatttgttggattgaaaggagtgcagcccttggagagcagtttcatggaactggaattggtaaaaatgggctttctgattatatcttatatattattattagaatgtattattacatattagatctatattatatctaatatagatctaatatattagattataattagattatattaaattataattatatattagatctatattattatatctaaaatgttttaccttaccagccttgccatttgcatatctgtgttgtcagttcataaaccagattacaatgattttttaccattcaagtcagaactcttatatttcatttatattccagaaagtagagattaaagaaaagtattgagaagagaaggctaatttcttcttacataataatatctgtggttctcaaattgaaatgacagctgatatagtgcttagagcctaaattttatttttatctatctctctagaaagagatattgaaacacataagggaaagagaggagaccatatgtgaaaaattaccaactactttgccagtgattacctaacaatgaa

SEQ ID NO: 597 - DNA, 2345 bp, Homo Sapiens
agtcactgggtccaccaaggtacttctatagctggtagcttactctttcttctaccactctccttcatcataccaatattttttcctttgtttaccttcatggggtcttttatgcttccttgccagttctaaagcatgtgtgaagagcagatacatctatgtaaatggtttatatttactgtgaaaacttatgaaatatttatgaattattaatgtcgtttctagggccacaataaatctctctttttctctctctctctgtgtgtgtagtgtgtgtgtctttctctctctctgaagtgtaacccttcaatatggtataactttctcagactgattctgctactcactcaggagggaatgttaaattctacttattttgcttcagtttgtaaactttctagtgttctcttttttcaaactggattgttagattatctgagggtacccactccctttgttcagagcacagcatttggtgggctgtaaaacagaagagctccttcagacttgtttgacaaatgagaggaaaggggcaatggtggcaggagcttgtacagataaaaaggctcttcaccttgggccaaaaggtgctacttggcaccacctccacttcctgcttttgctcaggaaagaaatctgacaaagcaggagacagtccttgccttgccttcctcactcacaacccccttttttgagaactgccatcttgttctcaagatgggccatatactagtctctatttctatttctccagctcttgtccatgccacccagacaactatgatggcctctccttagttattaccctgtagattagttttgcattattggataaatggaatcctatagttttcgtttggaataatttagtcttcggaatctcttacttaacatgatgcttgtggaattcaccatgtagttgcatacagcaatattttatttattcttttgctgaatattattccattacttttgccagtttgaatggatttctttcttacagtcaagtaggccatgactaagggagataatgaagcatggaattgtcttttccagagaaaccacaggcatggaataagaattccctgaggaggccttttctgtcctttcttcatcaagctgcgacattattttcatattcagagaacttcagagcaacaccgagtttcgctgagtgggttcagagttccatatggcagctgtctcagttcctggcacgaggccaaaggatgacagttcttatcttctttcatgttcttttgcccaaccttagggaatatttctttaccctgtgattgctcatatctgaaaatcttactcacactctacaatcttccatcagcccaatgccatgtggtgttaaccctttgcatgctgcagtgttgagctgcaaacctgcccttttcttgcagtaatccaaagtgcccgtaaagtcttgaggcagacaatgttattttgtcatgtatgttcatataatatcagcaaatcattcattgtgtctttgtctatcttccagacatggtggttgctttgtagaatcaaaatttctgttatcttttttcataattagttaataaattcaagttgagctaaggagccaggtgaagccactgtgatttgggcaaggttcccatcgatagacatgtgctttcagacacaagatgtgctttcagacatacaattctgtttggccagagtagaatagaatgggtggtgcacactttcattatgtaagtacaccctgtttttcccattggtaataatatcttaaggagcgcaaggaaattcaggaaggaacatttcataatgtcaagaatacctactaagtaaattattctttagaataaatctgagagatggattgtcataccaaagccaatagaaactgaagcatgataatgtcaatgcatattttccctgatatactgtagatccgtagttttaaaagcctgcttttttattttgctagctgaatctcttttatcttgctgccactcttctcatgggatgcctcaaaatcctacagactcttgcctggcaatggggaaaaatgagggtgtttaccactaagaaagccaattaaagaagtaactgatggattatccagcccatagaccaaacaaaatggacgttacttcatgtcttcaaatatctaggcactggaatcagaaaatgaactcccaatcagacttccctgcttttcctgcagggaaaatgagatgcaaagcagagtcagagaaaaatagcaaatggccatttgtctgctgggagataaaaatcttactcagaggtcaagtcacattcaaactggttgatcccatggagactgactctgtcctgtggga

SEQ ID NO: 598 - DNA, 2435 bp, Homo Sapiens
atcagctgtcctagaaattgcagactgtgctgacctggagggaggaagacccttccaaacccctatccagactcctataagactcagatttttaaaacaaagcaaaacacaaaagcaactctttgcttgcggatgactcaacttcctttttggtaggctcaactctgcttcccaggaatcagcagtgattagtgatagaaagagtagccctcatgaccccaggtgaccatcaggacgctagggcaggaaggagcctgttgattgagtgctgacctgcaaaattaccagcacaggtgtccaacaatttcattcttgagaagccagagttgagtttctggggttgctttggagggttcaggacatgctgcagggtaataggaaggacatggggtgagaaaaaggttcctgccaagttgctgaaagacacatgatagctcaacagggaaccaagagtcaggtttaatattgtttctgcaccacacttaataattgaggtcaatggtttatcaagtcctcactgagggccacagagaggacaggcttctaagtgcagagaggcagcagtaaaggctgaggctgcgggaaacataatcagagtttaaaacactaacacttacctgctggtatggttgagaggcattccaataacccttggcccctgacttttcactgtgccaaaatctaaactattacactaggtcttgaataacttttgaaaatgtgtgctttcccacctagttaaggcaaagttgcctcaaagacaaatatcacattagcacagatgctcttataagagcaattaccatcaatggtcactgcctggaagttggacctggaaatgacatgctggatggtcatagtcttgttagatgaggtgtgcgtgtgatgataagtgggaaacagcttgatttaagggacactttagtccatggccagcacagtaatgatcttgggaagcctgaagctatgtcttctgttgagcaataaggtacagggcgcagaaggggcaaaataagtcagggagtccagttaacatgtgagatggaaacttaaggatagggacagagcacgcacaaagcccagggacacagctttttgctggacattttgcctgtactaactggtaaattagactgcacaacaggaaagaagcttgtgatagcaaaaggggtcgaaaacgggaaggacactcagagggcaggaactatgacggggctctgcggccttgtgggcagcagggagagtgtatttttggcctgcgggtctcgtgagctggaagaaatcaggaaagggaagctgagcatttaatcctacatagatcacaggctaatcgtgcccatttagtgtttgaaagtgagaagttgtcaaggctttgtgacagccttgaaaccgcaggcattagaggatagaaatcctgagcccagagggaggcaggcactcccatctgcccaatttggtcttcaacagcttccaactcttcaatattcccaagcagaatcagattaagcagaagtgctcataatagttctccaatttagcctgtatcttctctctctttcttttgtcctgggggccatgtgccattaggagcagaggttgtgaatgttccagaaatccctttgggatgcaggccttcctcccatgcagaaaatgcctactgaacacactaaatgccaggcacatgccttgtactggggtgcaatggtgaggggtgacacccagagggagtgtccccctcttctgtattactttttgcctgaccttttcagtagacttcagagttggtcatcatgacttcctgaactcatctccttccatctttctctcctgagctctgagaagcaaagtcaattcaaatccaaagtgctgggcataggagtttgtttcgtaagaattcaaactttattgttttacctctaaatctggcctgcttctatagtgcttgagacttagcaatctctcactactcttagctgtttttgttgttgtggctgtcaatattatttaaaactgataaaaactgcacagggaagttgacacagtcagatattaagttgatatgcctatcattgaatgtctggagcaaggtaacctcacctcagacttgattcctaacaaacttcagtgaatattcaatttttgttttatcacaaatgtattattacacctgcctatatgggaaggtgaagatgggccagttgtttgctttgaaaggaggaaagagtgagaatgtacaactgaatgaaaaaaaatattttggccacagacactttttctcttggctttacaataataaaatatgtagtgggatttttattttgctttagaatttttagttgttttttcctttttgaagtgctccttcagaggaaacaaatctttctattgacattgaaaatgagtcataagagaagtgttgctactttccttttgag

SEQ ID NO: 599 - DNA, 2450 bp, Homo Sapiens
ctaaagtcagaacgcacatcataccacttctttgctcagttcccctccctggcctggctaaatttgccattcctgcttcctgaggacccacctttaataaatcacacgtgcctgaaacttcattcccagcctcttcctctcctagatctctctacctaggacagttgtaggtaaagtgaggaatcctaagagagaacccagaaaagcagaaatcacaaaggcaacctagtcaacagtgaaatgtatgacaaaatggagggatcttgtcgacaaacaaaatgatatctgaaaagtctcactaataaatattaaagatcattaaatgtacattaatctttggatgttgaaatcaacattgaatgtccaaaattaattcaaataattatatcaaacacacatgcacacatgtgcacacacacacactaatcataaggatttaaaatattctgaaattatttcatctttccttttctttctttcttattaaaaaaaaaaaataatggccagaatactggcttctataacattagtccctgctctggcagaccaaaagaggcagaatcttcccagcacaattttgccctccaaacattttaaaagtatccaattatctggctttgtattacttacaaaatcttgtagttatgaagaaagttcttttttttaaattcagtttatctccctaaattaaaagtgtccctataaataagaagagaagctgtttctgtcaaaactttgggtctacttaggactaatggagtttctttgtttcgtaggaaaaccttttgccctcagaccagctgctaaagttgaacaccacagatgattctttcaaagcgattctgaaaaaccatatgctggaatctaaatttcttaaactttacacacaagatcagaactccacatcttaatagccatataactctataaagaattacccctgatttctctggtagatcatcactgcagaaggaacaaaaaaaggcttcataaaagcattccacctgtattgttggcagatgacttataaatgtcgcacagacacgggctgactactggctcatagaagaagcattaaatgaacgacgagacatctgctggtaaatacacagcaaacaaaaaatgcaactcagagccaaacatgtgcacagtgtgggccccatctctgctcataaaccaagcaatgtgttctgctaatcattagcagagttattgattttagatgtgtatcacacagctataattttgtcagagagtagaccacataagttgttctttttctggttgtttcattttgtcttattccaagagtccgtaaattgacgaccgggacaaaaattataattgacatcatctgtgggaaatatttcataaaacaacaggcccagatgtaggattaaagccatgtggtagtaaaataccccactgaaaaggggccaggttccatgatttcttaagaaaacagatgtgctctttttccctctgcttgtttttcaattttttttctccaaataaatccccccccaaccaccaacgttttttcctctctgtctcctcacgattgcactggagagagttcataaatggattacagatgtaggcttgtacttcaaaattctaactgtcacaatctctggaataaaataaatgaaacatttggaaaaattacattgaactattgtaaaggtaatgatgattatgcaaacatgtctgcttgacatttatctagcatctttgggcatgagcatatgatctcccagatacctcaagctggagttcagggagtaggaagtaatttagagtttgtccaaaatgcagcaacagtaactccttctgaaagccccctgttctgaaggggaagcttttatctttgaagtttcgacaagttggtaaaagggttctcacgtactttttttcttcttaaggtgagatttctggataaaacagcacaggaaaataagaacccaatatatctcagcctctactcattcaagttccttttatctatattatgctctacaatttcccctttggaaatgttgtgaaccacaagaaaaggatcctagggcacaaacacaggctatattgtttaacaactaatctacaagtgctgtgaagaactgcacacaaccgggtttttgccaaaaaccttggtgtcatatggaatccattgcagtatcactgattacaattaattaattcagcatttatgctgtatctcagcatccacctccagtaatgtgccaagatggcttagtgttgggagaaaataataaagtgtaaaagaaactaaatttccatcatgtgtcacgttaagatttcaacagaatatctgcactctccaactgtcccttttcagcccctcaaaaactgaagcaaacagtacataaatttgtttagaaaccagaggagcctgactccaatttccctgcattgtttctttagtctgt

SEQ ID NO: 600 - DNA, 2493 bp, Homo Sapiens
tttagccaggcagtaaaccctgaaactcttggctacagaggtttctattcctacaccatgatgttcctcctctctagttgtcatcggcaatggcttccactccataatgagacaagccggaaattgcagctgctactccatcatgcctgttctctctctctctttctctctctctcctctctctctctctctctctctctctcacacacacacacacacacacacacacacacacacacagagcaggtcacattgctaataatatatatcaccctgttactgggatatcctgagaggcagtgtattcccaaaatcccaaacaggaaaaacagtaactgcacttgttttctttcccttaactgattgacaaagacaccctacaagatttgagagaggaatgtaaaggcactgcatgaatctgacctgctgctctccctcctcattgattcccttctctttccgacaatccacacaggcagaagttctgggatgttcccatcctattcctttctggctggcatttcccctgtcataccctccttcccactggcatactaaagttcaaggcttaacctaactagtgaaacaacctatgatttaggtaaaccagacatgacctcagtacagaattgtcagacaccttaggaataaggcaattggaggatgatagctcattagttaatattctaaaaataatactctcagatcatcatttttccttgaaaatcatttctttcagtatgctgcgcagaatgaccttagactcccaatgagcctagtctcccaacgagtgagagcagagagcctcaaacatctttgtgtcttgtcctggatggagattcctgctcaagccactggctcaatggtccaatctttgaggagatagaatttaagcaggcagatctgtacacttttacatgacacccatcacctctcctctcgtgtgtctctttttccccctcctctttttctctatttcccttttctgtttctccaaacccctcagttaaccctttccctgccccctagtccttgtccacacagaaaatctggttctagagaacagtactcaaacagcctccaactaaaatgcattacgtgtggtaatgcaaaaaattattagaacagtttttttctatttaaaatatgactcctgttcactgctttggtttccctgtctttgtgcttcaggctaaatattactcagatttctgcgaggccaggtgctttctcaccaattatctgaaaggcccagagaatggtacttacatcaaagccagtcctaatgacaaaggacacctggccacggcaaacacaagcatctctcagctcctcgctccatttggcaaaaagctatttccatctcagtcacaacataacaaaggactaattgatgggagcattttttccatctttcaaaaaataaattgagccaaccccacgagctcatctagaggaattaattagggaataggaaatctccaaagccatccttaaattgacattgaacaaagcccagggaacagatggcttttcatctgaattctttaaaacctttagcactctactaattcccctataggaatgaaaaaaaattgctaaatgaatttgagcaaactatttcaccaggtgttcagttcccctaagattccttttgcactaagaaaaaaagaaaatacaacaggtatcctctctactgatattactataatttcatttgtacatgtgagttcttcccccagggctcattctaaacttcccctgcatttctgactaccaagctgggggaatgattctcttaattggtgcagctgatcatgcacaactgctcagagcacaaggacagtgtcaacacacacaaagtcgagaatgaggccattgttcaagcaaaatagaaaaatagaaaacaatttttgtcattttgtttcagatatctggagatttctggggcaagagatggagaggataaactgtattatcccaatagttgagtagattttttttccccgtacaaatttgacatgtagaaacattgtgaataagagagacattgcctctcatttgcatagttaataagaagctgtcctattaaagcctctagaaggatgaactgctggaatttatactttatctattcaaaggatgtctacatacaatcctccaagataatttggtagaaaattttaaaacacttttttctttttaaaatttgacagataaaattgtatatacatactatgtacaacaggatgttttaaaatatatggacattgtaggatagctaaattaagctaattaatatgcacattaccttacatagttgttatttttgtaataagcatatttaaaatctactctcttagcatttttcaagaatataatacattgtgatgaactatacctccatgttgtagaatagagctcttaaaaatattcttcttatttaactgaagttttgtaactttttaccaacaggtccccattaccttcctc

SEQ ID NO: 601 - DNA, 2438 bp, Homo Sapiens
gagttagtgaaatttaattccgttgcttacaaccaaagaaccctaaccaagtatgtcatctaccaaaatggagacagccaaagcccaatgtctagcacttaaaattctcagtaaatctttgtgatataaaaaaaaattattgtccgggcgcagtggctcacgcctgtaatcccagcactttgggaagctgaggcaggcagatcacgaggtcaggagatcgagaccatcctggctaacgtggtgaaaccccgtctctactaaaaataaaaaaaaattagctgggcatggtggcgggtgcctgtagtcccaactactcgagaggctgaggtaggagaatggcgtgaacctaggaggcggaggttgcagtgagccaagatcacaccactgcactccagcctgggcaacagagtgagactccgtctcaaaaaaaaaaaattattaaacctccatctgccttgttgatatacactgtagtttaagttcattctcttaattccattaggaatcagaattctttcatgttttatttgcttccactctaaaaaatatttatgctcatcttgttccaaaaataagatgatgtaattgacatttacatagaaaattgaaacaatgaaggaaaagttaaaatgaagggttttttttccaaaaagagttataaaacaaatttaaaagtccataatcctgatcatcggattaatttgtttcaaacacttcatttctggtctgctattctactctggttttcccttagactcacttgggaagatttttttttttaaatacatgtgactagctctcactaaagaccagttttatctgaagatctaggtgtaggacctgggatgcaaacattttcaaatgtatcgggtaaattctgatgcacaataaaggttgagagcttgagacttagggatccaatcaatcatgcaagatgcttaaaatggaacgttgatcttcacatgatacttgtcaaatgtagaaaattttgtctggatttggaaacaaaaatgtgagcatgaagcttcggtaaaataaactctcttgaaaaacactaatactctacaattatttttccatcaaaataaaatagtgccaagtacatagcttcttccaagtaacaaatctttaaaaccaaagtgaaattttgaaaccactccttcaaatagcatccgtccggtagacagatggcatgttttatttcatttcccgtttctacttggtggagttcatggggtattttgagaatcaatgggtaattaagaattgggtgccaatttaggtatttgatttggaaattgagtctttgaaaaccatcaattccaaatatagcgcaagccctccttattatgctatcccagaaactggtaataagaacactctaaaaatatttagaaatgcaggagccagattttctgggctgcaggtggaggacacacagctgccaggaaatggaagacacctgctatgtccctgagcccccctttggcgggtagtggatggaggacaataaggtctgctgtagtattaatctgggtactaaatagtaataaataaatgtgatttaagagcattgttgggagacctttctgaaagagcatgcacagtagtccttggtagtaaggaatcaaggctggtagccctaagccatttttgttaaatgtaaagagtgctgaaaaagtttcacacctgcaactaccagtcagtagcaccttaggagacattacttcatcagacacgattaactccttgttctagagagttcagcagaagtctatagaaatttacagtctatgtgacattgtgctaggctgacaggcatcaacctgagactgaggtgtgaaaaaagatcacttgaaaatcttattaaaaggcagatctctgaggctcagcttcacatattctgatttacaaaaattgtagaggaatcaggaacctgcactttatcaagcattccaggggtacttttggtacaagtggtctgtaggcaacacttggggaaaccaataatgattaatatcatgcttccattaaggaaagttaattttagggaaaaaagagtatttgaaaacctgagtaaagaaggatctggcaggggtttctggctcaagtaagaaagcctcaaagaacagggagtgataggtaagtccagattgcaagatattccagaaagaaggggagaaccaaagggaggagaggtgagcagttgctaggaacaaacctcagaattacaaaacttttcctaagatctattctggggaggagaacagtttgagaagtaaaagaccataaggaaatatcggatcatccaacattgaccaaatgttactaccagtcagcattgcaccaggtgctttagaaatatcaccatcactaataggtagctgcagcctataggttaggtgcgtggactctaggggcagtggttgctcacgtat

SEQ ID NO: 602 - DNA, 2449 bp, Homo Sapiens
taattgtggctattaaaccctgcctttgcaatgcaaaagtatagataatatgtaaatgaacaagtgtggctgtgtctccataaaacttcatttacaaaaacaggtggggggctagattgtccctcttctattgcacataaactgaaaaacaagaggtaaaaccagagggactctagggtggcttccaactttgtctttttctaattgtgctagagaaagagagaatataagttatacctgcttctttggctgctaattctcttgccaaccttatcttcatatataaaaggtgagtattaagtctacttggtagtgttgacggggggattaagtgaaataatgtaaaaatctgggacgatgtcagacttgttcaaagatattcacacttcccctgctctctgttatattttcccatttgttttcagaatttagctttaaggtttgggaatccaaatactgttttcaatcaagcagccaaggcttcagatgacaagcttgtgtgtgtttggaaaacgtggcctcatgatgtgcacacctaggactggtgcagctgtcatactgccatttcttagtgtagggtgctggggtttgaattttgataatccctgtgggacacctcagaaggactaggctttatctccaaaggggtcacagtgagtagagttttggctttatctccaaaggggtcacagtgagtagagtttaggatgccatggggttgcagtccagaatcaccaggcacctagtcccatttcttttttaagaagacatgctgcttcttgtaaacattacactccagcctcccggcataatcccaaataatgtcatttctgggaaaagttgataagtggtgagaatttaagccttttcatctgttgggaataaaagtgggtagacatgcagaagttttcttctaccttacatagttgcacctcctcggcattcactttcctttcactttctggaattgagctggccagagatgaggatcggtatgctgcttccttcagccctgccctgtgtggcgtttgtcttgcaactttcccatgcttgtttcaacaggaaaaaaagcaaagagattgacatatagctaccccgaggctagattgtcaccgaaatagatttctccaaataaaaataagggccgtttttgcttgcaaggccttgcaatgaaacagagttaataaaaactgcatgggaaactcacattgcagctataaaaatattaaaaaatagaattcttagctaaagtcagcagtgattgttggctcgaggtagaaattagggagtaaaacattctgaaacactcattgaaagtgaagagagggaagaattattaccctttatccatttggttaacccttcagaagtaaagctagagtcacacttgcttagcaagtgattaagtactgggtttttaagcgtaggacagaccattttctcctgtggctaacctgtaacaaacagaaaatagggccacttaaaaattagcacaaacatatataagaaacaaagctgctccaacaggaaaacttggtaagatcattgacgaaaacgtctacagcttcattcgttcttctccttcagcctctgtccctgtgtgtgtatatcagatgtctctgaggttaaagcttgtgtgtcctcctgggctggagtacagggacacccttcatcactctccagtccccagtgcccagtgtcatcatctggaatatcttctggaaccctggagggatggtttgtttctacagctccccactagcaggggtctttcctctaagaatggtgcttccaggatctctccaggctcagtttcaggcgccactagatcatcagggaatggtgattgattatctgagaaatgtatctatttgcattcaggattcaccaagtcactattctaatgggaactcactaattggcttcactaattcccacttagaactacaagcattaaaagtcacagtatctaagacaagtgagcttttagctcctggttgcaataggggaatttataagaatatttagaagtgatccaggttcctttctttccctctccttaaagcacataaactctggtcattttcacaggtttttgctaattaataccaccactgtggaaatgggggctgttctacaaacaagctgcaacaaatgggatttttattgctggtggaaaagtctggggaataattagcagatctatggagatcccttgactccgggcatctgcatggtaatggccaaccctggagatcactcagggaaatggggtcggactttccaccttagggcacatttatattgtcagttacagccttcaaactgcagtgggacaaatgtgggaaaatattttgtgaaatactagacaaatgaacctggtgttgaccaatctcaactaggaaaactggctctgctttgctaagtgctgtacagcagccaagactcg

SEQ ID NO: 603 - DNA, 2482 bp, Homo Sapiens
cacttattatttttcataaatctatggattggctggctcggaagttctgctgatctggtctgagtttggttgattcagcttggcttgatttattaacttctggtctgcttggacaattcgctcttctccatgttgtttctcaaccttcagcagactagtctggcttcttcgcgtggtggagtctgagatctcaaagagtaagcaaaagcctgcaaggtctcttgaggcctaggcttggaactggctctgtcacttctgctacatttcatgtgccagttcaagacacatggccaaacctaggtccaaggaatggaaaataaacaccaccacttgatggaagaaactgctaaatcacattgtatggaagagaaataattggaggaaattttgcaatcaatttacaacagagtagcctgattgctctaataaacaaatctcaaatcttaggattaaacatcataatgtttatttcttgttcacagtccaatcttgtatcacagtccaatagaggtgggcaggggagtgagagagattgctccacacagccattcaggtaccaagtttccttctgtctagttgctgtgttatccaaagccatagagcctttgattgggtcctgcgtttccatccactagatgagagaagagagcaaatatgtagaagaaatatctgtccttaattgcctcaacctggaggtgtcatacatatcacttctgcccctttccagggctagaacttggtcacatgattgaatagaactgcaagggaagctgggaaatgtggtccagctgttaggagaaagaggaaaatggcttattgagcacctagctagactctgctgcagtcacaggctctgtgactgaggaactcattcccaaagaaagtgcactgggacacatttcaaaagttgatgcatgatagtatggggcagacaaaggttaaaaagacaaggtcatgattaagtaggggagaaacacacagatacctatgtaaatacctagggtatgagcaagaatctggggaaagacttggagttaggaggaggtgggtgcttggcaggcggtgagactttaataggcagaggtagaagtgaagggcaaagggaaactttgggccacacggggaaactagatttgtttgcttgtttaacactgtggcctccagtgggacctaaagtcgatgccttaatgtaggacggctatgttagtgctgatcagaataatgtaccccttagggctacattaaaaaactatgctcagtgcctcatttgcaccttcaaaatatgcacatacatgtgtgggccagaaaaggctgcgctcaggacatgcattcttatgtgaaccgtaggtaattgcacaagcaaacaggaagttgcgtaggtatgcaggcagctgcctgttgagaggtgcgtgtgggcatgggcaggcgtgggccttgtctgtttgagtacaattttaaaggcttctcctgatggaagggagggcaagcaagcctctgggcacctgcttccctaactgctgctgtcgtttgtccttctcaaggtttcctttctgggcagggccatgtcagggagtatttgtggctgtaagaaaaaggtgccgtttcaaggtctttgctaactgccgagctggtgaataaacgttttgaaattctctttgctgagaattccatctcctggttctcttcctgattctatggcccagtttccccagtttattccctgtcttcttcttctgtttgttcctcagatgttttcccgtgaacctgtccctaatcactttctgaccttctgaaccagagctatccaacagaactatctgcaaaggtacctgcactgttccttgttgtagccactagccacatatagtcattgagcacttgacatggggcttatgggcctgagaaactgacttttaaattttatttaagttaaatataaatagacacatgtggctagtggcttctctattggacagcatagctctagaacagtctttatgggtaataatttctcccttacagtctgccccattattcccagtctgtatctccttaccctacctgctctcctgaaccatgtttacaaatactccaatttgattattctgtggtccccttaatgcaatgtggctaaggttgaactctttgtctctacccacaaaactcatttcttcttgaccttcctcctgtcactttatccttggtcctcccttattagggaacagttctgatcagaccatgttactcatatatattatcatcaagataggtccaggttttgtggatctgagtcaatttgggatctctacttaaaaaaaaaattacagagtacaaatgcaaaattagatttagagccttggagcatcctcggcaagtgaagatgtctgtgaagcttaagctttatttgctttactgcaaattggcctcagtttatcattggaatattctacagtttctgggtttgaatctcagtctgaccact

SEQ ID NO: 604 - DNA, 2492 bp, Homo Sapiens
ggtcactgatatggtttggctttgtccccacccaaatcgcaccttgaattataataatccccgtgtcaaaggcggggccaggtggagaatcattgactcatgggggcagttttccccatgctgttcttgcggtagtgaataagtctcatgagatctgatggttttaaaaaggggagttcccctgcacaagctctctctcttgcctgccaccatgtaagatgggacttgcttctcctttgccttctgccatgattgtgaggcctccccagccatgtggaactgtgagttcattaagcctctttcctttataaattgcccaatctcaggtatatcttgattagcagcttgagaacagaccaatacagtcacctaaattaattttgtaatgactagaggtacaaatacagatgatgatgatggtgatgaagacaacagatttactctagaataatgagaaactgtggaaagcctgtttgagtcgatctcaaaacagacatcagtagacaacaccatagatgaaatcaaattgtagtctcaggaaaaacattatcttcaaatccagggccaccaatcaccctggaaccatcccatagctgtctaaacgcagtttgcatgtggtcgttcatctgatggcttcatttccttttgacccttcttttattctaattttgctgaagagattaaatgatcgcctgttaaaaaggtgtataaagtggaatcttgtagaagaaataaaaataaatccctttgtgtatttgaatttactgacatacccagtgcctgactccactccccagtgtctgtgattttgggtaagatttcctgcttagggatctggagctagtcaggtaacgaccgctgcgtgcatttagcatgtacgccaggtacagctgcaaggtttccaattttcccgtttgcctgccagccatcaccccagactcatctgaaagccagcaaggagacagtggctgcaaagcggctttttgtcctcaaagtttaggctccttgaggccccagaatgacaaaatggagaggcagggccaggggaagagggcctggtgagacccgccctggctcccgccggccttctgccaatgcccgcagatggtgggggcccatggccgggacgcccgctcaggccctggcagcctcatgtgccccagcacctccttaaaagctgattatccggcttgtctcctttgtgagccggctcattaccatttcattgtgtggtggcaattcttacccgcaccatgaatattgactttatgcttgcttttctacctgaattacaggcgggcaggccggcggctcgcattgcttgctcagctccagcctccctggcagccacttgaatagtctcaaagaaaagctgtttgcttgagcatttagggataacagagagcggtcacaggccgctacagtgatttattaaaagacaggaaaatgagagaaaagacccttacttcttgcaccagctgcctgctctcttgcttccttttattctctgtctctctcctcttttctcttttctctttattcctccctcccttccatcctttccttttttccctttctctgtcttcctccctccctgtgcctccctctctgcctttctttctgtctctttctctgcctcctttttgttcacatttttaaaatgagagagggaaaaagacggctgtgcttttaaaatttgtataaatttatgggatacaaataccattttactacatggatatattgcatagtagtgaagcgtgagctttttgtgtgttcgtcgcccaaatgctgtgttaagcagatgcttgagggacgttgggcttgtttgctacatctaatgacacatcccattaaaggtagatagaacccagggttagcctttgaaggatatgagaggagattgagtacttgcaggtgtgtgtgtgcatttagtgtacacacacacacacacacacacacactgcaaatggtgccagctgttctggaaaaaggaagctctcttctcagaaaaataaggcagggtgtcctctcctctcaatctccttctccccagacatactccagcagtccatgaccttctgagttcctaccctgaacacagtgtctgccatctgaagaggccacccctgcactgtccagcctgggcttctctcaagggaatgatgcatggagagtcttccctccttggtgtgctggttcttccagtcccaggttcagccccatcaccaccccgatggctcctccctacatgcaggaaatctgtgggaagtaaacatggctggagtgtgtgcagaccttcaaagtgaaggctacatcttggtgacaatttctgttcaaccaactgacctattggagcactaagcaagctgggctaggaaggacacgggagggtgggctgggtgaccctggcatgctggccgcttggtgtgagcaattgcatgggggcagctcttccaaactgagccgcaaggactttgtttccagacctt

SEQ ID NO: 605 - DNA, 2491 bp, Homo Sapiens
gaaaaaataaaaaaagcagttctaaacaaatgaaacgaatgattgcaactaaaactttctcagccatatccttttatgactctcatgtgttgagaggattttaagcaaaaatagagacgggccgcctgttcactccaatcactaaaagccccttacaagtgagttgaactttgtctaaaaggatattagattctgttacctaattactgcttgtcttttagagtcaccatgaggaagtccattttcaagaacttgggaggtttcagttgcagtggattataagaggcactggaacagctgatatactgaggtgccattaagaattatatcaccaccgaagcataatcttgctgtagacatgattgctttgggcgtaggctcccatgtcagtgccaaaaacgctaagacttggagaaaggagaggagaaagtagagctacttcctctgtatgctttgctgcttggaaaggagacagaaaaacagcaggaaatgctcacttcttctcttgggatctttcagggacctcccacctgaacaggacgattgaactttgctttggtaagggatgacttgctggaagatgaaaagccttgtggtggaacatgagtggagctcttcacagctccccaggcattgctggtgcagcacggggcagagggtgtggtacaggtgaggaggtgggtgtggctccagctcacggccgacagctttcctgttccctgctagggcagctctggcatgagcagttgggaatcagactctgggcaaagcaggagcaaagagcctttctgagtttcctcgactgacttcaatggacctgtttctagaggggcatgaaggtggctgtgacttcataagcagaatggaagtgatttgatctacaccgggcctgggaaaattggcttaggtgtggcaaaggtacagagtgtgaaacaggtggggaaaataaattcaagatcctgaacttttccatggcccccaaaggggaagccatgggtacagtgaatggaggggctgccttcagctcacttggcgctgtggtgaactgtctcagggcttggcacattgccaccattccaagacagatgggaaataaacaccattagtatgtcgataagtgtttgttttccttcagcattagggctaagaaaaataaagtggggagggtatcaagccctggagtaagcctttaaaaggtttccccttttgaatctcttacggttgtctatttataacagttacaatcacaacagagaggaaaagacttcaatcacccctgggacacattttgtcaaaattacatttaagcactttttatttgtaagcgagaagcattatcttttattatgcctttaaagcagcgtggggaagttgtgtgcataaaccaaggtgttgctgtggcctgttgtcttttgtgaacttctggaaaggatcaccaagaaggatgctctgataactgtctgccaggcaatttgcataagaggaaagaggcctttctgaagatcattaaaaatgattcattactattggtcatacacatacatgttgttttattacttaaaagcataaatcatacattggcaagtaattgtgtttatcagactattttaggccctgggaggagtagagaggtacaaagtgtggtgattattcccaaggaaagtgcattttaattagggagacaagaacaattacacgtgcagtagttaaaagctatacaaaagcctatgattaagtggtgagttgtgaataacaggctacccatgctgtgattctcttagcgatgacacaagcgacatcttggaagaggcaaaacttgagacaggtcttcaaggattggtgccatctggacaggttgaagaggagtaggagggctttcggatgtggagaatggcatgcacaaaagcacggaggtgagaatgcacatatgtgtctgggacttctaaaacagggcagcctgattggattggagcctttgggcaatgatgagtgagcaataaaatggaagagaacagggtcagaaggggcagacaggagttacccatcctcataacatgcattcacttctcaactccattacaaacccacaccaaatttttctgtgttgactatttgagtattgtaatttaaaaagagtaatccgtgtacagagccctgtactgggttacagagtctgtcttagttgagttttccccagaagcagacacagatagaaagagtccagagcaagtagtttactagggaggtcattctaggaaactttagcagaggggcaggaaagtgagacaggaagggaaaggaaggcagtcagggaagtgctattaagataccaacatggacaaatggagcaaaatcccagtggtgaactctagaaatcagtgtataaaatgtgcctcagagtgaactcatctgggaggtgaggaagttggggtatttatccaccagttgccatcagtcactgggtgagggctgcttttgagggcattaactt

SEQ ID NO: 606 - DNA, 2463 bp, Homo Sapiens
gaaggcatccatgcttccacccaagtcactcagaggaaagaagctgttgtgtgttacattttcgggtagagaagagagcacttaatgaagttttcataagtgaattttcatgccacatgcattctctgtgcataatcctttggagtaatgttaagcatatactggcacccacagtaatattttaatgtcttcagcttgcttaattaattttctttcaacatatgttcatataacattaaaaatgttccactaagccagacaccaggatattgctgaatatgcagatacttattacacatagatggacttaaacctattttgagcccatctacctacccatcagtagtgtttgtggtcttgtgatactatctgtgacccaattttaagtgtgatctcatttatatgtggaaactaaataagttcatctcatagaagcagagagtagtaaaggtagtagaggctggggaggagaggaagagaaggggcaagcggagatattgatcaaagggtacaaagtttctgttagactggaggaataagttgtagtgatggatagcactgcatggagaccacagttaataacaattgtatcgcatatttcaaaactgctaaaagaatagatttccaatgtcctcaccacaaaaaagtatgttggtgaggtgatggatatgttaattagctttaatgaatctttctataatgtatacatagttcaaaacatcacattgtacccaatagatataaagaattattatttgtaaattaaaaattaattaataaaaaattagaaagttgctacttctcaaatatactcacgggttaactttttcatgtggaaaagcaatgtcggtttcatcacaaacatccttctagttggtcaagtagattatttaacttgaattaatatactttttttccatgaggctaataaagacattttaattaaaactaaaaaaaaactccagttttatttttcttttttgttttctgatttagtctttgtaggtaagaagttgttcattattgacagagacaaaacattctaatgagtgatggaatttttactctccatctaaatatcacgttaatatctaacacaaaacattattgtcctgtttcatatagaaactgcaagtttattttgtttgaaacatggggaaataaactcccgttttgaccttctctttgttgttctagctgtgtgtcattgacactggcgtgacttgccatgggaaggtgtaatgaggcaagactgggattgtaacaattattaacctacaaatacgctatggcaaagtcaaggcaagccagagtgacacttctaaatatctcaggaaatagtactcatgtttgaattactcattttattagttcgttttgatgaatatgggagaaattaataactttttaatataaagagtaacctaatgtcattaattgggcatttcacatgggctgatagattgcccctccccacccccgcccctttggtggtaatttattgagctgggaaagcttgagttcggtgtagcatctggttttcagtgatatcctgctggtcttatccaattttccagctgggagcatgaggcacagggaggtcgaatgacttgcctaaaggtcacctggtagctcaactgggattataactcaaaatctttctgattttcccatcctttgctcactggaccacaaaactcccttgatcctgtcttctcaagcttgcctgagcaggaagcaaatgtttaggcctagaaaaaagaatcccaaattaagtactggccaaaatcatctttaaaaatgtgtgaaatttccattggtataactcttaagaaatacctcattttcattctaacacctgagaatatgtgtgaccatgggagtgttgtccctttccaaggggtcaccatgggaaagtccatacctatcactgtttggatgctgctttggccaaaacattttaggaactccaaaatttgatgcttgtggtagaatacaaccacttgaatatataatggaccttgctcatattatactcagaaacagggcacttgactccaccaagtgctataaaccatctggctcatcctgtagtagaactcttaggcttgctcctccctcagcctgcaaattttccccgggatttcctcatggctggcaacttttcatcattcaggtcttagcagaaataataccttctcagagtgagacttgctctaacctcctgatgtaatggctttctttgtctgatggccccatttttttcttcattacatttatcagcatttacaattatcattgatttcatcttaaaaattcggtatgtcctaactctgagcgtaggagtctgatctgtcttgttttccagcatatcctagacaatgtttgatatataaaagaagctcaataaacactttttgaaagaatggatagccattcctggtaaaagaaggtctctcttct

SEQ ID NO: 607 - DNA, 2485 bp, Homo Sapiens
acagcccaaagtttaagccataaggagtgtatttgagaattcttagttggcttcacagtagtttttgaggtctttttagcatatagccactaatgaagctctttaatggcctatggctacatcatgtctttgtcacactttgtattcctgggactctactctgaacatgtgtcagcagcaaacaattctcttgttctacccattactaaagttaggaaataacttttagggatgaccttcaagacaataaccacttgttggaagtggaagtcatgagcttgtccagtggtacagaacatttttctctcattgagagttttgaaaatctgttgcctttatgtacaatagagattataggtacaatagagagaagaatggcatgcatctcaagcttcaatctcaagaatttatctggcattagtgagcagtacaatcttatcttctctttaattttgtcttttttgaactaacttctctcattgtttgataaattatatggtttgattgtgtatgtcacatgaaaatatatttgaaagatatttagattcctctttggaattaagtaaaagaagcatttggctataaacatgtggtaactgggtctgaggtcatgtacatacattcttttctagttgcagccaaaatcaggtttgggggtttctgatgagctcttttgtggttattgttattaaagaaaaatggatctttctgctgcatgcttagaaaaccagatattatcaccacttgattatttacttactggtacagcttgtttcacttattaaagaaaagacaaggttgaaattggatctattcaatgcatgttcgtggctttatgtgtctgtagataataagcagccttgggtgtttgttcagggttgactttctaggctataattggcatcattttgatttttctttggatgagcccacatcgttatggagtctgtagctttaaataagaaaacacctacaaaaatgagaggggcaaaatgttccctttggaagcagtaggggagggggcaggaaggggaggcttttgttcactcatggaaaatggacgtgtgtctcatggtagccgcagtttaagtaaacataaactctgaaccagagatcatacccgccatttcctcagcactagcaataccaaaccaaaatatagttttatttggctaaccccaaagtaggatgtgggtgccagccttgaaaaccacatgatcgggtttccagcagacaccaccagggctatgcttttgtcttaagcaagaaagtcacaaaggcaatactccttgtagtaccatcattatgtttagcaaacagatgcaaccataacaacagttaacttcagagacaacagttcactacagaaaaaggtcaagagggtcttttactcttcatgcgtagaatctgagctatcccatattacaactctattgagagaagaggcattaaaagagagacaatgagaacctagggcataggctcaggtagtggggctgggtggggaaagaatcctcccatcttcttatgagttctagagtcggccaatctggaatccatgtttagaagcatcaccttgacttctgtggaaagtcgttttttccaaacagtaatccagcaatgagcaaagcattaaattgtgattttgacatgtcctcattttgtcttttctcttataaagaagattcttcagggcccagggtcattccagtcatcccaagttcggtaagcatccagtcagggcttgctgtttcagaggttttcatggtgtggtttcatttatttatttaccatgaagctgttgtttttctcccttctctggagccagggagggaggggcagatgatagagttgggtgccctgagttaatgactagccctatattcacaagctcatttacttttgtcctcacctggcgcctcaatgctgccaatgagtgggaattaattttattgagggccactcagttccttaaaagaaaactgctcacttggctggaaatgctttgacagaaggtagagcagccggtcacatttgaacactgtgtcttctagatttgggggcagagggggagtggcagattcagagggagaggggaccaagcagtcatttcacatgagctattatggggtggccggaatcccagcagagtccatcaacagactctcgtgctaaagacacagcctgttgtctctttatctgccactccccactaaatctgtgcatgaccccccagcacccttctcaacaatcagctgcccgtaagaaggtaatcatcttatggtgaattggagaagaagaaaagacactctaggaaaatgttatgataatagaaaactcttcagtgttgtaaccatctggtgtgctacggtgacaaagaagccgataattgagtgcccaataacttcttttggcctgagataatgggcactcaccctgatttgtgttcttcacaagagtaattcgccatcatttcacaccacat

SEQ ID NO: 608 - DNA, 2485 bp, Homo Sapiens
tgaagtccctaatctcccctaaagcacattcttgtggagaaggacagactacaaagaagtgaacacataaacaagatataatatagcacaaacatttaggaaaacaaaaatgcagtaatgtgataaatcttagtaggctattatatacactttatgtatatatataatacaggcttatatatataatataggcatatatatattctctattattaacttaatttagtgacaaaccattaagcttcacctttccattagatgctttttctgcctaaaggactctacacttagatggctgcatgaagtatctgggtctcagttaaatgtcagttcttcattgaagccttccctgatgagccagtttataatagcctactaagatctatcacattactggattttagcttttctgaatatttttgctatattatagtgtctgtttatttatgtgttcacttctttgtcatctgtccttctccaaaagaatgtgctagggacttcatgcttctcattcattgatgtatccccagaatgaccagtgcctggcacatggtaatttcagttacaatttcttcaaccaatggttcattcttgcttctcatggatacaacatcattttatctgaaaaaaataagtacccccagtccatgactatttttgagcaaatgaggatagtaacagtataagatttttagtggcattttcaatgaaagaattatacaacaatccctgattactctttgtctttatgtgtccataattttactgctaacactaagagagtgtatcttgctgttatcaactctggccacatcttcacaagtacatatagcaggtcactattttgttttacaaacagaagttgattaagttgtccattctgtaggacccacaacaaaccacagcccaatatagcagcagaatgtaaggatttagaaggcctaaaatctacaagctcaggaagacacccaattaacagaaattaaagttcaaatctgactcatccacctactggaaattctgggctgtcaaacaatatccaagcttattttgcaatcagattaaagctctgggccttgtgggggccggagattggaattctattttaaaaagaaacgtgtaaggcactctgcttcccatcaagaagtgtaatgagtaggtttcacctatgatccccagtcccaaatgattgaactggcattagtgccaaaaaaattgaaaatgtcttaacatgcattaatcgcttaatggatgtgttgtctgcctgaaaagggcggggtggtatttaggttgcttaatgactttacattttcccatggcaaaatacttgtgatttgattatgctgtaattaaagagttacataaacaatatctttggaaaggaacaaacgggcttccttgaaagagggattttggtcagctccagctggtatctcaggccccttcatgaggagaaaactctcacccccaggtaaactcctctctctgcctcttagaagttgcccttagttttatgcctgcctgtgtgtgtgttgtgagtgtagatcatgggagatggggagtgggcagagggaggattttttaaaaaataaatgacatctttaatagacaattttaaaacaggttgaaatacaagtaataaagacaagcactttaaatttagaaaaggcttgggatcttgaagccaaaaagcctagtaatgagaaaccccaagggcagagtgggatctgtcttgtaaaaccagtcgatcaaatgtttattactgtataaggaagaacctttgaactcatgtggtttgctctcatgtgtcccagaaactatttcctccaggagcacagattctaagtttcttaaccataggtttctcgcaacttttggcagtcaagagaggtctttagcagggaaggtgggcattccaccttccaaagaaagcacaccagtcaggataatttagaaagaaacccagaggtttggcctcaggtttacattgaatctttatctttgggtattaggagcgcttttcttttcaagtccctactgcaatccctgcttattatacagttacaagaaaggtgggaaccaatgagaataaatgtcaaattatttaactatagttaactttcacagtacattttcttttaatttcctagatttcaatctttttcatgttgtaatctttgctacatttggcaatgagtcattcatcatgttcactgatccaagtttcccaccaataatttacaacctattcttaaataaaaataaacatcaactgcaactttatttttctttagacattttcacctcctcagctttcaaatattagaaactaaatcctatgagcctttcatttactaaatagcttaagccagcaaactgagctgaaatcaacttgcttttccattagacatattggcaatttttctaaagctggaatgagagaagaggtctggggtttggggagtttgccttagaggctgtggta

SEQ ID NO: 609 - DNA, 2432 bp, Homo Sapiens
tcaaagtggaagagtccttagggagaagctcttggaactgccctcagtgaaaccaacacaaacatgtatgatgtttgattgcctgagtcctcatgtgaacacatccaaacatatcacaacacacacttaacacacaggccactcatatacacacaaaatatacaccacatcccccacatcacacacccctgtcatccactgcccctcccatatcaaacatctccggtaagcatgtcaatgggctcattcactctgtagatgaatgagggttaagtttgtaatgggctttctgtgcccccagaaaatttgtaatttaactgggggacacacattgcctgatgaactttgaaatttgaggtgtcatgtcccagtctccttccaagtccccccaaagctgattatttaggcactgacataccctgtccacctacaaagccactcttgagtaagggaggaatcaaggtggaagaaagccctcaaaacccctttgcccaggggaaaattttgtttaaggcactgactattaactcagacctcagtaaaagccctaaggggacagtgattcttctgcccaagtgcaacacgtgctgtcagtgcctacccacatcccaagtccttatctgtcagtgaacagaagctcaactttcaaagcccaggatctgcatttcttggcctgagggctttctctagactaagaaggcttctttgcctgcttctgtaccaagctagtagttgacaccaccaacaagcaactctcttcctgtgactgacagcgaggcatgctctgcacgggtcttctagaattccccatcgggattgagccccagttgtctacagtggtgactggcttgagcaaatactcttcattgactgcattcttttctctggctcactttcccatacccctaccaatgctttctgggattacctctcagataatctatctgcactgaaattcttactcggggtcagcctctatagaacccctactaagacaccaggaaagggggaagtcctctgcaagcatacgtgacaaaagaaagacaaagttcagtttgtcaaaagggaccagagtcacaaatatgtttacaaaaactctgtcctgttacctatacttgatttacaatgaccacttgggaaatttgcctctttgctggggtagggacctgactgaccatgtaaaggggaaacagatgcactcagcctgcggcctcacacatctgctggatgagcaacgactataatttgccaggaggagacaataaaaaaattcacataaaactttttattgtgtaagtgacactggttattgtagtcggcaatcagaaagttaccccgaggacagaacttttctgcctattaatgtagagaaaatggctagcctgcttcccacgtctcagaatataacactggagatgctaggattcattccagaggagttatgataccagcaaaatacaaaaaggatgtagcaaatgtgtgttacagtaaagatcataaaataaaatccaagcatttcagagctcttggggcaaattgaatccatgggaattgaaaaataaatggcttgaaaaaaagtatgctctttttacagagaacaggaaaataatatatttctcctttttatgaagagtaagctcttctggccccaaaactgtaactgagatatttcctaacatataaaaacattattttataaggactcacccacagttttggtatttgtaatcaggttttagtctaaaggtttccttttcagcgtggacagatgccaacacaggaatacaatttgtaaataatgagagtaatcagtatcctcctctatttgcccccatcatccaacctcccgtttgatactgacgctccctcctgcagattcagcctctgtgggagcagccagggtgccagcgtcttcacctactccataccctccattccaacacagctctagaaggctctgcattcaccgcagggtgtgggagagcttgggatgatgaaggggtcagttttacaacattagcatcatcaataaaccttaaatatttgaggaaaggggtctattctgaggtatcttttagcccaacccaagcgctataacaaagactagcatttgcatctgcttttataccccaagtcttgatatttaacaaaattaaaaaaaaaatagtgctcatatcacaacctaatgcatgttagtggaggggcaaagggacctagtttatgcagtcacacagggatctaggctgcccctgtatattggttctacaatgtcctaggacataggtcagcaagcattatgtttaaagagccagagagtaaatattttcagatttgtgaggcatatagtctctgtttcaactactgccactatagtgtgaaagcctccataaataatacatgaacaaacggccatagctgcatagcaataaaac

SEQ ID NO: 610 - DNA, 2411 bp, Homo Sapiens
agagttcttccagaggtagcacttgaataatcatgtcatcaaatgtcatcgtggtagcagagaataagcatgctaacttttcccagtcctccagaaaaaggatacttttgtctttccttttccaatttcttttacccatttgggagagtatgccacaaatgtggtttttaaatatatgaaccgatgcttttatcctaatagttaagaacatggcctttagaatcacacagagctgaattcacatctagcttcaccacttactaggcatgaccgttggcaagttaacttcttgggattcagccctcttttccgtaacatgagggtaacgtagtcacaatatttcaaggaagttttggggactaaatgagaaaacgtgagcttgaaaaagtggggcatattttttatgttctctgtggtctcttccaattctgtaactctgtaataggattcaacaaacatttcttgtggacttgtaatgtggccttatcttgcatgatcctcagagtaaccctatggagttaaaccatcccaaaccttagcaacttgaaacaacaaacttctatcatttttcaaaattctgcagatgagttggttggttcttctcatctgagctggcttggccaggctctctcatgcatctgtgatgaaacggaggaacagctgttggctggctgttctaggatggccacaatcacacatctggtagttggatggctatcagtgctgcaggatgactagcaggtgttctcctcctcccgcaggctagcctgggctggtggttcactttgtggtcacaagagagtgagaaaaagtgtgcaacaccccttgaagcctaagttcagaactgacacatgttcatttctgccacatttgattagtcaaagcaagtcccaggccagcccaggtatagcaggcgaggaactagactccaccccttgatgagaggagctgtaaagtcatgtgcaagcctaggaagactccgtggccattttagcagtcgattaggctactcagccagttttctggagccacacatgtgggctggccttcccaagtcttctccgcccaaaaagccagacagagtttgtttttccagcagggcgcatatcgcaggcctgggtgggttgtttgtttttgtgtttgttttgacttttagctatttccaggatgtttctttcatggaggagaacgactcagttctgtctgccatgtgtattaagatgagctacaagagagcattgctttcttgtaatgcaagaaatgcaatgtagtcagaggctctgaaatctggtggggacagcggcagcagagactgtgacagcctcgggacacaggaggccaccttggtcttcagtcttaggtgcctggagctaccagacagccaaagttgcacaaggcacaggcatgacctgccaggttgcccagccaggccagggatgacagggcacgttcacctcaccagctaatcagagacaatccccgcctgaggaatgagcggaactcccagccctcagatgacgctgggcttgagttttctctgctagcacatttggagatttcacaagagccataaaagtttgcaaagggccttggagtgcctcattcaatgaaatcacaccctcccttctggactgggttaaggaggggtcacacacacccgacagggtgcctccagatgggggtgtgtagaggatgggtccttatccagctccggtcacttctcaccccttccaaaaacccactgtgggccaggacaaggagaaacaagagatcgtgactggcagagatataggaaggaatgtcccaaaaagagcaaaaaacttgctctcatgtactttgctgactgagcctctgggaatggagccttctcctgaggaaataccacaacatggctcagaggcggaaggctccgagaagggtcctggcaagtaggggaaaatgtcccttcaacggcctctctgacctcaggcagagccccactcagtgacattcctgggtgagtgggcaaaatgagaaattcctcctacaattctctctgcccacagaaggtattaaatgaggtccggcaagaggccaggatcaggtaagtctagaggccagaaacctcagccaggcctacccagcactcaggaagagcagaggctcagcagcccctgagggaggcacagcttggctcttggaaaatggccctactgggcctcattctccaggtacttggtttttggctctagagacaatgctgagttcagttctcacccatgtgaaagttttcaaatccaaaagccagggagacgcctcacaccatacccagacagagggacaaggaataaaactcacccacttcctttctatgcgtttctccctgcaggctgcggttccaccgcttccaggcggctggatggggccgcccc

SEQ ID NO: 611 - DNA, 2457 bp, Homo Sapiens
aatgccaaagggactccaacagtgattcacgtttggaaacagcccgcgggaatctgtgctgactcatcggaggacccagtggaacatggcagctccaaggcagagccagcctgaaaccctgtgaacatgctttaggacaaccagacggtcagagcgagatggggtcagggtgggggacaccctgagccaaggagccagtgacttccagaagagtgaggagaaaattcaaggctttcctcatgaaagggggcagagccgggacaacattcaaggaggccagggggatgttgagggggcctggctggagggcctggcaggtgcatggagagccccttcccagacaaagacctgggcccagtccctgagaagcactgaggcacccaccaggctggaagcagagcccttcccgcccccgccccggccacatccacagtttgctggcatttgctggcctccacctcaggcccagctgagtcaaggaattccaaggaacagccacctcttcccatgcccatcaaggcgaccttccatggtttccgtgggacgtttggtcacactgggctcagaaatctgcactctgtaaactcaccggtttctccgtgactggggtttccctttgtgcctcagtgttcctttgggaaatgttcaacctttttttggcctagttaaggagaaaggaatttttccagactcagtcagagatgttggctcagcttgattgggagggaagggtgattttaataaggccgggggtggtagtggggacaatgtgtgacccccccgggaagtgggaccgcacacggtaccggggtgggcagttctggctcctcctgacctggctgtccctccccagtgccatgagttttgagcctggttgccttggtgacccgttttcagtccttattcacctcctaaccatctcatgttctctcgagcctccttccatccccagcacagtccacacacaatgtaagtgctcaaaagtcgaactgtagcactgagttgaggggtggtcagccccggtgagccctggtgtctcatcatggtttccccatggctgtctccacccctcttccagaaaagctattgagaaatggaactctttgacatcacccctagctaaagttgctgaaaacagctcagaggagtgaattccacagagccctatgccccgcctagattcctggggcttcttgtctcatggagtctgcagagccgcgtccagacccctcatcctggaccgctacccggcatcggcctcctccacgtagtcttcttgctcccactgcaatctgactttctgccaaaccatttccctcctggcttcaaacttttgtcgggaaagagatgaaatcagcacttggagagctggaaagggaaaaacagctgcttttcacaaaatgggctagggagggggaagcggagcagcacagctggatcttggtgggaaagccagagtctggtgggaacgtacagctcacagcaggagagacaaacacacaaacctagaggggcccagcggcagcagctcaggggcttgcttgccaatggcaccttgtgccgtattcttcagatacagtcacatctcatatccacattaaccatcctagggctgtagagattttctccattttagagaggtaggcacaaaaaaaaaaaaaagatttctctttccccttagttctcctataagaataattatagtgcgtgtgcttgggacaaatagagagtggtggggcctgtggcatcaaggccgccaggtaaaattgctcaggttgggcggactctgtggcatcttgcaactgtggccgtgtggctatgtgggcctctgataacaactatgatttttcaagaggagccagggatctggatttttatttaaaaattacctgagatttaaacattggcaactaattcagaagctttacggtattgagcagtcagtagtacactgtgggccaagcaaaacatgtctgtgggtagagttggggctgagggctggagtttgagtcctcctttatgggtgagaactgacacatgtaccccagccaggagcaggcattgtcagcactctacccatcccccaaatcccttcctcccttttttgtttccgtgacccctccagctccgaagggctttcacttcctgcagtatgcacctgacttacctcatggtataacctgtttcttaccattccacttttcacctgccttcctcaatgataactctaacataatagtacataatagttgttttttgtttggttggttttttgttttttttgttttttttttgagacagagtctcactgtcgcccagcctggagtgcagtggtacgatctcagcttgctgcaacctccacctcccgggttcaagcaattctcctgcctcagcctcccaagtaactgggactaaggtgcccaccactacacccagctaattttttgtatttttagt

SEQ ID NO: 612 - DNA, 2446 bp, Homo Sapiens
catatgtgtggagagactgtgaactgtgaactacacttacgtaaccctgaactcgagtcttgctcacaagacccagctcatgttccctgcgctgcgaagcttcccaggaatggtccgtggttgttctgtctactgttgcatttgacacagggctctgccaaggtattcaccacatctgcttgtatatccatctccccactagactctgggcaagcctccaactttcaaattattattatttttttgagacagtgacttgctctgttgcccaggctggagtgcaacactggtgccaacatggctcactgcagcctcgaactcctggactctagtgatcctcccacctcagcctcttatgtagctgggactgtaggcatgtgctactatgcctggctgattttaacagtttttgtagagacaggggtcttgcaattttgcctaggctggtctcgaacttttgacctcaagtgatccacccaactcagccttccaaagtgctgagattacatgcatgagccaccgtgcccggcctaaacctcccattttatgtttcctctgcccctggtctaactcagtgcctggtatgtggcagacacacaggtcagtgttacaaatgaccataccctcacactcgctgttccaaatgatggcttcttactaagaacctgagaatttctgcctgcgggttttgtctgggtgcggatcaggccaaagttccatggagttaacaccctggggcaacacttaagcaatgaaaaccagcagttagtggatgaatagcccagcacgggacaaccctggggcaggttctgcacagtcacctggccagacccagcagcactgagccctggctgtccacagcagtgactgctcataaccactctgccttctctttcagtctcacttcccctctaccatctcacgctttctgggtcaaagaaactactatcttggggtctgcttctgctggagctcaaaccaagacaactggctagttggctgattggctgtgtgaatgggcacgattagcagcaaagaaagaaatggaagcccgcgcgccggctgggccctggcacatgcgctgcccccacagtgtgtctagactacgtcggggcacgtgcacagccaacagatccgacacaggaaaaagcacttctcagctgtccccaccatcctgctatttgtcattccatccatctgctgtccccacgaaacgctcacccacgtcagctaaaatggtacactgggcttggaatcggctggggaaatgtcaggctgacagaacaggggggacaactgaaatagcaactgtgtggacggtggtggtgacacaaatctgcccctttgcgtagaaggcaggactcccagagctcaggaggcctcttgcggaggaattggtatgtggcgaaggctgcagggagggggccctgggactcaggggcagctagagcagggccctctgccctgagagctcttcaccccttcctcccagaatagaggagattgtccaaacatagaactcagtttgtttaaagtcattgtttatttttaaatgttcagttcgttttccaatcaatcttccacggtgcagttcaagaaaaatgtgtggattttcatgcctgaggtcagttgcaggatgtacctcgcagaacagcgtgtgcccctgcaagctggggattgagtgttttgttctgttttgttttctcagggtaaaggggtcattctaaaagcaggactgtttggatcttagaagattggatatttatttattatttaaatttttttcttttctttttttttttttttttgagatgaagtctcgctctgtcacccaggctggagtgcaatgggatgatctcagctcactgcaacctccgcctccccagttcaagcgattctcccgtctcagcctccccaaccagccgggattacaggcgtgcaccaccatgcctggctaatttttttgtatatttagtatagatggggtttcattttgttggccaggctggtctcgaacgtttgacctcaagtgatccactcacctcggcctcccaaagtgctaggattacaggcatgacccaccgtgccgggcctattttttttttaatttattttagagagaaggtctccctatgttgcccaggccgttctcatactcctgggctcaaatgatctgcccacgttggcctccaaaagtgctaagattacaggtgtgagccaccgcgcctggccatggatacttatacattctttctacaaatatttattgagtgcctgtgttgatctaggcactgtcttgagctccaggaagaaagcagtgagcaaattcaacaaaattccccacctcttcgagattacagacctgtgggagggctggacagtaaacaaatatatgtacaaatgtcaggagattttaagtgtgaagaaaagcacaggggccaggtgt

SEQ ID NO: 613 - DNA, 2476 bp, Homo Sapiens
agatccttgctcactcactgatatgcacttctcagctatagattcatgcttttccacttgttgaaacgtccctaaatatcgccctcaatgtcctgtttgtgtcgctggctctctgccactcagctaataatgaaacagcctcagtgaacctgcagcagcagctgccttagcttcagtgcctacccacccctgcagctgaaccactttgaatattccttgatggtgcaagagacagtctcactattcccttcactggccttcctctgtgtccgtcacggttggcatgagctacctcctgtgcatgttatggcgagaagggatgaatgaggaaagacagggtggttttatacttgatcctgggacagtcactgggtaaggaagggtttggggttgctcccccaggcccccctcaatgcgtgaaggcctgagccaggtcagctggcagaggtgtgtgtatgtttaacttagaactgaatgttgaaggctttgtgacccaaagggaagaattattgggatctgatgccctagcaggggaaattccaagcccaaaaagctacagttagaattcagaactgtgttgttaccctgcctctgagttttcctctacgttcagctccccttttgtggatgatcgtgaagctgtttacatgttgtcctcttccgtgaactgatccctgtaaacagtgacaggattttatccaaatatttctgatttctaagggaaaaatagagcaatttcttcccagtgcccttctgttgaccttgcctgggggagaggccagcagagctaaggatgacctcacccccttccagcaggatttcctgggatgtacagaacctccttcttcagctgtccctctgtgatcagccacattcaatctataaacttccagtgcagatgatggggacatctaatattgggtctgttcacatttcagcaggaggtgaaacacacaaagtaatcattaggcttcctgaagtcccaaggaccttctacgtcagtggcagaggtgggaggtgggctggcgaggtggggcagtctaggaactgcgctggtggggacaggaaattgggctgaagggagatgtaaggccttggtgggaaataaatggcactgtgttgttgacggaaaaagatcttggcaggactgttgttgtgagtgttctgtggcttagaaaggaatttcctacaggctggactaaccattaaaaatgtctctaccttcaggagtccccggcgtgcagtggagcctcgctgggggaaatgacagcttggaccatgggcgcccgcggtctggacaagcgaggaagtttctttaaggtaaaaggaagccttgattgggatctcaactcgtcggcttgctgcctgagcctgggagctgcggtgctccatggagctgctgagggaagtctgctctctgagccagcaccggctaagggagcttgcccgagcccagctgctgattgttaccagggcttataacaggttgcggggtctgtgatttagtgctttcatacaggcacaggactcgggcacggagaggggccgtgctgtgcaagacggctgaggctgtctttatttgagagctgctcagtttgtcctttttcagctgcagggttttatggtggaagctgtactttgctttccagtgaatcaatgctgtcgtccatgtgttctctccttggcttgtttgtatgaatcactgaagggctccaaaacaaacaaacaaacaaacaaacaaacaaaaaacagcttcctggaccgcaccttagaatgatgaaatattattttctggtatattttatcaaacatccccaaaggcttcttatgataatgaggaagcatgattataactgtctaactcttctgtgttcatattgatgttaatgggactaaattaccttgctagcttaatgagataagattttaaatgggtgttttatgtactctgtgtgtgtgtatttaatgaagacttggtggtcgcttctgatttacacttgggaatcaattcccctcttgtggctttttgctttgtttcctttcattcaccctcgaattaaggcatcctcagtatagaaaattttgaaaatacagaattatgtttaaaaaggtagaaaaatggaggtaaaatatgcacttgaaatctgtcataggcagtgttccaacaccaggtcttgtcctcagaggaggaagacggaggagattttattaccgaggacaagtgactatgtttaacaattaaccaacctttatgggttggaagtatctattaacacttatttacatgtttcctgtttccaagagaccaaaactgatatattgtgtcaactgttgactctacaaaaaaaaaaaaaaaaaaaaaaaaccatcagaagaacctgctgataaagcaaagttcatgagatttactgaaataaggaagaacatcaccaggacacagtcttattcatgtctaagccaggggagattaagaggc

SEQ ID NO: 614 - DNA, 2463 bp, Homo Sapiens
gtgatttgcttgtagaaacaattttgaaagccccttgaggaaaataaaaatcaagaagaacacttttctcccttttccatacaaattaaaacttaacagcatcaaattattgggaccagaaaccaagtaatgtataatgtggcttttgttgagttaaataagatgctatataatggagaagaatttgaaaatgcacaaaaaaatcaatctacattatcagaacctgcagtgaaattaaacttatgttaaataaaaccagtttgcaggtgcacaaactatgagggtcttgtatccacgtaacacaggtagttacaaaaacatgttattgtactgtgtaaagatgcatagtcatctcatttggttggctttgtaccttgtaccttttttagccttggcttttgttgaactagaaccctcagcacatactgtgttgtacttttgtaaatgattttttaaatggaattttgcacataatacattgtaatactgtatgataatcatgtgtgaaaataatttttgaaatatcctttggctgtttttttttttctttagagtaagaatatattcatgcaccacgcagtgtcatggacagatgaaatccgaaccagggtttgtggttagacaatgtatcgtgggggtgagcagaaaagctcacatttctcagaagctcctcctgatatggggcaaaagttaaggagcagaaggaaaagatcatcctcccacctgaaagtgttttcattgttatctagtgctgtacttggctcagtgggacttagagcaaatcacaggtaatttgaacccggagttagctggggtcctgcagacagccccaccctgtcctcacgtaacctctgcaatgccctgggtgacagttcagtgctgttgcaaaattgatagcgcagaggcttggactcctcgctgccatactccccatgcttggaagggtgcctggcatatattaatagtaagtgctcaataaatccttgctggctgaaggaaggaaaacatgagtttagaagggtttctaactcatcagtgggagagatccgtaaagatcagaatgagaattgaatgggctgcctgcttttgatatttacaacggaccaaaagatgacagctcaatccatatggttgtcctcccaactcttcaaactaagatcatcatgctttgttgatttaaagcaggtcacagcctctggatgcgaggcagccttgcagccttcggtgggacgagagcgggctcagaagaggaaaaggtagcgtgggcagaaagcaacatcacaagacggtccctggttttgtcattgggcaatgtttccccgttaaaattacaacacaacatgtgcctccactttttcccccacgcaggcatttctcacttctcaaattgccaggaaacagacttgggtgaaggttggagggaataagaggagagtaaaaatatacatgctgggtggaggaagaggagaacgcatttccaaatttaaaaatacattatagctgaggtgggaggatcgcttgatcccaggagtttgagggtgcggggagctatgatcccgccactgcgttgcagcctggacgacagagcaaccctgtcttccccctacaaaaaagtaaaaataaaaacatgttataaaagttgaacgccggccaaaggaagggatttttttttttttttatgttgcatgcgctgccaaatactttcactctagtaccacccccacacccccgggacacagaatagaaatagaaactgttgaagtagttcatattatgtggaggttacaacttcagatctataagaaaatacaaaggacaggaaacccagctatgaatgcttccattcacaaatgcggttccgtcctcattgggcagctgttaccttcatcttctttaagagacttgaaatgaggcagcgctccaatctttaacgcctgctcatgccgtcatgcctggtcacacctagtcactcctggtctcctaccagcagtctcagagaaacagaaacagcacaagaaggactccgaagggcacagtgtgtgtggaacacaggcattttaatcatctggcagtatctgatagtaaaattctaagtgtcctcattttttcggcccattttcatgatggtgaattagagaccaaaagtactttttgtcatttggttaactctaattcagttggaaatatgggaaagaaatcgcctaacattgcaaaatcctaaatacgtgataaggaaaggaaggaaagaaggcagagaggggccaggcgcggtggctcatgcctgtaatcccagtactttgggaggccaaggtgggtgaatcacttgaggtcaggagttcaagactagcctggccaacatgtgaaaccccatctctactaaaaatacaaaaattagccgggcatggtggcaggcacctgtaatcccagctactcgggaagctgaggcaggagaatcccttgaag

SEQ ID NO: 615 - DNA, 2483 bp, Homo Sapiens
gaaggaatggcatggggtggaaaagccctcctcctccttcagggctgggccctctccctgctgtcccctgctctcccctgcaggtttgtcctctctcctccacactgctgctgtctatatatcacctggccagagtcacctggctttcttccttctttccagataggccactgtcttttgatacaggtgtcccaatcacctgtgtgccttgccatggacccgagcttgccattttcatggtaaaagttgatgtgtagatctaagggattatgtagaacctttgcaccatcagcgtcagaaaatagctcagatttacagaaatggatcggtaagccaaacatcttcttgtagaagctattgatagctttgttttttctattttgtacatatatagtcacccattggtatatgttggggattggccagggcacacacatatacccaaatctgcacaccttgagtcccacagtcagccctgctgtgttatacgaaaaatctgtgttatatgaaaacttgaccctccatatataagtgggtttcatatccctcgaatgctgtattttcaatccttgtttggttgaaaaaaaatctgcatgtaagtgtaactgtgtagttcaaagctgtgttattcaagggtcaatggatatatatatacttttctcctaattgaagaaaagtttatttttagtggctagtttctattttgtgatgtgatatcattttagtattgcttgctacttctttgaacatcattaaattgatttaaaatattttcttaatttgcttaactaagaagttggaatttaaaaaattttattaggagtgcctcgtgtgccttttgtaacatctagtttgtcatgaagccaattagctgtgttatagtcgaatgccagcaaaagaatgccaagctgtaaaaggagatcagaagcacattttgtgacccatttcttggtaggtggcattgcttgtttgaaattatacatcagtgttattacacatagccaagagggttcttagaatggattatcttactgttttttttttatctaagaattttatctcctgacacagatggatgcagggatgggagccggggtagcctgggagatggaacctggcggtccaggtgttgaagggtcgagatagacccaggatggccaatgacaggaaacccatctggctgtttaaatacggtgctaggcaactagcagtcacccaggcaaccgatggggctggggaagtccagcaagaggtgacagcgggtcctgatgacaggactgacttgccctcggaggcaggccatggaagcaggcactattcagagacgcaggcaggtggctggccttggggacgtctgtcagctgcagggatgggacgccaggccttgggaagagcaagagcaagacagcattccaggaccagggcaactggagcccgtggatgttgtcaagaaggaggtgggcactggggaaagagatgcaggagcgagtaggtggtccaggatgccaggtccggcaggattccaagagcaagcagaccccggggcagctgaagggtcaagaactgtggtgctgtgaagtggttctcaggacttcttaggtttctctctcaggaaggcctaccaaagggtcctaggtgtgaaaacagcggaccatggaagtgggaacaggacgggatattttcaagttgggagtccctggttagaagttattggattggaaactatggagggtttttcttggaagggattgttattccacagtctgtgtgtgtgcccggggtgtgtgtgcaagtgagagtgtgtgtacaggcatgtgagtatacacaggccaatgtgcagggttgtgagtgtgtagagttgtaagtgtgtccatatgtgagtgtgtacggagttgtgagcatgtgctggtgtgtgagtgtgtgcaggtatgtgattgtacatatacatgtgaaatactggctgggaagtccctcttaagtggccagaagatggaatgctgctaccctagcaataaccttgtgtgcgaggtctaagcgtgggctgtgtttataaggcagggattggagtaccactttcattttctcagaaggtgcccgcctatgtttaatttccacctatcagatgggcagactgataagtgagctttgacacaataactcccctcgccctgaacagagagcgccagaaaaggaagccagaagaggcttcaggttgcttttaccctgctggggcctctgcctgggcttctgtaacactaggagagtgagggtctccattcttcagaaaatgtggcctggactggggagagaaatagggtcatgaccgtcggagagacagggctgaagcaaagtcagaactttgagtgacctcagactcaagattgtcccttctgtggccttgcaagcagtgaaggccgcagagaagaccacagccactcactctccttctgttcggatttctcctgctggggcccatgcagcag

SEQ ID NO: 616 - DNA, 2493 bp, Homo Sapiens
gcggccccaccctcctagctccggccccgcggccaccgcgcagccccagcggagggggcagctcccccgcgccgcgcgcgctctgtttgttttccttgccggactgacgtgagtcaaaatattggccatatgttcagcggtaataaattgggtatgagcgcaaacacacttgggcttcgatggctctttcagctgccacatggtaggctttgcggggagggggcttccaccccgcctcggccccctgcccccaaacgcgcgggtagattccctccctcctgcgcccctctgagcaggagatctgggaccccaggtttctcctgaccctcgcccctcctccgtccccagcagtgccttggactccgcagctcctggcgagcccggactgctggttaacaaggtcgccatctataaattgctcggtcgctaagacgccataaaaccaaagggccagatgtggcacgttatttatgtgtgaaaccgcgtttacactagatacgcggatccaaggccgatagcacgacttcgcgggaggtcacagacctctcgccccggctccaggctcctcccccagcacgatctcctctccaggttgaggggtgtcggtcttgccgggaaagggattcacccctgcagcccaggaggaaagtgatttcagtgcgcttgtgccaaaatgccacctgtccaggattaaaggcagtctctggggtttatttccgtagctttcctctttcccctgctcttggcttccttttattacgggcccctgggaggctgttttattttccaggcagttgatacgtttcatgggacctagatctgacacagcaagggtagtgtgctagagatgcccaactctgtgggtgggcgggatttgagggtggggtctcctgagccctgagggaaggattttgggaagcggagcagttcacctggctgagggagcacctgaaattattcttgcctcgggcggtggtcgactccagtgtcgcatgtcacctgccttatttaacttgaggggcagccggagcactgggagaggcagccctggcctcggaatatggaatccggtggccctgggtgctgcaggaaagggaagtaaatactctgttctaatagaaaacaatcgttttgctttccttcttcagaaggcggccttaggactgcatgtccccaaactggtcacctcgcactttactcacatgaattcattaacagtcattgtctctccattgccattattttactatttcttgaagtgaaccaaattctctctgtggttaataagcactgagccaggccccctaccttccttttcatcttcaaaacacctggggttccctgaatggcatcttccgtctggccaaggaaaataagagatgaaaaatgttgccctactgcagggaaaaacataagcatttcactttactattaccagttaccccaggtctgtgttcactagataactgtccttaggtggctgttaagggtggaaaaatgatgctgttgaaagagggtgggagagaaggggagaaccaacatgagctgggggtggggaggagagacccatttgataggggcaaaaagagctataaaatgaacctctgaacctgaagtgctgagcaggaacagtgactctctgggtttgctctcttgggctttagatgagctcctagaaagctttagttaactgcagaaaaacctgggactagcttcagggctacaggagtggttgatcttgggaaattacactgtttttcactcttttttcttggatttttacatctttatttatggttaaaaaccaaactatagggtctatttttgggtttacattacctccaagtggaagcgctgagattacagatcaattgcttctttgggtgaaaatattgcttcatgaccaaaattagacaaggggatttgaaggcaggccttcacatttgtagtcttcgtgggaatgggtgtctttgtctcacaagtgccctgtgaagaagctcatgctttcttcctgcatgtaccacagatatgtgctaggcagaggattgagacgcagacaaggagcttagaaagtcagtgtctggtgctcccagggtggaaaactgagagacacgaagcaaagagtatatcaaggcaggctttacatcattccctagttaggaaaacccattttaaaccagcaaatgtagcagggcatctactagttaactgataataaaaatccatgacaaagaagatgcagtggggagcaagcataaatgaaatacgactgcttagatacaactcctgtttcttctctttggccttattcagcaatccggtgctaaacttcatacactacatcctccaacctcaacagattgcatgctgttcttagttccaccatcttttatgctattcttacttcagaaacattcctgtcctactcatggactcaaaattcactgacttttcacactggaaaaaccttcctccacgaagctccccgcagac

SEQ ID NO: 617 - DNA, 2443 bp, Homo Sapiens
gaaacaaaaacaaaaaaccaaaaaaaaaaaaaaagaaaagaaaagaaatgaaagatggaattcttaagagctttgggtcaccaaaatgaaataaatatatgtccatgtcaccatcatgcaaaggcactcaagcctttgaaatatactccatttatttacttttcaagagtttgagctgaattcacttagaaaaccccatgttctgtcaatagactaggtttatgatgatgatttttaaacccagtaacctatacattcctcactgccactgccttatgcatgggtggtcactgtattactcccattttgcagatgagggagtggaggtgccaggttgttaatgagctggtcagggactgctggaagtaagtgtcaggagtgagactggaacactgtatacccccacctggctgcctctctcccgcagaacgtgtagattgaaataaaatgagcctgacaggggtttcacccagttccggaccattgcttctccctgcagagctagctttgatgagggccacctccataggaaagaaatcagcagaggaatcagctctggattctcaagaagccaaggtgtattataataattctgctttcaaaacccctgggacaggctaagtagcccacccaccaaatgcacacagaatgaccgtcatctgtccagcagatgagacgcctgggaggtcaagagaggaaactgaagcccatgtggaggcttgtggctcacagtagcctcagccaccaggcctccctcccttccttgaaagctgcagagatgtgcatgcctgcagcctgttgagaaatctggtctcgggccagccaatctgaactccactcacacacacttttctaaggtgtgagctgagaaggggcccccagatgtagatgtctaggaacaaatcccaggcagctggtgggatttgctctctggttactgctcatgcctcttccgtcttccccactcttgcatctactctgtttcagacacttggttttgtgcagcttctcccatgccagacaggaggcaacacccattggaagctgttggtgccgcagcgtgctggcctgggctgagatggtgtgaaaaccctgcccgtcccgctgtttcctaactctcccaggcagtgacagcctcttggcctgctccactggcaacgcctgccgtggggttccaccaattcatcatatctccaatgtgcagttgctgcaggcagtgcgatctcttggcgcttcgctgggctgccacatttggaattgatttgggactcaaaaaggctgtggatcgaggaaactctaaagcgttgttcccttctatttctggccacctatttctgagctgaggtagtgggatctggccaagttgagccaaagtgaaactgctgaaatcaagaaagatagtagccaacgtgacggcagtgggtggtgagaatcccctcctccctctcagtttcgtggactgtcagtccggacgcctgagtggggcctcgctaaccctgcctgctgctcttgctgccaggcctggcatccgttttccatctctatatgattgtttgccctgagcccagtgagtgctgtctgcatctctggctgccgcagacagcagcctgatttctcaagctggacattgctttgatttccccttggcctacagaccacaccacaattctccctcttctcataagcgcaagcatccctttgcagtatctaaaggttcctgacgcagtggaggtcctcaagattttcctccccttaagctggtgcaccgtcccctccccattccgctcttacgcctcaaatccaattgcatggacatcaccaactgcatgtcaaatggtgatgttagaaacgactttccgtaatgatccagaaaaagtcccatttttcacaaaggtttttttttctttctccatgacttagttttacatatgactattgtttgcaataaagatcaagttttgcaatccatcatgctcccttccgactcccctgtccccatggtactgtctcccgctccatgtccgagtaccctccctcctccctcagcccccaccctttggtgggctgtgccaacagtgtagcaagaggaatttctggaaggaggccaaatttggcttcggatcatttctcttcaacacacactggcctctgaaaaccagattctgtttgtcatttggtttgctctcccagcgttgtgtcattccgatggtaatgctgatggatttcaagcttgcctcgtagagtaacgcacaaggttttcataagcacattaatcttaaaagaaaaactgtcagatgcaaacaatacccatatgactgatgttgtaaagacacaaactaactcttaacatccattcccaaggaatattatcttacaggggcctgatgttgcctttaactctcttccaacataggtacttgtgttgcaggattttgtggcacgt

SEQ ID NO: 618 - DNA, 2469 bp, Homo Sapiens
caaatcttgcctgccacttgttttgtaaataaagttttattggaatatatgcatgctcatttgtttatgtactgttttcatgttgcagtggcagagttgagtagttctaacatagactgtatggcttccaaagcctaaaatatttactattttgctctttacaaaaaagtttgctgactcctgctctaagaagctttcaaatagatttatatctaaaatgcagcaatggccaaatttatagtaatgatttcttttgccaggaagatggaaggttttcttactgtaaaacatttgcagattttaatacttctctctgccatgccttgtttaacagacagataggcatggagaaggcaccatgtggcagtaagggaggtgggtgctaagggtgtatcacaacactgggaagcatattccttaacattaggagtttatgtgatttagctgaagagagaacacctgtattagttaaaagggaatatttagcagcatttaaacaaaagctatttcacatgtcactaagtatactataagaatttccagaaagaagtatcatcctttgtctaatagttcagaggatttctattagtaaatgaaaaatgacagcctcattttatcctccaaatatgtcaaaattatcttgagttgttgggtaccagaactgataggtgtcatgtatttaagcccatttgaaaaatacatttcaataatggagtgagactctgtctcaaaaaaatttcaaatgtcttttctcaattgaaaaaacctattatttctagatagataagtaaataacctttgcaaactcgagccacacttttcccctttcttttaaaattcagcttaatataattgaaaactgaagtctgactctccaagcctataagggataaaagagagacaggatagatagaaataactggcaacgaggagttactgggctttggctccatgggagacaatagtggtttcatagaaggcaatggtggactcttagtcaactgaagcttgggtggaacttagctgcataattaagaagctgaatctgttttattttatttttctataacataaagagtgtgaaaaggtcattttaatgttcagagagtggcttctcttggaaaatatccccgaacataccatggagcagtgtcaactgtagtataaaatgtcctagaaatcttgcaatttatgagtttaatggcacacctgaggattacgaggttttttccgtccactcataatagcccggtgactgatttagcagagaggaagcaaaatgaacaatcttgatcaccttttaacatttttcctgtcttgctgacttcagagctttaggggtacagcatttgcaggaattgtatgtctttttggcaatactttaaaatcaaactcaaaagatgaagaagaaaaatggttattagatagttataaatatgtcattatttgcaaatggtattgctttgtggatatgaagctcttcattgctcatctgtttttaagttcaacgatccacatataaaggtgtaaggacttattgacattgtgcttcctctctgttgacaccattagcccgagaactaaggacaatggatagctgtatataagttcaagttctgcatctacttcttagtttccctttccatccttcagttgtgtttgttttttttttgaaatctgtaaagtaggaataataataaagttactattctttgtagggttttgaaggattttcttgagataatgtaaagtaccaggcatataattagcctaaatgtaactcaaccgtgtttttttattttaatatacatgtcactacccatctctagtgcagagaatcaacagaatacaaataattttgaagattcatataatattcacacgttgcaaaatcttgtttgtggagccctcattgtagcctgtatgattcaaacgatgccacgtagtcctttaaacatttccagatattaaggaattttacactgttgtgtcactttttaaatgtctgcatttttctgtctctctctctctcaatctctctgaatttgtttatccagtgaataaaattaggaagaagtggatgctgtaagaatatttatgtgtttaaaggttgtggttgccccattatagttacttaccagcagcttcagcacgcagtcagagactgtagaaaaaagaatcattcttttctctgatttgaggatgcatctccagagtgtttctggggtaatggatctaaaatcaaaattttaaatgctagtttttaagtgtgaatttttcttcagcacttttgttctctccttataaccttttatttcattgagttccagagagcagacagcttaggtttcttgatttggcagatcaatgaggaaggataactaaagaaagtttaaaggtatcttttataccaaaatacctcacttctctttcattgcaggtgtagttaaaagcactaatgccataccc

SEQ ID NO: 619 - DNA, 2442 bp, Homo Sapiens
agtttaacaatcatattttggctacaggccaaaacagtgcttataaacagttttataaaataagaagaaccttcctgtattcttcaaagtactaaacctgtgacttttttttcttttttctttttttgagacagggtgtcactctatcatccagtatggagtccagtggcgcaatcatggctcactgtagccttgacctcccaggctcaggagatcctcccacctcagcccccgggtagttgggattataggcgagcatcaacgtgtccagcaattttttttttgtatttttgtagagacaagttctcgtcatgttgcccaggcttgtctcaaacttgtgggctaaggtgatcctcctgcttcggactcccaaagcattgagattacagaggacagccactgagcctggccctacacctgtcttaatctcatttcagaaactctactgcctaaagcagatgtcaaaactcttcagcagaagcaatggttgtgataaagttttagagtagagagtcactaagcttgaaaaacaatagcaggttatatgaacttttgaagaaattagccgtttatttttttcaaggagagaagtagccaagaagctgaaaaaatatgaaagctatattgcccactccattgcaatttccaaattcccttctgggtataagccctctcagaggataactggaaaggccatatactcagtgcatgtaaagaactctggcttgtttttcattgcatcaggaatgaaagaaagacattatcggccagtgtgcagggttttctggggagaagctgagctgaagtgacttagcatgctttatgttgcctgattaatgtcaagcgagggggccactgagtgaaagttcatagcaatgccattttctgtaattgaaaatgctatgcaaaaaataaaatatgtcaacagttcctgctgcctgcctcatatcctggagagctgtgtacattttaagttatccctgcaacttaaaagaattgtaaccacagagattgtgaggggagcagctggtttgcaaagttgcttggggtaaacctgtcagagctcatgagtaaacacaatctgaaaacagaggctgctcgtggggaaatcagttgctttttcaacaaaataaaaggaagagttttgctcagggcaatgtgacgatgacgtgcaactgttctgcattaactacaacttttttttttgctttctcattgcccagttcccctttattctacagcaagaaattgaggttgtatattgcacactgggaatatctaaactggaaataattaaaatatatatttcatttatagtgggtcttatgtgaggagaagtaaagattgccacagcttcctgagtatatgagttaatgatgtgttctgcattttcttgattttccacattttaactgcctctgttcctcatttgggggtagggaactttgagaggcatggaatacagacttgcatgagcagaaacgtacagcttttgagcatgtgaggggatggcgtggagaaggttgggttcatcatgtggtttcttggcactatttttctccagtttctcccttcagtgtcaaagcaagcatgttatcaagaatgtttcaaaccagaaattggtttaagaccattgcagtatcctattaggttgtgtttttagaatatgatgaacaaatggatcttcaaaatgaagttccaaaaatgacagttaaaaaaggaatacagactcattgaaggaaaaaacctacaaaagactctgtgtgtgtgtgtgtgtgtgtgtgtgtatgtgtgtgtgtgtatgcatgtgtgggtgtgtgtgtgtgttgtaagtacattcaatatatatccatactgaatgaagtcattggtaaagtaaagcaaaattcccgttcttcagacttaattaggacatcattttgatggaggctaagttagcaaaaacacagctagaaactgggtacaaagggcaaattgattgtaaatcttggagattgtttgtatgactgggttgcatgactgaagcttaaaaagtaaaaagtgtcttacatagaattgcgagtgtgcttttggtcatggctagctataaagggaagaaatatgaaagtcattctcaaaatgtttggagatagaaactctgtgggggtaaatccaaggggtcagaatgcattcttatttattgtgtgagttttcaaattgtgaagaaatattatttctagaatgagttcaaagttgactcaaagtgataactaaaggcaatgaattgagaaataaaagtgtgaaagacatgaaacattttatccgtttaatccccataaaaactcaatgaaaaaatgaaaaagtgtcttcctcaatagcaattcacagcctctggctcagagctgggacatgtggaaggaatacagacatgctctcccaaattgcttggcatccttggactag

SEQ ID NO: 620 - DNA, 2396 bp, Homo Sapiens
agtggctcacgcctgtaatcccagcactttgggaggccgaggcgggcagatcacgaggtcaggaaatcgagaccatcctggctaacacggtgaaaccccgtctctactaaaaatacaaaaaattagccgggcatggtggcgggcgcctgtagtcccagatactcgggaggccgaggcaggagagtggcgtgaacctgggaggcggagcttgcagtgaaccgagatcgcgccactgcactccagcctgggcgacagagggagactccatctcaaaataaataaataaataaattctcaaaggagactttcttttttttaataaaaaccatgtattggatcagttatcttctcaaatctctagtctaaaataatgtgggcagttttacaaggaaatacatatattggaccatatgaaatgaaccgtcaatatttgttataaatctatgaaaacattaagttcaaatggtttcgtctaacacctatgtaatataatcagtaaattccaggtactgtgcgatttaggcagagtatatgtgtgtatatgtgtgtgtgtgtgtgtgtatgtatgtacatgcacgtgtgtatatattttgtagagtccagggtctcctgtcaaacttctgggctcaagcgatccttctgcctcagcctcccaaagtgctaagattacagttgtgagccactgcacccgacatatgcagaaaatatcttactgcagtataaaacatatatctgagaggaaaagaacaagagagagaggtttctaacttaaacacagctaaccaaggaaaaaataaaatcaacatttgaatgaatattgaaattctcttaaaaaaagacaaatgagggggaaatcacataagcaagtaaggtttcacacacatggtgctctagaaactaatcagtggacagattcagaatccatatctccctttccaaaatgttctctggcagaagtcattctgtaggacaaactggaatcaaaagagttatgaaaattgtacaatgggatgaaggggcttcccctgttggggaatagatagctgacatgctggatggggccagggttcaaacaaaggcccctgttgagtgggagcaggtacaagacagatggtttgttaaacattgccagcatgcttgcgcagtgccgtgcggcggtcagagcctggataatggtcaccagggcattgtgtagcagcgcattggctaatttcagcccagctaaagctattgcttatctttgttggttttgcaaagattaaggcagtttctctgctttgaatgcaccacagctgcccagcaaagcattcctgaagttttgtctgaattcccactgctaagaggggccaagcaaaaggtggctcgtgcaaggacttgttttaagctcatatgtgaagttgcttctcctcaactaatctggaccactcttgactcttacttctgggcaaaaccctctagagttacaggggccttctttctcagtgagtcctttcctgtgtggttcgaaatgcatctgctggggatttatatttcctagatttatatttcctattgggattgattcatttgctacttttgtggaaaaaggtaaacaccattgtaaattccatccggtgaatcatggggaggcggtggttccaattaaacgtgtttgctttcggaagggggcccttggcttcttatctttatgtacagaagaaaatagagctcaaccgggcctctgcagccaatggaaacgcacctggcccagtcagctgctaggctgagtctctgctgctctgggctccaactcgctcctctcggttgtttgcagacaaagggagagtagctgcgggtcatgcagaggggacagtccccttggctctgcctatagtcccaaagcaaagcagggggtgcagctactatctgggtatgttaggaaagggtgatggctgatcggtttagtatttccaacagttcaaatgtctttatcttcttttaaaggtagtgcatatctatccccacctaattgaaccagtgctgtatttacttcaggcagccccctctgcctaaattagatcatttctagctataaaatcaagaaagtgtgcccagcagattaagccctaaaagtggacttgttaactacatctacagaagcaaagagagcaagagaatttttatatactctccctctctccctctctctctcttttctctctctctctccctctctccctctctccctctctctctgcctctctccctctctccctctctctctgcctctctccctctctccctctctctttccctctctctctccttctctccctcttgtttctctctctctctccctctctccctcttgtttctctctctctctctctctcatgcatgcaccacacacccctacc

SEQ ID NO: 621 - DNA, 2417 bp, Homo Sapiens
tgtccctgggaagtggagccagcatggtagacagaacaaagttgcagttgctccagcatttaacagagatgagacctggacacgaataatcgtaacacaagatgggatgtgattcagtaatgtgagacagagtgctgtgggagtttagggattgtttttgaaagtgaggttgcagtttgtaaaggtttttttttttttttttaaagtaaaatttgcaaaagtagtactgccttttggaaacaagtaaaatgctactaactgtatgaaataaaacacgaaagtctccttccttcccctactcccacgtcccagtgtaacccatggttcgcaataggattcttccagaatgttttctctgagcacacacatagagcattttttttaaaagaaataagatagtagtagcattatgcatttttaaaaattttaatttgttctttaaaaggttatacattcacatagttctgaattgaaaagatacaaacgtagagtcttcctcctgccttttcttcccaactgctcagctcccctccccagagatagtgctgccagtttcttaagttcccttgcagagactgtttcttcctatacatactcctacctaccctccttctcttatttttttacacaaatagcatcatactttacactctgtaccttggttttttcatacatgttgtgcattttaaagatgtagttcaggtgccacctcaggcatgtcctggcttccttcctgacaagtatgaagcctcttatgacaatctagtgacatggaggcagacctgcatgatgtcctgggtttgtgacctgaggtcccaaggactagagggcaaggtagcagcacctggtcctcatctcctcctggcttaattgagctttgggggcttgcgtattgtcttgagtgtttggttgaacctgtatatcctgttggatcaatcttgatattgcttccttttcatttctctcgatgaaggccgtcttactgaatcttgtctgctggggaagttcctcattgctgagagcagcagttaaaaaagctgttagccacgtggctgggctcctatttctgcagaggcaggctgagttacagcttggtggtgtggatccaggtaggaattggtcaacattctgaatcctgagctgccatctgcctcgtagcctgctgggatgctcagtttagacaacatataaagtttcctggatacgggacaaacccaggcctatggaaagagcaggaaggttaaagtgtgtggtactttgggcaatgacgaaggcgtaaccagggagctgacatgtttgctccaaagccaagaattccaggacaatttgttatccagctgaagccagtgtagttgctacaaaaaagcctggggacaaaagcatgctttttacttgtttccctgtcttcttgcacacctactctattttctaaagctgtagtaaaggttgctgacattggaaatgtttgatgatttttgctattctcctcgtaaatgaataagagtctgggctcaggccaaaccatggctctatgtgctgaaagtatcagcttcctgaaacagcttcacaaatgctgacatttcactcagaccaggagggtcaggggaaaggcctaagcaagtactaggttttatcatgaaagaatgatttcaacagactaaacctggtctgatggcatcaaatgcccttcccccacctttttttttttttttttttaaagcattattggtcagagaggaaatagaaacttgggctgtcagatctgaagagacccacatagcatgggactggtgtcccagaacattgcaggtgtgtgaatgcatgaagagttgcatccaagtgctattgcccagcttgtttgggcactgatggtctcaggtcttctttcaggagcaagggtgggagacatttccagtgggtcaagatactagtcagtggtcataacttgtaatgtgaaaagcagtctggggcagccttatttaagcttgcttagtggtgaagagagaggagaaggctgtagccttgcactgacgcacctctatcaccatactcagggacactctgtgacacagatgagtggggtttttttttttcttttgtaaaactttggttttatacatagtagagcttttctctctctctctctctatatatatatatatgtgtgtgtgtgtgtgtgtgtgtatgtatatatatatatgtatatgtatatatatagtattcttttctttttctttcttttttgagacggagtttccctctgttgcccaggctggagtgcagtggcatgatctcagctcactgcaacctccgccttccgggttcaaacaattctcctgcctcagcctcctgagtagctgagattacaggcacgcaccaccacgcctggctaatttttgtgtttttagtgcagatga

SEQ ID NO: 622 - DNA, 2449 bp, Homo Sapiens
aaaaataatctctatttctacgcctgtaaatatgtccatttatatccctccagccatcttctttgtaaatattttgaacaaaaaggatcccgctctatggctgatttttatttaatttatttattgagacaggggcccaccctgtcacccaggccatagtgcagtgacacaatcatggctcactgcagcctcaacctcctggtgtcaagcaatccttctacctcagcctcctgagtagcttgggaccacaggtgtgcactgccacgcctggcgaatttttaaatttttttgcagagatggggtctcaccatgttgcgcaggctggtcgtgaactcctgggctcaagtgatcctccagcctcggcctcttaacatgctaggattacaggcatggttgatttttatagtcttttttcacctaaaatgtaatatgcagtgattctatagctctcccccaatttcatctctgtgtcctgaaagtgaccagtttagtccttgtcacagtagagcccccagtaattaatcttagcaataaaattctataactgtgggatggaacagtgtgtcaattgcgttttcggagaaacctatgtccaatttgcacacagaacgcccacagacctctgcttactagcttggctggaaggacagggtctgctgtaaggacagcaaccttacctagggcttttccagaggcctgagaggtcctgccaaggccctgggctcaggggtccaaggtgggagagggcgagagaaaacaacgtgctaatgcagccttgagtggctctcaaacaggagcagagggaaggctgtgaggggagttggctgctctctttggagtcagaaaggttgttgctcaactctttggattttccatcacagctgggcagggagagggtcagactgggcatgacttctccgaacaggtccttttaaagcctcttggctgaactgatttcctctccagagccaaggaagcagtgcctgggtgaagttaaccccttcacccccaacacattcttccagagctaggtgagcctggaagcctaggctcctggaaggcagagctacacagggcaagaggcctaaggagccgtgaactctggctggagaaaccttccctctggccttgttaaatccaacaggcataattgcatcctgctgaccttaattcccctggcgggtttaattggtcttggcattgccccacttcctgtcctgcccctgtagaggcaaagagggtgtctgcacagctggtgcagggcggggaagccccttcttgagggtgggcaggggctctggcagcccctaggtgggtggaggaagtttccccgtgccccacccctgtgcctccaagggagtgctgagaagcttggggactcccagggagcagctggctggagcaggcagtcccgtagattcggaaccaggccagactctcatcccagtgggaggcactgcaggggagctggcgggaacagatgaaccctctacctggggtgtccacgacattatcaggcccccacagtgctgtaggtactgtgccattgggcactctttacatgtgtgctggctaaatgctcgcagccatgctgtgagagggaggcaatggggcagagcagttatgagcagagccttgggttagatgggtccaatcccaactctatgactttgccctgtgactcagttttcctgtcacatctgtgaaatggggattaaagagctgacatttatacagcactcgctatgctcacactcactgttgtaatgctttatctacctcctgggaggcagatgctctccttacggatgaggaaacaggtgaagacattgttccaagctcacagttactggtcgcagcgcttcattgacagatctcctaatcactgcatggtagggagttgtaagactcgaaggaaggatactcatgaagctgcttaccccagggcctggtccattttagaaagagttcaataagagtaattatttgggaataataattataacaaaagtagcactaatgcccctgaagttgtcccaggctggattttggtctcattgggaggtggctctggatttgaatgtgggtagtttgaagccattcactagctgagtgactgtggggacaagccacttccctctgtgagcatcagtttccacacctttaaaatggtgtaacattggcccctacagtcccttctgaggatccagggagctggatctttggcatagtctggcctggccgttggtgggcactcaataaatgactggtattgataaccacaataataacaaggagatgccagcaaggtccagcatagggaggtaacaaactccagtctggagccttctggttaatcagttatttactcatcagacactgatgggcaagtccactctgtgctggggatgtgtttagcccctggccttcagggggctcccagacagtg

SEQ ID NO: 623 - DNA, 2340 bp, Homo Sapiens
ttcttcctttcctcagttcagcccacgcaggttctgtcccagcatcgtgagtagctgcctctcctagccatacctgagaaatcgaagaagtttctaggcctaaagccactgccacaacccgcgtttctttttttttttttttggagacggaatcttgctctgtagcccaggagggagtgcaatggcaccatctcggctcactgcaacctccggctcctgggttcaagcgattctcctgctacagcctcccgagtagctgggattacagacacacaccaccatgcctggctaatttttgcagttttaatagagacagggtttccctatgttggccaggctggtctcgaactcctggcctcaagtgatcccactgcctcggcctccaaaagtgctgggatgacaggcatgagccaccacacccagcccacaaccctcatttctgtcaggcctcccaaaagctcctactgtcagtgcaggcagctgcttggaagtcattctaggccaccccttccatttcccaggtaggtgaaccaagaccattcaggtgcgaggctggcctgagtcagagatggcctgggagagcctttggggggcagggagggttcagtcccctcaggcctggctgtgtcccctgccccccacccacaatcaggcccagggttggggggtgcacaccaaggaggggcaggaagtgtccaagaagcagaaccggctctgtgtccccagtggcggcgggtgtctggggcaggaggaggctatctgatcccttccccactgccccggccatgacctcctccctccctccctcgctccctccctccctccctccctccctccctccctccctcctccttcatggctggggtagccagcaccctgggctgcagctgagaacccagcgttccccaaccccgccagcattccagtgagaggaggggtggggggagactgcacccagagctttagggacaggggcacccctggggctgctccactctgggagggccaaggccaggctgcctccaacctcaccgtttcctgcctccgctctccccatctctcagtagcagagctgcctaaatttggctccaggagggaatgggggaggcagcggcaggcgggtgccgtcagaggccagggcgtcgctcccgtctagccggctggcatttttgctgtctggaggagggcaggggggcccggcagccctctcccggaaagggagatgttcgtaccttctgacatacactgagtaatgtgcaaacgacatgcaaaccgagcttcaaatcagcatctcagccagggaacagcttgagagctgcttttgggatgagagcagaaggaccagagcccagtgcccaggggctccagtgggggtggggtggggtggggggcggcacagagtgtctagggctgggcgttgggagactcagtttcttgccagctgcagggctttgttccagtggctggaccctctgggtcccagcccaagggcagggccatggctttctctgcctgctccagcaaagcactgggcacaccctgtcacgtggttaagcacgtgagttctgcagccatcctgcctaggtttgaaccctggctctccatgggccagctgagtgaattcctcaatcgagcacccaggcaagcagctagtggaactgggtgtctgttttagaacagccacttcccttccctggaagttgggcacgggggcatgacgtgagagaacctgggctttggaatcagaactggattccaggcctcactcagccagtgaggctctctgagtctcactcccctcatttgggaaatgggttcaggatctcaaggtcagctgtgacgtccacgtgatgaccttgcacatggtgggcacacacaggccttcccatggtgcagcctcactgctgtctgcattcatgtgactcctagctccatcctgtcccatcgctcctcttctctttgttcttctgtcctggctttttcgtctctagatgtaaatttcttgcggtctttttcccttctgtctctcttcttaactggtgatcttggaaaagtcattgcctctcagagtctcagtctgcatatcttctaaatgggagtaaatgagaggtggacaatgagctctgtctggggcctgaggctcatctttacaagaccgcccacccatcattccaaagggccaccaggggtaggctgtgccctcaactctatcgggcatggtgtgttgggggctccacttctcagtaactctgtttaaccccagataactgctctcctgcccctcggccggggctgatatgagctgaatccagcttcctgccacccaaaagccacttcctg

SEQ ID NO: 624 - DNA, 2438 bp, Homo Sapiens
tgctcagaatcccacagcactccacacagcttcacacatgtacacgggaatcttcctccccggcccccacacctgcccagcaccgaccttccagatgcattcactgattcaacaaatcctttttgagggtcttctctgtggaggccctgggctaacccataatcagaatgactggaacaggaacaaataattagctgccctgtgctgttgcctccgtttccccatctgtgagatggggatcctagccctgccacatgggactgtcaatgttaggagtgaatgtgtggaaagccctcggtccgtgtttggcccacagtgtcatctaagtaaggctatcctggttagccaaaagcatcccatgcccagctccacgcagaacacctggcacacattatctccctgagcccttgtccaagtccccagcagctggggtcatcgcccccattcctcagatgaggaaaccgaggctcagagaagaggcccacagtctgtaggttgccccaccgatctcatgtcatgccacagtgctgctccagcctgcctcgccaccccctacacacacacacacacacacacacacacacacacacacactattccctctggctagaaggcccttctcacttgcatatagcatgcccagctcctctgagctgcctacttacacttctgtgaaatggggatactagcccgtgtcagcccctgtttattttccccagggcactggactttaagggccaagagtgaagaccattttgtcctgttctctggcacacagtaggcactcgacaactatttcaaaactaaaggaataagcaagtggcctcatggctactgaggacagagtctggaactgaatgcagggcactctgaagctggagctcacttctacattattgcctttctcatgctactagcaggcactgaatgtgtcagtgagtgaatgaatgaaaccaagatctcaggatcccagtcaagtgctccctgagtttcatttcctggtagtgtggacatgagccaagctccagccaccttggatggtggtgggggtggcggggctgatgggccgcctgaagccggctgtcaggagctcgtctggccacagccgccagcaggagagaccagctggcggtgcagggtccatcggcccgggcctggaatctgagctgccctcagaggcccagcttctctctgggcccccacaaactggcctttgttcctgggccggccaagacccagcagcttgggctttctgtctgcccgcggcacccgcgctgagctggcggggtaaatgggccagcctcccctctgtccatgcccaggacgtcgctttaggactaaatggagatgtaattttctatacaaatccatgacaatttagatggagtgattgtaattggcttttcaatgggggttttgtccagagctggtggctagaactgggtggcctgtttgaggcaggctccatttaaatgacaataaagcaataatattgaggacttgtacagtgcccagcactcctcccagcccaagtagagcctcatgtttatggatctggtccttccctgaggctgtctggacaggcgggtggtggggggcgctaagcccaggagacaggtggccatatctttgggcttcaggacacagagcttcagaatggctggggcaaggtcccgcatccactggcttacctgtgtccttattcctgaaactgtcactaactagtgcctcctcgggctagctgctagtccaggtttcgggggcaccaagacaatgagagctgctcaggcaggtcagagggagaaggctacaatggccagtacagcatgacatttgagagcatgaccaagagatgaccaacagccagacagcctgagctcaaatcctactccacttctttttaaaaaaattttttttgagacagggtctcgctgtgtcacccagactggagtatagtggcaggatcacggctcactgcagcctcgacctccaaggcttaagcaatcctcccacctcagcctcccaagtaactggaccataggcatgtgtcactacacctggctaatctttttatttttttgcagagacagagtctcattgtgttgcccacgctggtctcgaactactgggctcaagagatcctcccgcctcagcctctgaaagtgctgggattacaggtgtgagccactgtgctcagcccctactctacttctgactcgtctcttgaaccttaccaagttacttaacctctccatgcctcagtttccccagccataacatgaagctgcagtgaaagtttttgtgaagatgaaacaccttaatagtgcctggcatgtggaaggtgctatatataagtcattgccgtgattcattccaagctctagctctggtgtcagggtgaccttgggcacgtgacttaacctctttaaacctccact

SEQ ID NO: 625 - DNA, 2364 bp, Homo Sapiens
ttaatagacacagaaaaaaagttcgataaaatctaacaccctttcacaataaaaacgcaaaactaggaatggaagagaacttcctcaacctgataaagggcatttatgaaaaacactgctaacatcaaacttaataaataatgaaagctttccccctagaatcagaaacaaagcaagtgaaaattacaactttggctagttgtggtggctcacacctgtaatcccagcactttgggatgctgaggcaggagaatcacttgaacccaggaggcagaataaaattacaatttcagaaaaagtatgtgtcttgtatctgccattgtgagcttgacagcttgccaacactcgaagatttttgtgactggacatggcagctcacacctgtaatcccaacactttggaaggccaaggcaggaggactgcttgagctcaggagtttgagaccagcctggtcaacacagcaagaccccatctccatttttttttttttttttttttttgagatagagtctctgtcacccaggctggagtgcagtggtgtaatctgagacctgtcccgagaccaaaaagtttgagaaccactgccatagaaaagcaccaggacatgtaccaaaatggtctcggaagcattgtttctaatcacaacccattgggaacatctcacatacccatcagcagcacaatatgttatatatatatatatatatatatatatatatatgtatgtatatatttagtgcttcagacaagggaggtcatgctcaaggcagcctactctcaaatcttcatccaaagaaatcctgaatgttccctgggtctctgctggattctagaactcttgtcctcacccttagctactgcaaatgaatcttggtcctatgcccacagcaattagtcccagccctggcatcattccaaaggaaaaatgttaaatcacacctgcccgaggcctctggaatggttcaaaagcttagggaaaagggtgtacagggtaggaaagtggggtgagtgaggcattacctcctcagccagaaagcgcagttttgccaggagcttcttggccagtgccaccttcttttgcacattgcgccgtctcaggccgcgtagaagtcgcagtccttgcttagccaaaaggttctgggagggcaaaaagacagcatgagcggaaggccccagctaggcgcccctgagtcccttcccgaggccgtaccaggctgtgcaccaggagtttccctcggcatcgatccagggcattgggccgggtcatcgtcctgcgctcggcaccgtggcaaaactgtctgcagtgagcagggatgtgcacagcagacaggaatcaaaggaaaggagaaggacagtgaccttggggccacttgctctgagctgacctcccacccccagcctccctcatagccctctcagtcttgggctctgaagaggcaccctttctcctgcaaagctggcctatctctatttggaccactcccaaaaatcattaaggccagccttgctcttgagctccagagctcgctaatacttaaccacctactaccctggctaccccaggtgtggcccatggaccaacagcactggtatcacctgcaggctatttaaaactgtaggacctcagccccaccccaggccctgctgaatcagaagctgcgtttatgccctcggggattcctaagcacattgaagcctcagacgtctccaccagcttggctaacgtatagcttgaacattacatgcccaagccaaatgcatactttccaatgatcccccccgcaaaacaaaacaaaacaaaacaaaaaccctatttcacctcagaactttcgagtcatctctcactgctctttctctcttattccacatcaattcatcagcaaattctttatgctctaccttcaaaaaatatccagaatctggccaggtgtggtggctcaggcctgtaatccccgcactttgggaggccgaggcggtgaatcacttgaggtcaggagttcgagaccagcctggccaaaatggtgaaacaactgtgtctactgacgctgaaaggttgagcatggtgagaacagaaaagtgaccacctacagcctcctacctcactgcctctcctgatcagggtccttggctgagtccctgcttcctccctgcctctaaatgctggaacgctccaggttctcagatttctcttttctgtgctctgttaatgctgttatccagctccatctacataatgatagttcccaaattgacatttccagcctagaattctccccagaactcaactcatatagctaactgcctaccacacatgtccacttacaattcaataagaatttcacagttaacatgtccaaaactgag

SEQ ID NO: 626 - DNA, 2386 bp, Homo Sapiens
ggcaggagaattgcttgaacctgggaggtggaggttgcagtgagctgacattgaaccactgcactccagcctgggtgacagggcaagactccatctcaaaaaaaaaaaaaaaaaaatcaggttttgatgtccaacaggctggttctatcatttataatttataatgtgtaggacctggagcaaatcattttacctacaggactctcagtttcctcctctgtaaagtggagataacatctactttctagggacagtgcaggaggatgaaagagcgctgagccagtggctaacacaggctgagcactcagtggatggcagcaattgtcattatcatcattatcacatcaccacatcattacaatataaaatattgagcaaatctgggatattttggtacttaacatttgtttcctcttcctttctccctacctttctccctccttttcttccttcctcctttttccctgtcttctcaccttcttttattccccttcttctcactttcttctcatccttccttggtacatctggttgcagctgcaaggagtggcaggagcttacacaggaaaaggaggtgtggtcagatcctggggggacttgaatgtcagagggagtctgatcttcagcctaggggcaatagtgagtcactaaagcctgcggtggagcagaaacaagctgtggtgaaagtggggaagtgagcctggcagcagagattgggaaggggctgtgagggcagaagctggagccagagaggtgagctatccagggagcctaaaggtcaagtgagagagatggggaagcagaggctgcatctctgtctagagctcgcctgggagaagtagcctcattctctacgttcaccttgcccacaaaacccagccggagcacccacctctgtgtgacctcagacaagtgcttaacctctctgagcagcagtaaggccatcttagctcttggtgacaccccctggcttcctagcaaagacacttctggatcctacaggcttccatcatcttccaggctgctctctgctcagagattaatttgtttactcccttgcctggagatgaaccgagggaactaatcgtccatcagcgcaggctcccccaacctcgcaccgccccgccccaaatgtccattttctggcaaaatatgtccttgccgctgacaaggctgcttggaaaatgctaattttatcctcgaattaaaatttgttcccttaccctcgttttaataaaaatgaagcatccggaaacattgccacggtgcagaagagaaagatctgacataatttttaaaatgccttcaatcacgctgacttctgaacggtctgtcctctaaccctgaccccctccccatctcccaaccccctgaggcagcatttacatttcttaataacccctcattaatattcatgagaaggggcgggtaataacggctgagcacaccgcactaattcaatttccacccgcctcagcgtgtttacttaatcaccaagggacccgggttactcagtacaattatttattcggaattagatctggaggcatctggactggaaacagggaaccaagagcaaaatgaaaatcgaattctcttcgtcctcccctcccagccgcctcttcctgaccgtgtgccaacgctccaggcagccagcagggcttagaggacaaggctccgtgcccgccgggcagctcctgaaggaactggctcgtgaggggctgaatgtgttccagatgctctggccccggcaggaatctctcatcaacagtagccttggagttatcgcaaggcccagcagtgggccagttgcaccgtcccagccaagagcatggccagccagagttagggtgttcaggagatgctggggtattggcccaacctggacatgcagtgtggacagacttttgatcacaggccctgtggaggtgagagtttgtgacatggggtctaaataacacctgctcatcctcgaacccccgcttaactgtcacctcctccaagaagcctttcctggtccccagacaaggttagcttctcctattacacacaccttctgttacaaccaggatgggcttggtcatagcaccttgcccactgtgggtgttcacacaatggtttctaattagttgttcagggtctgtttctcccaatagtcagttccgtgggagtaggtcccatggctgtcctggtcacgtgttcctagcatctagcaatgcccagcacagagatgctcaacagtatttgttaacttcttgactgattgattctactattgactcctgattctcaagcctctgtttccttatctgcaaaatgaagctaagaacattcatcttgtaggattgccgtggggactcagtgttttccatgtaaagaggatgca

SEQ ID NO: 627 - DNA, 2734 bp, Homo Sapiens
ccccctgctgtccctggctcctagcccttggcccaagcatggctctcagcctagacaaggccttcctaggaggcctaggagccctgcgggaggcagagtgcagataaaggctcggagtccgtccatgtggaaaacctgggtctgcggcgatcgtgaaccacatgggcagaggggccagacctggggttcctatgatgggaacatgatgtgactgtggaggccagtcaaggctcctgccagcggtgagtggaacagataaagaaatcagtcatcagaggagagaagtaccccagaccggagtgggaggtcacatatcggctccctgtgctgccctccagaggggaactggggcagaggggcctcctcattccacgaggctggctgggctcaattcaaggaacccttgtcctcccacctctgttggaatcctcactgcagcccactggatccctgcacgagacacacctggggtgcttagtgagcaggcagattcccagatacccaccccgaaaagccagtctgaaagagaacacccaggggtggggcctggccacagccagcctctccagagagtctcaagtccagtaatatctaataactctgtgtttaggccaatggtgttcaatcctagctgtggactgtgatcacctggggaattttttttaaaccctgatacccagatctcacctaagaccaattatgtcagaatctctggggtgtgccctgggcacccatatattcttaaagctccccagtcgtcccagtgtgggtccaaggactgccccagctccagatcaattctaagagcctcaagatgaacatctggggaaaaggagaagtcatgagtctcagataagagaaataacttgcccaaggtcacacaaggtggtgatggcaaagcccgtcctgaaacccaggcctctttcctgaccgtgggccaatttcttcctgatgctgcatctctttttaaaaaccagagcccaggcaggcaatgcccacagtatttcactttaataatattggaaaccggtacagtcagggccaccacagtggtggggcgggagcctcgatggcgattaggggagctgtaagtctttcgctttatccaaatcttgggcagtaatttagaaaatttaattaaagggggagaaatggggacacctcgcgctccctgcctcctgttataatgagtgaaatacaccaggctgtaaaaggaaatgctgtctgagacgcagctccgatgttttattgccaagttttattcactgatgtaaacgtaatcgctggaaaccggagctcttattaacacacatattttcacacatccggggcccctcctgctcccccctctccctctgggcttgttcacccacctcctagggtcagccctgctgctttctgggcatgtctatgccaagcctggagttccgcaccggtttcataccctcccatggcagataagactttaatagaattccattgctcctcagagctcagtaatgcattctggaaattaggcggctacatactaaagccattgttcccccttataaatgggctctctcaaagccagtgaccatgggggctctgataagctctcatgaagcctcactccacatgttattggtgtgctaaaaggtgcaactccaggcttacattgctcattgttaggggctgatacatttaagtagtttctccatgaatcaggcagcctaggtatttcccccactcttggcattgatagatgagcaaaaggaagccatttagatggtgctatatagggctccagcccacgtggtgaatgatttccaatgcctggtttaatttatttttaaatgaaatttgttattgattctggattaaaaggacaaatcttacagctgttaccactgacagagccacagtgctcaagtgacacctctcaaggaggggagggagggtggcctgtctgagtcaaggggagggtatggagactctccagggagcttggctcagcagtaaggggcagtgcaagatcccatgcttagagggaagtttaaaaatatcatctttcccaattgaaatacttgacgtgatgctcacctctgagcctcatttatataatggaaatagcagtgatatttgcctcatggcatccacacgaccactagaggcatgttagttgcctccagggatgggaggctttccatctcctgcagcattcccagaatgaaatgagtgacaggcgtcacccactctagtgaattcctagagactgtttcctgggctagtctttgcttaccttctgcctccactaggctctcggcttccacggtgcccagagattacacttgcattgggaagcagacaagaggcacaattacacaggggaggaggatgggctgggatgtgtccgttcacattcagcctctgccctacctcactgtgcaactttgtgcaggttacatcatctttctgagctttgtttctccatctgtaaaagaaggaagggtataatagcagcctcaggggttgttgtatgaattataggagatcatgggtgtgaatgtgatttgtaaactgtaaagtgtagtttaggtgctgcaggaaatacaagtgggacagtacagtatagtgggaggtctctgagttgggagacaaaggacctggatccagttctgtcatgagtggctgtgtggctctgagaaagtgaattactttctctgggtcttagtttcttaaggtgccaagaggg

SEQ ID NO: 628 - DNA, 2441 bp, Homo Sapiens
ggacactccctaggacttctggcaaaggcaggagccagaatgaatgaatttcctgtgcccaggcccccctgctgtccctggctcctagcccttggcccaagcatggctctcagcctagacaaggccttcctaggaggcctaggagccctgcgggaggcagagtgcagataaaggctcggagtccgtccatgtggaaaacctgggtctgcggcgatcgtgaaccacatgggcagaggggccagacctggggttcctatgatgggaacatgatgtgactgtggaggccagtcaaggctcctgccagcggtgagtggaacagataaagaaatcagtcatcagaggagagaagtaccccagaccggagtgggaggtcacatatcggctccctgtgctgccctccagaggggaactggggcagaggggcctcctcattccacgaggctggctgggctcaattcaaggaacccttgtcctcccacctctgttggaatcctcactgcagcccactggatccctgcacgagacacacctggggtgcttagtgagcaggcagattcccagatacccaccccgaaaagccagtctgaaagagaacacccaggggtggggcctggccacagccagcctctccagagagtctcaagtccagtaatatctaataactctgtgtttaggccaatggtgttcaatcctagctgtggactgtgatcacctggggaattttttttaaaccctgatacccagatctcacctaagaccaattatgtcagaatctctggggtgtgccctgggcacccatatattcttaaagctccccagtcgtcccagtgtgggtccaaggactgccccagctccagatcaattctaagagcctcaagatgaacatctggggaaaaggagaagtcatgagtctcagataagagaaataacttgcccaaggtcacacaaggtggtgatggcaaagcccgtcctgaaacccaggcctctttcctgaccgtgggccaatttcttcctgatgctgcatctctttttaaaaaccagagcccaggcaggcaatgcccacagtatttcactttaataatattggaaaccggtacagtcagggccaccacagtggtggggcgggagcctcgatggcgattaggggagctgtaagtctttcgctttatccaaatcttgggcagtaatttagaaaatttaattaaagggggagaaatggggacacctcgcgctccctgcctcctgttataatgagtgaaatacaccaggctgtaaaaggaaatgctgtctgagacgcagctccgatgttttattgccaagttttattcactgatgtaaacgtaatcgctggaaaccggagctcttattaacacacatattttcacacatccggggcccctcctgctcccccctctccctctgggcttgttcacccacctcctagggtcagccctgctgctttctgggcatgtctatgccaagcctggagttccgcaccggtttcataccctcccatggcagataagactttaatagaattccattgctcctcagagctcagtaatgcattctggaaattaggcggctacatactaaagccattgttcccccttataaatgggctctctcaaagccagtgaccatgggggctctgataagctctcatgaagcctcactccacatgttattggtgtgctaaaaggtgcaactccaggcttacattgctcattgttaggggctgatacatttaagtagtttctccatgaatcaggcagcctaggtatttcccccactcttggcattgatagatgagcaaaaggaagccatttagatggtgctatatagggctccagcccacgtggtgaatgatttccaatgcctggtttaatttatttttaaatgaaatttgttattgattctggattaaaaggacaaatcttacagctgttaccactgacagagccacagtgctcaagtgacacctctcaaggaggggagggagggtggcctgtctgagtcaaggggagggtatggagactctccagggagcttggctcagcagtaaggggcagtgcaagatcccatgcttagagggaagtttaaaaatatcatctttcccaattgaaatacttgacgtgatgctcacctctgagcctcatttatataatggaaatagcagtgatatttgcctcatggcatccacacgaccactagaggcatgttagttgcctccagggatgggaggctttccatctcctgcagcattcccagaatgaaatgagtgacaggcgtcacccactctagtgaattcctagagactgtttcctgggctagtctttgcttaccttctgcctccactaggctctcggcttccacggtgcccagagattacacttgcattgggaagcagacaagaggcacaattacacaggggaggagga

SEQ ID NO: 629 - DNA, 2473 bp, Homo Sapiens
agcaactatgtcataagggtggtgggtgggctaaatgagttgagttctggcatataagtaacttagcatggagcacaacaaatgcttactttgtgtttgtcgtcattgcttccaagttccttctttggtctctattggtgtggagtatctcattgcttttttttttcacagattttcattctgtcacttaggctggagtgcagtggctcaatcatagctcactgcagccttgaatttctgggctcaagagatcctccttcctcagtctgccaagtatctaagaccacaggtatgcaccactatgcccagctaagtttaaacaaattttaatttatttttatgctattttatttattgtgtagacagggtcttgccctgtcaccctgggctggagtgcagtggcaggatcttggctcactacagcctcaatctcccaggctcaaatgatcctcctgcctcagctccccagtagctgagactacaggcatgcactaccatgccccgctaatttttgtactttttgtagggatggggttttgtcatgttgcccaggctggtctcatctgccttaactcaagcactccttctgcctcagcctctcaaaatgctgggattaccgttgtgagccatcatgcctggccacatatccttctttatctaaggtcagaagaacctttaatttcaattaaccttccttggtcaaatagtcttttcttcaaccactggccaagctgaaagtagagactaaaaaataccacaccattatttggccagcaaagaaactctccctcccctaccatcaccatttcctctccttttccttttgcctcttccccctttccctccctttctcctccctcccttaccttctcctttcctcctttcttccctgcttgctttggcttaatgaaaggcctcacaggacgctgtccgtggtgctgacttgtttttctgtcttgttcaaactctgtatgcaaatgaaaagacaacacagctattgaatgttgaagctggggacattccccaagctaatctctgtgcctgtggtgtggccacggctctggccattatctctggccacagtgccccggagatgctgatgctgacctggaccagaggtgccagcctgggcactgccagtccccacagccattgactagagccccagggcacaggcagctagcaacttatctgggtgccccagggactgctattggcaaagtgatggccccacagggaccaaatgtgaagctaaagcaggatacgcaggtcggagataaggccaagaacagattccctttagcgctcaagtgctgtttgtcagaaattgacagccccacggccctggccggtgacaggcacagggtgataacaataccatatgatcagcatcattggaggacaggctgtcactggctcccagagataaggaaacaatgggcgacccctctgcctagggaaaggcctgcatggagcccccagggcaaagcagcaagatctaaagtgtgtctctgacccctggcacctcaccagcaccccctcctcccagcaggcccccagagctccttcctgtcacccagggacccgtggcctccattgtgcacccactattctgacccctgttctctggagttaatcatgttatctctagagcacaggtgttagtggatgataacagacaagcagttccctccccagctccctgcaccacagacgctgctaagggaatggagtgggagaacagagctttctcgaggtggtttatgcaggccatggattcagcactaacagcctctctccagcactggattcttgagaaataaaaaggttgggtgtggaggggctcccacattttctagtgtcttcccattccaccccactggagcaaagctgttgaccctacacttggggacatattttgggatgggttccactgccctggcttggctatatcccttcccccactgctgcgcaacctttccctaccatagccccaatagccatgaaatggggactcagcacacctaggtcctagttctttccctgaccccagcttgatgaatgatttagggatcatagtcaagtcacttcactccctggcctcagtttcttcaactgtaagttggggctactcatctgtaactatcagatctgccaggtggtatgaagttccagtgagataaatatatgtgagggctgggcggtgggagatctgagatttaccccccactaaccaggcccactgagtacagtgtggagcactgctgggtctcagcttggaggtctgctctgcctgactccccaggtggcaagatcatccccccgttcccctcctcttctatgcttaggctgtgatttctcatgggctcacctctcataccctcctgttttctttctctcatgtctgtctctcaactggttcttgttcttgcctttttttctgatcttttacgtatatctgcaaacctcactc

SEQ ID NO: 630 - DNA, 2500 bp, Homo Sapiens
atgatagactggattaagaaaatgtggcacatatacatcatggaatactatgcagccataaaaaatgatgagtttatgtcctttgtagggacatggatgaaattggaaatcattattctcagtaaactatcgcaagaacaaaaaaccaaacactgcatattctcactcataggtgggaattgaacaatgagaacacatggacacaggaaggggaacatcacactctggggactgttgtggggtgtggggaggggggagggatagcattaggagatatacctaatgctaaatgacaagttaatgggtacagcacaccagcatggcacatgtatacatatgtaactaacctgcacattatgcacatgtaccctaaaacttaaagtataataataaaaaaaaaaacagatatgacataatcacaaaaaaagaaagaacagcacaccagagggaaggagtagtttttattttttattttttattttttttgagacagtctcgctctgtcacccaggctggagtgcagtggcacaatcttggctcactgcaacctctgtctcccaggttcaagcaatcctccttcctcagcctcccgagtagctgggattacaggcatgcaccaccacacccggctaatttttgtatttttagtagagatggggttttgccatattggccaggctgatctcaaactcctgacctcaggtgatctgcccgcctcagcctcccaaagtgctaggattataggcgtgagccaccacacccggccagtagttttatatacttaggaaaaaagtactagatgtgatttttaagttaataacaacttagaacagaaaatccaaacactgccccagtgtctggcccagttccagctcaatgctgcattctgcatctgtttattgtaagatgtgaatgccccatccaactttcttggcagatgtatccttttttacacttttttaaaaactgaaagatgatttcttcatttcttattcagttttgaaagggaggcacagtcaatgatctcgcacgtattccagaaactgacttccttagaccttaacagaagctactcaagtgcacagatgtttgctggttttacatggaggccttgctggctatgaaaaaacattcccctctaattttttgctcaatttgttttaagttggtaatgaaatctgtgaatctgtgttccctttctacaggaaaaatagaattttgatctcttttaaaaatcagaacgcaacaggataatggagaaatcagtctcaatagcacatttcttgttcgtttcagagcggtgatgtaaacacgatgatgctatgcttttggggtctttgaggtttctgccaaaagcatagcagcttaggtggattcgtgcctaccgcatgcttctttggtggatttctgtcgacaaattgtatgtctgctcttctgaaatagcatcatgaagttgttaatgtctttgcataaagaccaccccattctgtttgccctggggacaaagactttgcactaatcaccttgctctctcctggagcgaagagctgaagaggcaacaggaaatgcttatttactgagttcttactgggtaccaactgtggacacccacagaaggggtttgagtaagtatctcctcattgtccaggggccagagtagagaacagaaaggaaacagcttggcctctggttccacaaaataaataagaataaaatagaacattgaacatttgtgtttctttcaccatcttaatgtatgcactttgtagattctgcattcaaacatgtagaacaggctaatgaaagaaaatgccaaggccgggcacagtggctcacacctgtaatcccagcactttgagagtccgaggtgggtggatcacaaggtcaggagttcgagaccagcctggccaatgtagtgaaaccccgtctctactaaaaatacaaaaatcagccgggtatggtggcgggcgcctgtaatcccagttactcgggaggctgaggcaggagaatcacttgaatccgggaggcagaggttgcagtgagccgagattgcaccattgcactccagcctgggtggcagagagactccatctcaaaaaaaaaaaaaaagaaagaaagaaagaaagaaaatgccctcaaatctcaccacccagagacaaaatcattcacttttggagagcattcttccaaatctcgctctcttccaatggttctcagctgaggacaattttggccgcctgcgtacatttggcaatgtatggaaacatatttggttgtcacacactaggaaggggtgttcctggcatttagtgggtagaggctgaggatgccactaagcatcccacactgcaaaggacagcccctctctccaccacaaagaattatccagctcaaatgccagtggtgctgaggccaagaaaccctgctatagacatatggatgtgtagctctgtgataattacataatcaagttcatactatgccagctgctcatcatcct

SEQ ID NO: 631 - DNA, 2333 bp, Homo Sapiens
cctgtaatcccagcacagtgggaggctgaggcgggaggatcacttgaggtcaggagtttgagaccatcctggccaaaacggtgaaaccccatctctattaaaaatacaaaaattagctgggcatggtggtgggcacctgtagtcccagctactcaggaggctgaggcatgagaatcacttgaacccaggaggcagaggttgcagtgattcaagatggtgccactgcactctagcctgggcaacagagtgagactgcgtctcaaaaacaaaaaccaaaaccagaacgcaggatatttaatactcattgccccagccttgttggggaggggcacaataagaaaaatcccatctggcatcctgaaacaaatcagtattggggtgagcccagtggggcagctgatggctgagtcaggctggtgcgatggaaggagctgtgagggccccgtagcttggagcatccctggtccccttagcagccatcataagacggagcaggcagggctgtagttggacagcccagtcaggaaatgccagccatgaatgagtgccccatggctgccttgggaatgtgtgccaggattggaatcctgcagttgaggatctgaaatgttctgaccaggtggctaaagagtatgacttcaggccgggcgtggtggctcacatctgtaattccagcactttgggaggctgaagcgggtggatcacctgaggtcaagagtttgagaccagcctggccaacatggtgaaaccccgtctctactaaaaatacaaaaattagccaggcacggtggtgcacgcctgtagtcccagctacatgggaggctgatgcaggagaatggcttgaacccaggagacggaggttgcagtgagccaagattgtgccattgcactccagcctggatgacaagagcaaaactccttctcaaaaaaaaaaaacaaaacaaaactgtgacttcataataaggtcatgttgctagggaccacgtattgacgtttctagggagaaatgagaaggaatacagcaaccgaataagacgatgttcgtttatgacatccatgatgtctttcaaggcttgagatacactgtcttttgtctaattagtcattgtgaccatatctccatggagaccattatgtttgtactcacaatagacacgtgtgcatccattaaaggaacacagttgccaaacgtacgctctgggcccagggtggagtggctttttacagcacagtcatcggagctgctgcaaaaagtgtcagaaaacaagcaaggagctgtccttattcatgaagagaggctctctctggtatcaggccctgggtctaggggagtgtgaaacccaggaaggcggggtgcacacgctcatgacaaaagttccaaaggcgtagattcactctcttttttttttttttcaaatgtgtgccaaagatttttaagctcattaattaatgaagggaccagtaagatgttaaaaactggctcaggagagaatgcagagaacagacattaatataggtaattaggaatgttttggtcaagagacacaaaattggtttcttccaagagcagtaaggagaatggggagaagatttagtctttcattaaaaaaatttgagagccaacaagtgctcagtagagtgagtggtgcttggacggaggggtggacaggccggatgggactcaagcgagactgtgctacccagacctgggcagtgctccagggatgcttagcagaggggcaggaggctgtgggggatgccgctgtctgggccttgtcctttttgtgctaagcatccccagctccctgcacaggccccaaatgtggtaaatgcatggcagaccttggggcatgaggggatgagaggggaccttccagaagagtagagtgggaacagaccatgaaagcttgggattgcagaccctagctctgccatgggacaagaaaccagtccctctcagataccattcggcactcgtttctgcctcagaactgagagcagcaaagggcttctgtgtttgtcctgctcctggcttcttttttctttttctagagacagggtcacgctctgtctcccaggctggattgcagtggcacaattgtagctgactgtaatctcaaactcacttctgggctcaagtaatcttcccactccggtcacctgctaatttttatttttgttttttggtagagacagggtcttgctatgttgcccaggctggtcttaaactcctgtctctagtgatcctcctgagttggccccccaagatgttggattacaggcgtgagccactgcacctggccttctccttgctgccttgtccaatgggattt

SEQ ID NO: 632 - DNA, 2492 bp, Homo Sapiens
agaggcatcttggctgtgggagaaaagtaggtcaattctggtacgatcgtcccctcctgggacagtgagacaagcttcccaggaccagctggggagccctagagaagcccggcactggcaatgtcctgagagtccattcctggagccaagggacccaggcttcctaccgtgtatgtccatttcctgggcaaggcactggatggcaggactttaagcagaggcaggaaagggcaacttccagcctcttgcagaaggcctgattgcgggggcagtcagttgggattgctcagccctgaagcagagactgagaaccccgcctgcctgtgtgaccaccatccatgtccactccctctctgagcttcagtttctccaccggtaaaatgggaagagaatggaccagagagtatttttctcccattcccaaattacagagtttttttttttttttttaagacaggtcttgctgtatcacccaggctggagtgcagtggtgtgatcatagctcactgcagccttgacctcctggactcaggtgatcctcctgccttagcctccctagtaactgggactataggcacaggccaccatgcctggctaattttgtatttttattttttggtagtaacagagtctccctgtgttgtgcaggctggtctcaaactcctggcctcaagcgatcctcctgcctgccctcaagcgatcctcctgccttgggattacaggtgtgagctgccatgtccagtccacagacaacatgtattgagtgctcactacatgccaagcactgggctaagcctgttgcatgtagcatcttgtttacatttcacaataatcaagggggcaggcatctgcctgctttacagatgaggaaaccaaggccctcagcagtaaagtaaattttccaagttcactcagcatgggaatgatagacacaggtttgtaatccaggtcttgttgacatcgaaacctgggatgctagtaaccctaccctgctgcctgtcagtcctgccaggctttccaggacggcccccaccctgagccacatccccaggaacactctgccactccctatccccctcctgggctcataccatgaaagccccatgcagagcctgctactctagagggatatatattatctaaatttgataagacaactcaatttcactccgtgtctgttaccggcgataaaaccaggagacttttatgacccagcatcctcagcaagattgtcaggaacttattatacaaggtctaactggatttctctctgcagatggctgggagccatgggctggaacgcaattcggcaacacatttggggaaataaatgcaaaatgcttgttccagagacttagataaggcagcaggcctccaagctccccaagaatcggatctgcttttcctgggccctgaagggcgatttggggaggatttacgctgtcggaggaggagggaatggcgggctctttctcccctcatcccttgactcttcttgccccagggaaggaatgtgagcgcacctgagacttggagttcagcaactgtaattccctgagaggtagcaattcagagtagacctgggggtgggaggacaggatggtgggcagtggtgagaccaaggttatgaggactgtgtgcattgaaagaggggtgcaggatgatcaaaacgatggggaactgggtcttcactagctgctcgggatctgccatagagtcactccttactgccctgagaggcccgcgtccttcccaaacacacctctaggactggtgtggcccccataaactgggttcccaaacagaccccattccttggatgtgagttcacatccagattcagatgacccccgtacataagctcacagatactccaagattttgaggttcactgtgagggcgctccaaattcatggcttacctcaaattctgatctctcgcaggcgtgggctcatagacgggcttgcggtccatctcagctttcacagcatccatgcgatttttgccattggaaggaatggcaacaaccacattcacttttgcacccacctaatagatctgccgaatcttgaggttggagctttacaagagccagccccaaattcagggttcattctctagtgcagacatcccccaaacctctgctcacacacagatctggcataaccccagattcagttagctgcccaagctagactccagccctctagctaccagcagcatctgagagttaccccctcaacaagctcataccaagccttgaggatctggcacctccagtcccaggctccggtccttgtgcagggaagctgctgcaacaccactgatctgggaagtttgaggtctgcccttgcgcacctgccctgtgactctaagctctttctacggggccaggaaggcggcggagacatttttatctgtccctgggctccccgatgcttcaatggactccagtaccagaagccctttttttttttgagtcggagtctcgc

SEQ ID NO: 633 - DNA, 2301 bp, Homo Sapiens
gatagcttctagcagattctgatgttggcctgagagcctctggagcaggtggtccacaagttgtggaacagagatcaagcatggtacactaactgtgtgcccagccccgagccaactgctacatgttttcacagtgattcaacaaggtatgtgtgaagggctcattcccacacacaaccagtgtgagctcttattgctcttattttaggcaattgtcacaccatcctcctgagatgggctttagtctctccagttaccaatgaacaaagaaaagtgtcaagaagagaggtggcttgctgagaaccacatggctaggggccaactccaaagcagtgagcttccgccccagcatactctgcttccattccctgactcagctctgcagctgaatggcgtctcccaactctcccaacctcagtctttccatctgtgaaatggaggagttggactattgggctgggagcccctgacaccatgtgtgaccttgcatgattttcttcccttcctgcacctcagtctttccatctgtaaaagaagttgccagtatcctactccaatgctacttataaacgctgctttaaaacaaaactcctggtgagggaaggccctaagtccagctccctggaaacaggccttgagccagagctttgcctgcgggaggttcactgggggagagttctcaggaacaccgtggcaggggtgagggaagcaggaccacgtggagggagaagttgaactgtgaagctctctcagcaggggcctcagctgctcccacagggaactctggagctgggatgctccaaatcgagcaaggggccaggcctttgaatccatgtatctaccagatattggacatgggtttctgtcccctcacccgcctaaaggcatgacgtggggtgaggcagctgactttggctgagggctgtcagcagctacagggtcaaaaccgtcctgggtggtatgatccatcacataaaacctgctaaaaactcgggccgacctcagccctggaaacaatagcaggcaagacgtggcctgagcctgggcttatccagctgggcctggccccgctccgagggtctgtcgcttgctgtgatcacagcaggatcagtgccccagatcttgcttaaagcctggcggccaccgcctgcctcgcagctcatctcccgcagctccccgaggtcccagcgattatgccactgaaaattccgctttcatcttgtcaacctcgcagtaaattacaggcctggggaggcgtgggcctcctccttaaacaagattcaattccacttagctgcccccattcccaccccacacacgggttccctccctcccaccaccccgggctcgggatttatggcctctctttgcaggcagctggtaaccatggcaagctccttagggaggcttcaggctggagcctccttagccccagactccagcacggccggccgctttctcctaggatgggagaggggagaggccagagatggcaggaatgggcttcaggggccaaggccgagaggtcatagtaaccccagcaatcatgagaacttcaacactaccacatctgaccctcacaataaccatcatttcccccattatatagatgggcaaactggggccagggagcatgaggtcactgccaaggtcacaaccaaggaagcagttgactctggggctgaggtgtttaagcactctggcatactccttctttccccagctgctgcttttggatgttcaaatctctcttagatctcagcccctgcttacattcccctagtgatggggaaatcactcctctctggcaggcctgttatctctctaacgattagacatagttgccaaataattgatcaggccctgtgacccctcagaagggttattttgacactgactgccctctgtgatctggctgctaactctcttctgcaaactgatctttcatggtttgccaccacagcaggctgcctggggtctccttgctgctcagtgtcccgctctgccccaggtctttcttattcattcccatcctgctccaattaccagccctgtctccattcctatcacagaatatcaaagctggaaatccatgactcctcattttcctgatggagagaggcccagagaggggatgcacttctctagtgcacagggtgaattgacagtgtgggtcccaaatcttccgccaataaaataataaatagtactgagcatagctaacttttgtcaagtgcttgataaccaccattctaagcattcacgaatgtaatccatttacttctcacataaccctatgag

SEQ ID NO: 634 - DNA, 2351 bp, Homo Sapiens
tataaaatgttttagggagtcattgaatcttcctaaggggcagtagataaagcataaccttggagcagggagatctgctgtgttagtttaggagacgctggctgctgtaacagggaaactctgacatcccagggactcggttcaacaaagcgtatttcttgcttacagaaagtctacttggtggcagggttgagggtgggtgggggttttctgttccacaaagccattcaggcatccaggctgacagagactctatgccttcaacatgtggcttccaaggtccctctggatttcataagctagatgcgacaggacagagcatgaagggctggtgcggggcacccttgggagtggtgcacattattcctcttgattcactggctggaactcagcctcatagctatgtaatctcaaggagagtgggaaattttgtgcctaggaagaagaggaaatggatttggagagccacatcagtctctgccacacttggttttgaatctagaccttgccacacactatttgtgggaccttagcttccttaacatgtctgagcctcagtttcctcattaaagggcaaatggtgataatctcctaggaggtatgatgttgggagggtttcttgagttttttctccaacactcccatgcagtcgtggttcttacctgcagagctccagcctctatgtacaattgtccacatacttgtcaacttccttggtaataactcctctcctggagggcaaactccaccagaataggggccacactgctctcaatcagagctgcagccctaacaactggcctggcgcccagcacttagtaggcattcaataaatacatgtcggggaaatgaatggacggataagttaatatgaacacatatgtgctaagatttactcctttaaaaattcttcctcaataaatattcgcacctctatgttccatcatggtgtggtgagggggagggaggggggaagaagacgaggaggaggaggggcacctttctcccacccctactggagctcaaactataaatagctccagttggaatctgactgcagattcctccagcaaagtcagcatccccaggacctctcatcctggatggggaccgggagtgcttcctcattaatcacagctctttaattaacagctctgagcctggaacaaaaggtgcttaccgggagaacgccagcgggccctgaactctggccgcctgtttttatttggaggacctggcgccttggggagcaggcatggcatggctcagtgctgagcctggcaggggatggggtttggagggcgagcagctggcaggccggctgcctgtctccaccttggacatctccacacagagctgactcgacttcgagcaggttgctggcagctctgtcctcctcaggctgatgctgatgtcattggtctggggtggggctggacagtgaagttgtcacgttccccaggtggctctaatgtgcacagtttgaaaaacactgctccagggatggcaggcttggcagaaggcactgagatgggtccaaaggcctaactgagtgacccagagatggacacttacccaaggcatgcctaatgcccaggcagatcaaaggcccactccctcctcttctccccgttggcggatgcagcaggaatggaacctgcctttccttctcccatcatgcctcctggagatgatcagaggagagccagaccacagaagcaggacttcagccaggggctgggtgggaggcttggaaggcaggaggaagcacacacagcttggcactggaagcagtggccctagggctcctgctgagccccaggtgtaatatcaagttgatgcaaaagtcgttgtggtttttcctattgctttcaatgataaaaaccgcaatctgacaaaaggctaatatccagaatctacaatgaactcaaacaaatttacaagaaaaaaacaaacaaccccatcaaaaagtgggcaaaggacatgaacagacacttctcaaaagaagacatttatgcagccaaaaaacacatgaaaaaatgctcaccatcactggccatcagagaaatgcaaatcaaaaccacaatgagataccatctcacaacagttagaatggcaatcattaaaaagtcaggaaacaacaggtgctggagaggatgtggagaaataggaacacttttacactgttggtgggaccgtaaactagttcaaccattgtggaagtcagtgtggcgattcctcagggatctagaactggaaataccatttgacccagccatcccattactgggtatatacccaaaggactatgaatcatgctgctataaagacacatgcacacgtatgtttat

SEQ ID NO: 635 - DNA, 2440 bp, Homo Sapiens
attgcacaaatgctactgtgtccactgcatgccagatactctttgagtactggaaatacgctagtgaaggaggcggacaggagtatgcgtctagtcaggatgacagacaacagaggaatcattaatttcaatggtgataaatgcatttcatacattggacctctatgtaatatttaatcagaagataaagttcttttactgaaaaataattagtaggtttctaggccagcacattttgtgggtcatgaagtcagcagctaagagtggtacttggaatcttgtctttgtggttcatttagggtgggagagtgtctgtgaggcccagccaccttgtcagaatggaagtttcatcacccgctgatgagtgttagacagtgcgtcagttcatctcaaagttgccaaaatatgcacctacctgggtctgctttgataaatagataagaacttgtgttccttgcgagtccatcagaactcagttatcataatcatctgtcacatgttccttaaccctatgggcaattctagggaggtggctgatctagatgaaagaaggtccttcagcaactgtccagggcacttggaagaatatccaagctccccaccatgacctatgggcctgtgctgatctcggtctcttctccctgcccatcttcattttgttccatggcctctcatgttgcagatgtcaatctcaggtcctatttgaattattcccagttgcaaatcaggaaggtattaattggtgcatgttctgtaagtgctgttagaattagagctactgggctggctgacaggagtttagagggcagcccttttcctcctctgagcctgtctccccagccatcccttctaaaagttgctgggctgatgcttgtatcttggctggctctgatgccagctctgacggggccaccctggaacctgcttgcacaggctgtcgagggcgtgagaacccaagcagacaactcccagtcctacctcctttgctgtgccaggctgccagtgccagctgaggaggccccctcctgcctctgcttgtttcccttgattgttatgtaatgttcggcagcaggaggtaaattcctctccaatttccaggcccgttacagcgcatgaaccccaccgtggggagccacagtgattgagctcagcagccaggtcccatgctgagtgtcataaatcaggcctattaccagcttctcctggcagatgccatagccaagaacctgcccactgcttgcgagacccagccgcctctgcatactgttaaaccagggctgacagatccaccggggatttaggggatcttcatgacactctggctgggtgttgccaggaatcttattctgagagagcaggaggtgacacagcccttggcaaggcatctcagacctgagatctcacagcctgatgtacggggagcagaatcagggcatgatcacctgcaggctacctggatttcctggtatggtggcctcttgtgtgcctggctgtacacgtaagaacctctaggggacttgttaaaaaatatacatctcccaggtccatccccagagattctgatttggtaagtgttccttgggacatggaaattagcattttttactagatcccaggtgattctgatgcaggtggttcctggaccaccctttgagaaatgctgctttgggaccagctgtatccctgaagtgatgcctgtaaaatgaatgcctataaattgtgggtcttttttttccatttccttctatcatttggctgaagatgtgtttgcctggggaagaagatgtgggcttcaagaatcaatggcaatcaaactgaagaataagacaaatctttgactatgacatatttaaagggcaataataatgctaatagcaaggggaaaagtcccgtagtaggatgttttgctgatacttaacgtgctacagggggagctctatccttgtttctcattggctctgtctgtatgaccaaggttgtcatatgtcctggttatcctgggtcagtccaagtttatgcaggttgtcccagtgcaacttctaatagttcccccttcgactctcgaaagtcccagtctggatgacagttgttactctgtcaataacccataggattgcttcccttaagacctccacttttcttccaaagggatctgccctatagttgtctctgaaggattttgtcagactgatcccagtagtggatttcacactaaagttcaccctgactctgggctgggatgaatggtaaaaggaactctttgaccaggtaatccccctactctttccaggaaatcccggtggggaaaaggaaggtcctatgacctgaacagaagaaacagaatttggtggccagggaaagccttccctgggggtccacccttcctgtgacctgaacagaagaaacagaatttggtggccagggaaaaccttccctgggg

SEQ ID NO: 636 - DNA, 2476 bp, Homo Sapiens
ctaacccaaacccctatcaagatggaaaacattattgtcactccaatgcgttttcttatgccctttcttagtgaaactccaactccactgaccccagaggcaactactgttttgatgtttttcaacatcgatttgtttttccttttctaaaattgtatataaatggaattatagaacatgcattccttttttgtaaaacttctttcactcaacatagtatttttgagattcttccaagtctcagcatatatcaatagatcattccttttattgctgagtagtgttccattgtatggatataccacagtttgtttatttgttcctctgttgatgcatccctaggctattttctatttttggctattatagataaagagattatgagcattctgtgacattctgttacattcatttatcttgttttttggctaccatgaataaagaggccatgagcattatattacatattagtatattcttttatcttatgtaaatacctaggagtggaatgtgggtcatagggtaggtataaacttatttttataaaaagctgctggacctttcttcaacataggtgtagaaagagtctgttttctttagtaacatcaaccagatagtatgtgaatttggcacaaagtaagtgcttaataaatatttgttaaattaatacacagagaaaataaatagaaatatagtgactgttctaatcctttcctactgtttactagtgaagtgtgactgtttacgaatcatttaagttccatgagccttcaatatccttttatgtgggaataataaaatgtgccttagatgcctgaaaaggttagtgctgaagggccaggggcatggggggagattttaggaggtgagggacaccattcatttaatacaagcgtgcccttccttctctccctgacctccccagtctgcaagatttcggcctgcagctgtcagggaatatgccaaagcctaggcccaggaggggtcagggtaggtgaaaggggaagaggcacttggatcaaccattggttgctctcaaatgtctaaagttggcatttatatacttgacttctctcacagtttctctccttcagatttaacgtctaggtttctctgattttaaaactgggttatttgaatgtcaaactttcgataaccctttaatagaggtgtccattaacctgtgctaaattagagcccagcgtccctggaaatacatgtgacacccacatgaataccaaatgccttcattaggcacagcacttacatgatgaataccaaatgcagagcccaacgcagggacacagatttcgcttcgaggacttgccaacacatctttgcgtttcctcagcggtaccggtcagccctgtttgctgtttatttccaggtgatgagatgtggcaattgtggcattggctgaaataaataaatggcatcctaatcaccaagttcagagatggagcagcaaaggaggctatagctgatcactcaggagtcagcaaaaggatgcccacttagtatgcaagacgacttccaaacacttcataaaaggcgataactttctttgaccaaagaatatattatttataagtgattccaatgccttcttctctccctccttcactgccatcctcctgccccccattttcactgtatgttgtagcacttgttcagtgatgaagcccctcgtaataaataatttataaagcaatttacaagtacattattcttagcaataagataagacctggaagaaagtgttttactgatacacacacacacacacacacacgccccttggcttataagtagcaagctatcagaacaccaataactaaggtccatgggcttggggtgaagggtgttataagccatagtgctggagcccttatacataagccatgtaaagtgtctgaagtgtatttgcataataaataagagaaaactcactaaaaacagccttttctcttaatccttgtacacagctgccatggctttgtccacatggcgtgatactaagtgaagacaattttcccttaatggctaacttctcttgagtacatccattgagccaggcccagtgttaagagttctcaataaattgtcttattttatcttccctatctctatgagatatgttttattagtattcctgttactggacaaagtaacagaggctgcctcccagtcttcaacattcagtctttgaattcccaatccagttaaagtcactcactcaagtattcattcaatgctaatatcctacaggcatttgataagcatctgtcattctttattctgggagctaggatgcatagacagatgatgcatctatagcagtactgcctaatagaaatacaatgtaaatcacaaaggcaagctgcatataaaatttcaactttccttttttaaaaaaaattagttttttggttaaattaaatttaaccaaaaatttggttttggtctgttgcacagg

SEQ ID NO: 637 - DNA, 2497 bp, Homo Sapiens
cttggcagaagtgcaggtactctgtaaccccagcagcccctactccatccgctgttcaggtctgctagttaactggtatgccctagtagggcgaactggctttgcatgtttgaagtcctcttgtaacaattggtaaataacttctgctctgagctcccgtcaaatcctctgccaatacccttgcctcctcagcctcttcccaggacctccagacctcccactattcaggaacctaaaagaaaatacttggcaaagccagaccctgcaagagctgactccaaatgcacaaatgatttcagttctcatttgtcagtgctcgggcctcactagttgttggaaccctgtgaaacatccgcactattcattacatccaaaggaagcaatctaactccctaattgggtttttccagcctctctcactagacttgaggcaaggggaccacatcccctacccaccccttcttggaatggcagtaggaaaaatactccaacacattttcccaaagaaattctctctttaatctagcacctcaatctttttatacctttcatgtggcttttgaaccttatatattgagggtccgtattaaatgttcattcactgaaattactgctgacaatcaatccctacacaccacacacacacacacacaccacacacacacacacacctaaatgtgcttggctataagaatttcccatgcagcagactattgaactacagatttttcagcattggcatttggaaaaggctcaaacctgaaggcagagaaaactaatagcctaaggcctccaatctaaagatagattctactaatcctaggctggctgccttgtacagctttgcaatgtctcctccacatgtgagcctggcccgcttgcctctcctgtttctacattctcagttccttggctggctcccccagggataactctcagtgcctgcctgatctgtgttacaaagcagacatgaatagccaggccagagagccatgtactaatttcctgggtggccaatccctctctctcatatcctagtgccattttaagggaaaagaaatgtaggacatggaataaacagagggaaacctgcttgatttgttgttaatgtgtcagtgttttgttttgtgggtttaacttgtagaaggcaggtctttgtcttgttactctctggcatttaacagggcctgccttcagtgactcagccgggtttccttagacagaaaacagccacttagtgccttttacaccaccaagaaaatgagattattccttgaggagatcagcagctctcggctgctgtcgaaagggcgctttgcctgtttgtttggctgaaaggcaccacgcagcccaggcttgtttaaaattagcttcctcataaatcacttgcacaatgaagtgtctgcctctgccctctgacatatttgtgtctctgtttatttttaatgatgacatggctttttctgtttccatttggctctttactctccacactcccaagcactaacttctgtggcaaaagtacaaaatctaagaaactgcagggaagaaagagttccttttctaccagcacataaatgtagtggggaaactgagttagccttgggggtatttctggaggaaattgcctcctttctaactttgtcagattataatatcctgaaattgtactttttgaaagagtaagagggtgatggcaatattctgtaacttgataggggtctgtgttacacacgtgtatgtgtttgcaaaactcaataaatgtatatgtaccttacatgtaagtttttacataaagaaaaaagtaaactaataatgaactctaataatatttatacagaactatttaagaagaagtatactagttttctcaatttactttgaaatgcatccaaaactgtgataaattaattgatggatagatggacagacgtgataaaacaagtagaaaaaaaatgttaaaggcaaaatatagatggtaggtacaagtctgttccctgcaaaattacttcaactttgctgcaagtttgaatatttttacaataaattattagaataaatgctctcttggtgacccacactgaatccttggaaacatcagagagccacagcttctaaaatcctgtattccacccaaattttatttttaaaaatctatatttatatagagttaaattgcaataatttatgacaacaaggaaaacagtatccttgacccagtaaaaagtacaaaatacagaatattctaagagagagggaaattttattagttagacacataagaaccttcttcaatttaaatggcatgtaactagaagttcttaatgcagctctctaatccaatatataaaacacaaatgaagaacagtaaagggcatacaatgaccaaaacccacataggatgaattcaaatgggcctggggtgagaaagtccaaccttagtgaacccacagttactgttgaaacaaacaaacaaacaaacgaatacccagaaaag

SEQ ID NO: 638 - DNA, 2396 bp, Homo Sapiens
cctcccttcctggcctcaccttggcccctctcttaccatttaaatcctccaccctgaacaaagtagcaaaatgtaccccccttctcatgcggtttagtataaggacaggtttggatccctacaatgaaagttcatgtttctaacaagtgtccacagccagtgccctctgcatccatttaactgttgcctcctgaaagctatcattttctatttcctgtgactaatgtgcactgggagctaaattcacacgtgtgtgcaggaccctacttccaaagacatgtttcatcatcgtccattgacagggctctcaaccccaagccaggacccacgcatgccagaggctgtggcgagccacgagcattgcgtttactcatgcatgggcataaacctccatggcctctctcccctgcacagtctgagacacagggtggatacgcagtaattcaggctcctacagcgggcctcagactcacccctgccaggatacagatattgtagagagatttttttattgtctatctccctcatcagcctgagctctctatctccagatctttcctgtagttccttaatattctgaacaatactatgtggcagatatggtttattccattttacagatgtggaaactgaggttaaatgtttactcaaaattacacagagactaaatgccttaatcataataggactcaagtctctttggtccccaagtttcatgttcttctcacaatcccccagttaatatatctagtccaaataaagaacagattaactgactaatttaaactcccaaactcacttctgcaccagtgctctggaggatcaaggccatatccacagagtacagagcaaaaaaggagaactagcaaatacccagagcatttggcaagtatcttagacattcaagccagaagatttaggagtgaaagagaattcttattatcataattgttatcataattgccaaaacaaataaaattaaccaaggacatgtagctgtatctgcacccaagcaagactgtagcagttcttaaccaatcaacatgtctattagcatgaagcaattgtgtcttgcctgtgatcggcacctcatttttattcatcaaatatttattgggtaccagtgatgtgccaagccctgtgctggaactcgagatgacacagatgactgacgtggtccccgcccttgggaagcatgcagtccaggaaagtcatagaatgcagctcccaagaagaagccactggagcaagcagatgaaggttgggaaatcatgcaagcctagggcagaccagccaaactgcaatgggaatgcagctagctactcactctgaggccctaaagcggaataaaagggactgcaacagcttagatttcccctttccctcctcagggacaggagtagccaccattcaaatctttctgtgatgactagctgtcttagtcagctaaggctgctataacaaatcatcattgactggatgatttaaacaaaaacatttatatctcacagttctggaaactgggaagttcaagatcaaggcactggtagatctggtgtttgataagggcagtctcctggtttgcagatggttgtcctctagttgtgtcttcatatggctagagcactctcaagtcttcttataggcactaatcacacctcccaaaggccccacctcttaatagaatgacactgggggctagacttcaacatatgatatttgggaggacgcaaactttcagcccatagcatgagcagtcttcatgcacaggaggctaatcatgatacttcatgtgcctgccatttgagcctcacatctctcctccatgccagagtgggtcactttatgctaccttattcatccctgatgctctcccttagttgaacagaatccccttcccacccaaggaatacgcattgccctgtcaaacaagggaggctttctcacttagggcaaagtataacagcatcctagctaggatttgggggactcaggcatggatcatttggaggctagatgggctgacagccaactggtaccagacactgtcacttcccattaacagcccaggcatctgggagcttgcccacctcagggcaagtccattgatttattttttaatctacagaaacctgaatctaaaagattggcagtaacatgtgatgcccatattcaggaattttagttttggtgcactgggggcccctgcttgccttttggtcctagaaggcatctcaagggctcatgcaaattaagttccttacagccaccccagagatgccagggtgccccagatgggcacaccagtgacaccatgccatctgatgcttggaccctcccagacaactgctttgctagcgaataattcactggattcagccattgagacactgggg

SEQ ID NO: 639 - DNA, 2391 bp, Homo Sapiens
caaaaaggcaatacacaaaataactaagtacagtatgttagaggaaggtatctgctatagaaacagatcacagtaagggagccagggagtactggggtggggagggtttaccatttggataaggtagccaggaaaggtgtctgctaaagtgacatttcaacagtgacccataggaagaaaggaagcaaaccatgtagattatctgaaggaagagagctccaggaaaagggaacagcaagtccaaaggccctgaggccggagtgtgtctggcgtgttcaaagaagagcaaggagactaacatggctagagtagcatgagaaggttagaaagagctaggcaatgcagagataggcaatgcagccagagagaggatactgtgagatcatgtggggccttataaagccattgaaaagactttagcttttactctgagcgagacagggaagaattacagttttgagtagaatgctgttatctgattgacatttttacaaagtactttgtgactcagttgagaatagattgtagagtagatggaggacaaaggagaaagctaggaggccagagaggacagtgatgtgataatacaggggagagacgtgggtggcatgagccctggtgatgaaggtggtgaaaagtgattggattctggatatagtttgaaagtgaagcccataggacttacaggcatggttgcaaacaatgtgaagtgttacagagaaaaagcacagggatactgtgtatcactggtgagtagaggctgcttttctaagaaagcgaccttggggccaaaatctgagatccaagtaggagttaatttgataaagattttacagattccctgtctagtcatctgcagcctcctgacaatgagaggaggggagggaacggaatgggagaggaagaggctgccttctcctgggaaaggggaaaactttgctacaaaaagctggaaacagcccaaagagtcatgttttgttagatatgtatctgcaacccaaacagctttgctcttatgggcctgtttgtcatagatcagttagtgggtagattgcttcggctggaaatggagatttagacaatgccagagtggataatggtgcccgaacgctgtcaggcgctaatcaggactcggcaatgactctgctgtgcagattgaagtgcgagcatttggagttattactcaaggcttgtctctgcaattagatgattgcataaccttaatatgatcaatcttgccggatgtgaattgtgcagctgtaaccacaaaataaggtggcatttctgttttcttgttgaacacaaacattatatatgcgcaagtcataattttataacggtcgcttttggcaagaaagagctttgtcagtcagaagatgcagttgaggggaaaaaatatatatatatgcaatacaagtgcttaaagaggcggtcataatgtcaggcttcgccttgggaaatattgctttgcgggttttgcatcttctccttttttcctttgtacacatcaattttgaggccaggaagttgggaaacttggagctcatattgagccctcccgggacaacacagctttgcactcgcacatgcaccacgttgagagtcatagggaatcagcttgatattcatcagcaattgcacatcacaccccgttcatcaagcctcattgttcagtggggacgtgagctacgacttaggctcttcagattcgagatccttgcagaaatcttagcccgccccccaaggcccggcttgagggactacagggacacagccctcaaatgccctttccacctcacaggctcagggtgcgtcggaggggatgagacggatgaggggaccaatgctgagaatgtcaagatttctcttctgactctggcccaatttgcagggggcacagaactctgagaaaggaaaaaaaacctagaggttaagagttgttttgttatgggtcgtagcttaatcttgggaaaggagagagagagaaagagacggagatggggtgggaagaagggagcaaggagatacatttaagaatagcgcagtgtgatgggatgtccagagatgaaacctagtggccaaataagtgaatgcctaagattaggtgagagcgtgtgtgtgtgtgtgtgtgtgtgtgtgtgtgtgtcagagaaaaagaaagagaggaagtgggagaaggagggggagagagagagagagagagtatttaccaatagcatctgaccaagactgtaatttcatggctgcaactaatgacaaagtcaagtgtcgaaggcttagttctcgaggagacagaccctgagatacagatttgaatacaagtttatcggggagtgctcttgggtccacatctacagggaaaggcagcaggaatgggcagagggagagaca

SEQ ID NO: 640 - DNA, 2470 bp, Homo Sapiens
aaacccggtgagttttctgactccaccattctcattcccatcatgctgtcattttcattcctagaaattattacaacttgtatattttatttagctagttgtgtactttataggttttgttgttgttgttttgtattgctttatattttcttcttgctctttttcccccagaatgaacactctatgaggtcaggaactgcctgccttctttacttctgtagctccagcaccagcacagcacttgacaataaaacccagcagataaaagcaaagagtctgggccaggcttcctgggtctgaatcccagagctggtgctatctaactgtagagagacaatttggacaacacagtgtctcagttttcccctctgtaaatggggccaataatagtagcgatcccatggctgggcgcagtggctcacacctgtaatcccagcactttgggaggccgagacaggtggatcacttgagttccagaccagctggccaacatggtgaaaccccatctctactaaaaatacaaaaattagccaggtgtggtggcaagcgcatgtaatcccagttactcgggaggctgaggcaggagaagcagtagaacctgcaaggcggaggttgcagtgagccaaaataacgccattgcactccggcttgggcaacaaaagtgaaattctgtctcaaaaaaaaaaaagtagcaatctcattaggaggattaaatggtactatgggtaaagcactcaagaacagtgctggaacataggaagtgctatataagggtttgttttatacgtagatataggtagatgtagctagagataaaatggtaggtgttcaagaaatatttgccaaattaatatgctaagtctaggaacgggacaaagtcctaactggggcagagcctcagatagggacaatgacactcccaagggtaagttccttgatctgaacagagaaaaacttggaaagcttggaagccagaggcagctgggaagggcagctgtaagcaaaggcctggtggggtggggcaggggccacaagagaccctccatggaacccccacctggaatagccagaccgagtactaacacacactgaacagctaaatcatacattattgatttgtcaaacgtatttgcatataaataagcatgatcattcatggaggcccgagcagtggcacctcccctcagtgccatgattacagatggatggccctagttagacacgaaccagggacgctgctacccctgccgcaaagtcagcggctgatttaaaactacatttattggagcatgtaagtgtgacagcctagtggtgagtttgggataattagtctaaaagacaagataaacgactcctaaaactggtattgtgacgaagatcccaccctacccccccgccacagccagctcagccctgatgccaaaaatacagccgaagataattaactaggaaatgttaacaggcaggattatgttccaattgcattttccagaggactttagaattttacacccaagttgattgtgttcccctccccctggtgattaggcaggagaggcggattcttagctagaagcagaggctgggtggggtgggcagacaggcccagacaaggtctctaaggccaggcaagcaggtggctccagtcagccttccccgagcctgaaccgagatggatctgctgggtgaagcacgttgacccgggtaaattatatctgccatgttaattcattccacgtgggagatcagccatgagctcagaggctggcatcggctgcctctgatggatcaagggacccagctgctcagacacaatgctagagacttgtcattgcgggggaaacacggcttgctaatgctttattttaattgtcctaaattacacttgaagatgcacagcccaggaggccagccagcaaatatcaaacgttaccttgaggatctgcttggcctagagaggaatctgcagtcctaggactggggcctcaccgctttgctgatacagaagagagagccactgccttttggtttcaccacctgcctccctgctcccaaggaaggggtagagaatgccctgagacctctgacgcatcctatccataggtttgagggttccttctctgagagttaagtctaatggacctagacagaaagaggggggtgggcctttggagtttgtttgaggcaatcaaagaagaatctaaaaggaaggcagcacagcagaggaagccatggcagaagatgtcctcgtcctaatccccaaaaccgtacatgacaaaggggactctgtagatatgattaaagatattgagatggggggagtgagtgagagtgattgcaatgtcattgcaaggtccttagaagagggccagggagagagatgaaaatgctattagtcagctggcattgaagatggcactgaaggtgcaggtgggctccagaagctggaaaaggcaagaaaacaaagggt

SEQ ID NO: 641 - DNA, 2493 bp, Homo Sapiens
agtctcgctctgtctcccaggctggagtgcggtggtgtgatcttggctcaatgcaacctccgcatcccgggttcaagcaattctcctgcctcagcctcctgagtagctgggattacaggcacgcaccaccaggcctggcttttttttttttttttttttttttttttagtagagacggggtgtcaccatgctggccgggctggtctcgaactcctgacctcgtgatccgcccgcctcggcctcccaaagtgctgtgattacaagtgtaagcttgatgtttttaagaaacagcaaagagatctgtctggcaaggctcgaagtgaggatggttgttcggaagagggttagcctggcaggccacagcaaggccttcagagtttactttaagacaaaaagctattggagggctctaagcagaggactaacatgatctgaattttttaaaggattgcaaagagaaacacaagttcctactcataaaacaaagatgtatctctcataatctagttataagtcaaagaaaaaaagcatagaataaaagttgtgtagtatgatagcatttttgtaagaaaaaacacgtatacatgggaacaaggctaaaaggcttaataccaaattgtgatttactatggtttgtgggattatggggttttttttgttttgttttgtttgcaatgcttttctttgtttttcaagttttctgccttaaacatgaattactttggtaatttttaatgttatctttaaaaagaaaaaagcactccaccatgagacttcccttgtctgaaatcttacttcaatatgaaaaaaaaaaaaacaaactcaaaaccaaaaaccaaaacaacatggggaacatttttttccaaaaattaccacacttcccatgcaatgtttgcctgtcatgaaccactgcacaaatcaagccccgctcaatgtatcaaggtcacaaaaccaacttggttaatatgttgatcattacatagtggctctgtcctctacagcaactttgataccatctttccaaggcagcaacagaagggcccttttcattcattttctatgtgtctttgatactattttgcgcttctggatttttccactgtatgtctcttagaaacaaattaagctcgaataagttgttccagctaatgaagtgcgcttttggctccttctccgtggttcagaattatccggcaaaataccaattgttttaggatgcattttctcttagttttgaaatattgcaatactaagttaccacaaataaagagcattgagataacaacacacaagaacgtgtataaatggaaactactgtaatccttttttaaattaaggacgtgtggacgcctcatgaataaacatttaggatatctggataaatatatactatgtgttcacatagataaaaacagaaaggagcattccttcctacctcactcccccaccccaagtcacataagtttctcgcagggcacaagcccagggcaatcactgctcagaaatgtaaaccatgcaactcaaaatgactcaagccctcaaacactccccacctaagtcctacatcccatccactcctcaatcacttccaacaggcttccctgaatgaaaatcccaaactgggaaggcttaacaagctccaaactccactcacacgccactcagggaatccgaggacctggggcccacgtgtagtgttttcgcgtgggcagacaagggtcccaagattcagggtgctactgtaccccgagtggttcgagtcctggctctgccgccttcactggtcgagctgacgctctttacaccgggggcatgggctgccacatcccagcagagtgcaagggccctcgggcgtggacgcaggcggctctcgggtgcacacgcggaacgcacactcgggcatgcactctcacacggtcaggcgggcctgcgcgaacgcccccgcttcccctctaccacccccttttgcgccttctacgatggtggcacgcggggctaccctgacccctaggacccctggacgcccgctcctggagcccggggggtgatgacagatggcggagggcggggctccggggggaaggggcggagcctctcagcatgggggtgctggcggctgacagaaagaccaggggcagccggcgggagggggctgactgagactgcgggccggccgcgggccaggcgtggcgggaaggagctcgcgcagacacagggtctgacaggcagagagagatacagacaccggggactgacagccgcgggggcacgcggggccggctggccgtggcgggcgctcacctggcagcggcggcggtggcggcgcccgcgaccgggccgctcttcccgcgctgcgggcctccctccccgcggccgggcgggcggccggcgcaggccccgcagaggcggcggcggcggcgacgccggagccgcggactgctgagcggcggggacgcagctgcaccaaccgactccgggccgctcggctgggct

SEQ ID NO: 642 - DNA, 2385 bp, Homo Sapiens
acaggttcccaccaccatgcccggctaatttttgaatttttttagtagagacggggttttgccatgctggccaggctggtctcaaactcctggcctcaagtgatccacctgcctcggcctcccaaagtgttgggattacaggcttgagccactgcgcccagccctttcttttcttttctttctttttctttttcttttctctttttttttttttaagacagggtcttgctgtgttgcccagactggggggtagtgttgtgatctcagctcactgcaacctccatctcctgggctcaagcgatcctcccacctcagcctcaagaataactgggactataggcgtgtgccaccacacccagctcatttttgtattgttttataagagttgggtctcaccatgttgcagaggctggtcttgaactcctggactcaagcgatcggcctgcctcagcctcccaaagtgctgggattacaggcatgagccactgtgcctggcctcattgtataattctttcaacttttctgtatgtttgaaatttttcatcataaagtgttggggggggggataaaatttccatttgaaaatattagctagacatttctcataaaatctttcttcattgctagatcaaggttgccacgagactatgccaagtcaattgtccttgtgtcccccaccaatatgcccaggaagaaagagtagggagacaattccgaaagaggccttgagggtgctagggagttctagggactagctaaggcgtttgggctctgtgtttgaggaaactgaggctcaggctgttttgcgttgctgtttagaatccagggaagtccaggatgttttttcttaagccatgttggggtgcttaggctcagtggagaagcggggcatggccatatgaatgatatgcagttggcagcacatagtaggcacacaagtgtttgctgaatgaatatttacatgaaattggaaaggagccttccaaagatggagccagcaggagacagtgaagttgcctgtgcgggccgggggagtctgtctctgtctctgccccagcccacctctggcctggcctgagtaccttgagaagtgggcccaggagaggcccctggatccctgggttcctggacagccagggtgagggcgctttgccacattcttaggagagagcacatccaaaacaatttctttttctaaaaactcagtgctaacggattccagatgtccgtttgttatataatggggtttgttttaatagcgtcaacttccagatgtgcagcctggaatcaagaagcccattggccccctgaggacactgtgagccaagctgagagctgcccgggggagagacatggacgtgcagaaccagggatgggagaggagccagggtgccttcttgctgcccactgggctgctcacctgccctgcagctgtccccagactgaaagacaggaagggtgttcccgcttccttttttttcagtcctgactctgagcaggggctcccaggggacaatcatagacaggcagcttggggagggtctgctttggaatctggttcaagcaggcctagctggatgagcctggagaagtccttggcctccctgtctttgaatggaaaatagaataacgccattctacccagagaggtcattgtgcaaaatgaaatgaagtaagcagcacagcacggggctcagaaagccttgactttccctgagtggagagaacaggggcccaagtcaccgagcatcctcccctactcctctcagcaacacggatgcccctgggcagcacgggctgcattttccctggaacactggaaaagagccaaggtggggagctcaccacctcccccagtggcttgttccatggccctgcagctccaacggatagaacattcttccgttcactgagccaaaggcggcctctgtgtgacccccaactggtctgagttctgctctctggagctctgctgagcaggccacaccctctttcacctgataccctcgagtatgggaagacagagaccgagtctcccaacccttttcctagtaggcagctgcagttatgacatcagatggacgaagattaagatgctctaaggagagatgttcaaaatcccaaacaagaaaagtctcaacgtctgggggaatgattctgtggttctccctgtgtagatgttaataaaatctgtatgccttcactccaattcaaagagaaaagggccaggctcacgcctgtaatccccacaatgggaggccgaggaggatcacttgagcccaggagtttgagatcagcctgagcaacatagagagacctgtctctactaaaaataaaaaaattaaccaggggtggtggcatgtgtctgtggtcccagctaattgg

SEQ ID NO: 643 - DNA, 2440 bp, Homo Sapiens
cccgcggccggggtctgcccggacccccgcccctgcgcgcggcccgcagcggcgcactcccaaggacggccgcccggcccgagcgaaagcgggagcgggagcagtagcctggcgtggcagaggccgcccctctccccaggccgcaggccgccgcctgccctccgccaggccgcccgcccgccggccccgctcggaccccagcccggccgggcctggacgccgccgcagcccctcatcccggctccattcataggggcaccctaacccggccggcggggcggggccggggacccgcggacaaggccggtccgccgaggccagggaggaaaataaaaagttaagagaagaacttacctaaaatggctcctgcagcagccaaaatacaaacagctattatttggtgaagtttagctcagacaccctgcaaggacaccctaacccatctcgggcccgccttccctgtcgcgccattgggcttcgccggtccaaaacacagacccattggtcatcccggctgccgctcagacagaagcccatttcaagcttgcttgcaggggcgagtgatgggctcgctccattgtgctcgtatttgcatggatgtgatcgcggccttgattggccggcgctgagaccgccccgccccctgcctcgtgccccccgccttggagacgccgctgcgctcggccccgcccccccgggactagcggcagggccacgggggcggggcggggccggggtcccgcgggccgagggggcggggcggggtcctgcacgctgcagatcgcaggcagggggcggggacctggcgcgctcgggcgccggcgggggttcagcgcccaggtggaggtctctcaggtagctggctagtgatctggaagacccggggctggcgtctccgggggtgggggaggatgtggctggggtcccgcgacacaggggttccgcaggggccgaggccacgcgggcagatgcaaggagaagcgagggacccgcaggtcaggaaaagaagatcctgagtggccaagcgaacggagcagcctccacccgcgtcttctgccgctcagcccggctccctggtactcctggctcccaacgggcttcttcccaaggcccagcgcacccgggagttttccagccccggggaccctgcagcgccttggatagatctccgtgaaatcaggtgtcgagctatggtgcatttattttcgggcctgtcgcccctaccatccttgtagcatcctcaaggacagggcccagtgtttggcagagattcaactaattgttacactctcgaattcattcgttagcaggtaatctttgagtgcccactaaattccagacattgatataaaacgggatattgcggtcaacaagacaaagcccttgctttcatggaataggcgaaagactaaatacaaggggtaggtagtgataaatgctgtaaagaaaatagatggaagaagaagggaaattagaccagggtttaggaattaggaaattcctaaattatgaaaggaggtatggagagtttgccctgcctggctgaatactctgtatggcgtctcattactgccccctcccaccctaaccttggcagtcaccagccctcctcgcgccctgcttgcccatcgtgttttctaagcacccactaaaaaactgattggattctgactgtagaggctcattctacctcaaagcagaaatgatctgagtctgatgattctaagagcagtttgtgggatacatttaggataagcacattttgactgtgtcaggggccatgataatgatttagcagaggcttactaactccagagagagaatatttttagcttctttgaaatcccagttttctgatggctttcagcctgtggccctaactctcttctgagtaacactcttcacttcttggcagacacaagagatttctccagcttgaaaacagaggcagcagccccctgctgcctatctctctcatctgtgtgcatttctgtcatttgactcaaggctggccaagatgtcttatggtctttctttcttgtctttcttcctcccttaaacagatatttattaggcaccaactatgttccaggtattgttctagacacaaggaatgcagcattaaacaagacaaataatatctttgccctcaaggagcttacaatccagttgagggtgagatagagagttacgcatagatcctgaggatctccaattttgccaagctgctggtgagtgagtatactgagggctactcgcctgctgctgcctcttggggacagcatgcttgaccttctgaaccagctgcttcaggagctgaagctgaagctgaggtaggaccaggcagctggtagccacaacctctccagctcaaacaccagaatcacaggttccaaagctctcaacagtgcccatgggagtcttggctctcatgtcttga

SEQ ID NO: 644 - DNA, 2422 bp, Homo Sapiens
agatggaagttggttggcatgccctgaaatggtgaggctccaggagacatgggtgggaccccttcaagaactgctacaaactcctgctctgaaatcagactacctggattcaaacctccgatgttccttcctatttgttatgtgaccttgggcaagtcacttaagccctttagtcttagctgttgaatagaaaatatgatagtccagactttaccaggtggctgtgaagattaaaagagataaggcatgcaagacacttacagggtacctggcacaaggcaaacactcaacagactttagctgttatttgtaactagtctatttattgtactgaaactgactgggggaacattcagacctagacgatgttatggggaaaaatagacaagaaacaacaacccaaggttttatccaagagctatgtgatgtagagtgtgaccagtggacagcattgtatatttggacaaatatgaatatataaacttttgagttgtctttcggatattagcttgtttataggaggatcctctgcgcagttgatgaagcccatgtagctggaatcaaaagcttctgtacccatgggctgaactggtagtagcaaactgaccagggaattagagcatgacacccaagatagtgggaaccagctgagatgcaggtcataatcatgataacagcaggtaacatttactgagaattttctgtgtcaagccatgtgcaaaacacatcaccagattatgacattttctcatcacaatagtccaaggtggtgtccctgtcatgacagcctgcctactctcctttcagagtgcatgttaaaataacctctcactgcaaccagtggatttcccagtagtctctcttttttttttatttttttctggagtccggcctttcataacaagcccccaggtgcatttggagttgctacctgtaaatgtggcaggatttctcttcatcagacttttgtccctgttctcttccctgaagagcaaacatgctgcactagaaggaatcagtggctcattgtcactggcaaagccgaggcagtgggaggaccattttttctctgggttcagcaaccctcctagtggttagcagacagcagcataatggccagccagtgtgaaactgtgcaaattgcctcataaataactcgtaatgcacaggcaacagggagaggccatagctcatggataaatgactccctgccatttcggggtattaaaccagggataatccggacctcaccatggggattcattaactactatgggtttcccgcacgcaagcctgctgggactcaggcctgcttggtgcttcttgtggcatcatgatgggggcaaaacacttccaagcagggccatgagaaagagaatgtaagtacctttaacaaaccagccaggggtgaaccctgtaggagccaagtattttctctgtggaacttgctttctgaagaaatctctttgaagcgcagagaaaaacataataaccttaacaattaacatgtattgggcatttactctgtgccaggcactgtgctaagtctttttttttttttttttttttttgagatggagtctcgctctgtcgcccaggctggagtgcagtggtacgatcttggcttactgtaagctccaccagccgggtagctgggactacaggcgcctgccaccacacccggctaattattgtatttttagtagagatggggttttgccatgttggccaggctggacttgaactcctaacctcaggtgatctgcccaccttggcctcccaaagtgctgggattacaggcgtgagccaccgcacccctgtgctaaatcttgtgtaactcccacaaacattccattgagtggatactattattattagtcctattttcatagaggatgaagtgatagctcacagaggtttagttatttattttaggcaatatagccaatatgtggtgaatgcattagtcagcttttgttaggttgtggtaacaaatagtccaccagtctcagtggtttaaaatcacaagagtgttttgctcctattttatgccactcatggatcagctgctctcctttacctgactttattacaggatccaggctgaaatagtagcctctatctgggacatactattctcatggcagaagaagacaagagcaagaaaactggtggaactggccatggctgtgaaagcttctgctcagaatgggcatatatcacctctgctcacatttcattgatcaaaggtggtcatatggccaagccttctttcaatggggtgaggaagtttactcctcacactgggaggtactgcaatgaatgacaattggggagagatatctaagtctcttagaggaaaggcagagatcagagaatagtaatataatctatgcagctgagtgagatcagatctttgtgg

SEQ ID NO: 645 - DNA, 2186 bp, Homo Sapiens
gtgtgaaaatgcttccttaatcacatcgaacgggaggatctccgaccatctgtactttatttgaaaacctagcatccggttgggatgtttgggtgggtggaggaccctgccgtgttgggatgaaacagcagggacacgtttaaaacacaagaaccatgcgcggtggctcacgcctgtaatctcagcactttgggaggctgaggcaggcggatcacaaggtcaggagttcgagaccagccttgccaaaacggtgaaaccccgcctctacaaaaaaaaccaaaataaaacaaaaaacaaacaaaaaaaaccaccaaaaaaataatcagccgggcgtggtggcgggcgcctgtagtcccagctactcgggaggctgaggcaggagaatcgcccgaacccgggaggcgaaggttgtagtgagccgaaatcgagccactgtactccagcctgggcgacggagcgagactccgtctcaaaacaaaacaaaacaatcccacgtcaagatcgctttgaaacacaggcagaaaaattaggcaaaaaatgtcaaacggctaattaccttggctcagttacacatttactcgaaagcccgcctcccccacttttagccccagcgttaagaatgtaaaatagggcgcttagaagtctaagcgataaagatcttcttaccgagagccaagggacaaaactcattacagataagcctagtcctcccatttcccccggacgcctctccccgattgctaaagaagcagccgctccccgggtagctgccaggaaatcagtccggccccgcggcgctgctttcaccctgcagggtgtaagaggcgcacttcctgcgccctccccgcggccaaaccggggtgcgggaaccttctccagagaagctgcgagttggggaaactccgccaccgatccatcgtggcgccgggaaaggggatgcggggctcggaagggctagatttcgcaatcctgggatcgacattcctcccctcccccactttccccagccttggactgggccaatgaaagcccgaaaaagaaaaaaaaaaaaaattaaatctcaatgtagccggagtgcaaaggccgctcggctttgtttcccggcgggggaatgcgctgtgttggaggcgcgaacaggagccgcagacggtgagcctcaccgctgcaaatgccagggcagtgaagccgaacagaaaaccccatcgctttaaaaaggcagctgtccgccctccccctttcccctcgccagggcgaggggcccctcaagtccgggatccgcgagctgcgcggaggatctcgccaaacccgagcaccgtgcggcgtcttttaagagctcgaacaacgggaatccagcaaaaaacaagccggccccagaaggcagcctccctcctctctccgcgcacgggctacaatcgcccccagtccccaaactgtcccagtagaggccgcgcggagagagcagagccgagggacccagcgcaaggcgggagccaagcgcggctgctttaagaacgcggagagcgcgcgcccgccgccagctggcccgggctgcgcgcccccgccgccaccgcgcgccccctgttcgctcgctccttcgctcgccggctttaaagtctctgccaggatccatgctcacatgttacttcctgtatggaggcatggccagtttccagccccgcgctcttcgttccttcccagcctgcgccggagccacaactttcaggagcatggactgaaggcgccctcgccccagcgcccctctgagatcctttgtgttttcctccgtttcctccggccgtttctattttggggggctctccgctccccctgcctctcccctccccttcccctctcgcaaacatgcctccttccttcccggggccctggaaggagctgcctgcctgaagcccggagacgccgcgccgcgctcagccccgccgccgcccgccggctctcgggctgtgctgcgctgccgactcaagttggggatcctcggctgctcgccgccgccgcccgcggtccctgcctgccccaggcccggggcatcgccgccggccgccgactccgcgccctgcccgatcggctctctcctttttaaacggaaagcagcctttctccgccgagaggatcgtccccagcgtggctctgcgttcccggtcactttttgagattttccggggggcgct

SEQ ID NO: 646 - DNA, 2420 bp, Homo Sapiens
agggaggcccaggaatgggatctgcctccctcctactttttatgttgggttctggagaatatttcaggggtggggaaatttccacggcaaaaaaagtctaaaaaaaaccccactgcattaccacactgtgcccttaggtcctcgagttcctgaacatggctctcccatacccataaggatcctgcccacaatgtttcactccatccttctctgctcgtcaggtaaccccagtcagagaggggatgcttacaatcccttcttctggggctgtgggcctggcggacacgtggcatttgcttatctttttggatatgttgtttccattgttgctggacattaccaaacatggtaacgtctatgttggccccttatccttccttaagtagacggggacagatcttgtgtgtgcatgcatgtgtacctgtgtgtccgagcatgtatgtgtgtgttcattgtaggcaggtgctatgggtcatgcgttttagtctggacttactggctcagacacccatgaggtcagagggtctgcaaagctcctctggccgtgtttcttccccataattcccagcaaactccctggtcctctgggttcaaggcctcagcctgttttccaggtccttccaggccggtggggaccgcaggccccgttacggagcttggagctcagtgtctgcctgggatacatgaggggccccgagggctcacatgtcccccagcctgggaagtcactcagccgggcctcggtggggctcagcagaatcctgggcacccccacggcctcctgatactccagcccctgccgcctccacccacacggagacagcttttctcctcccacatccctcatcccccatgacatctcttggtatgatcctgaccatcctagctggacaatcaagcttttcaagctcctcatgccgccccattctccccagcattgttgatttaacctcagggggacctttctcttgacgcctccatgcctcgtttcttccctctgcagattctttggcagcccttttgtgcagaacagccatccggttctatctcccttgcaaggccggagttgctgttttattcccttgactcatatataacaataaaaaaaatcattcttgctatgtgtttctttatctccatcaagtggttgaaactcaatctgattgtccgagcacttctggctggatttgggttggagtcgatgggattttatgagggttgtaaaagtcaagcttttaacatgtctcaaacaaattggcgtgtaaaggagaaacgttagaagaaggaacatggctgcagacgggaggcttgggaatgctagccgtagtactggggcacaggtggctttaataatgcacacaagtttggctgtaagttgcttctacaagagcagaagaggctgcagaaccactctcaggaggttgagatcaaacttctcggctcctgagtgcacacagttttgcatggcttttaaaatacagattccaggatcatccataacaatataaacctgtggttaattctgctgaattttcatttagacccaagctgtgttgtcagtagaaatgcaattgcgttagagaaaaactgtttatatttcttgagatactgtgataatgaaaaacagtaccataaacccccattaagtaagaagaacattaattgtatttcatgctgcctccctgggccagcacgctgacacagacatgctttacttcagcaaaacacggctaatctttgcagcacggtacccattttcccctttaattatacataattgtatagtctaatttattctaacgcctgacgccgaaaagtgcacatttatgaatcaagggttagtttgggagggaggagaattataaacgggtataattgcagtctcctgggggctgcttatgagtgatttcaaagaatgatgatgtttattctgaattcttaccagtgaaagacagtagggctgcctccagttaagatactgttctaagaacgcagataacaggacaatttgtctagttgcttaccacactagtggttttcctttggataagcaggcaagaaagattaaagatgtgggttccacatattttgtgatgtgatgaaatccaggcacacagacagcatcagcaaatgtgcaattgaatattaaaatgagtaatgtggccccaggcagcacagctgcagatctctgtggacaagggagagtgcttggaactctgttggatgatagttttctcagggggaaaagcaggatccatttgaccattagtgcaattcactttagggctctctctggaacagtgcatctagttttgcaatcgtatttcagaaaaatcacctttaagctttgatcataattaattaatcaattatgatgaatgttgatggtgatttagtaaaagtggaatgatgacttaggg

SEQ ID NO: 647 - DNA, 2437 bp, Homo Sapiens
tctgagaatctaatgatgtgggtgatctgacaggaggcggagttcaggcggtaatgctcgcttgtctgctgctcacctcctgctgtgcagcccggttcctaacaggccacgaatgggtacctgtctccagtccaggagttggggaccccgatataaagcctcagactgtgtctgatacagactaagccctagagaaactttgctgttgctatgattattattgacattattgatattattgacattatcattaggtcgggcacggtggctcacacctgtaatcccagcactttgggaggctgaggcaggaggatcctttgagcccaggagttagaggccggcctgggcaacacagcgagacctcgtctctagaaaaataaaaaaacaaaaaattagctgggtgtggtggcatgcacctgtagtcccagctacacaggaggctgaggcaggaggatcacttgaatctaagaggtcgaggctgcagtgagctatgattgtgccactgcattccaccctgggtgacacagtgagactctgcctcttaaataaataataattaatttaaaaataaaagcattagcagtagtagtagtagtagtagtagtagtagtagtagtagaagtatggattaatccaagggggaaaaaaggagggagtgggactgaggtaaagcaagctgctacttggagaaaaaggtaaagaagatgaccagatagatgcgtgtgtagatgttcacaccatctccagagacccaagagactggcggcagtggtggagggagtggggacctgagggaggggaaaggacaccgactttccaccctttgtccccttccacgctgtttgggttgttcctttttttctgtgcacttgtgtggatattcaaaaccaaacactacagaaagaaattctgcaagaggtttccttccttagcgaaagccccaaatcgtccctctcagccccgccccctcccacccccacatcccggcctgtgggtggcccagtctggtctcccacctctgctggtgttctgcgctcctggccttggagcaggtccgagctggaatgccctgcaagaaagggggctcctcagagtccctcagagtggccctggctctgggcagccaggggtgtggggctttggggaggggggtcccggctgactgatgagaactccaaatgctccccagccccggctgctaatcacttccagattggccgggtcagggccagggccgccgccgcctggctccataaacagcccgtcgctccagatggcggctggctccagcctggcgagcaggttcatgggggactggggggtggcagcaggtggaggacccccacctcactagccgcctcagctgccacacctccacaccgccctgagttggggaccctgggccagaaggggtggcagaaactgaacccattgctcagaggagggaaactgaggcccggaaggggcaacgtgggtggtggtcaaggtggggggaagacagagatgtaaggggggtgctccttgagggttgatgctgggttcactttacctctgtgaatccagcacaccatgaggatgccgtaaagacccgaggagggagggaaggggggcatcattgccagctgggtttaaattctggctccagcttttactccctgagtgaataaattatttccacccccagcctcagttttctcatctgtaaaatggggatggctggagtacaggattgctggaagattcaatgattcggctcctgcagacagtttgcactccacacacggcgcaggcgctgaacacagcttctccctcttccttttccggaaactccttctattcctgcttctcctgccgccggagagcacagtggcctcctccaggaagccaccttgacttttactcagacctctccctttgtgccaggcactgtgcttttcccacagcctctctcacagggtctctcctcgacacaactggcacctgacgctcttgtccttttgaaaacaaggaaacagagggtcagggaagtaactggtacctagtgctgttagggccccgccccttgcagatgaggagacaaagggccagggaggcagtgggatggatatgttgaggtcgccaggaaaagacagcctgatgtgcacctggagctgtctctgaaggtctcacagaacctggcacagcgtcaggtaacccggctgcctctcctgccacacccaccaaccccagagcccacaccttggcacagaaggaagagatccaggctggtgctgggtcgtaatatcccagggaaaggggtaaggagccttgacctgctcccatacctgcctgtctccaaactgggctggatcctggctgggtggccgctgggtggtagccttgtcccaggacacccggcagcaggacaaggtgggggagccagttgctctgtgagttc

SEQ ID NO: 648 - DNA, 2383 bp, Homo Sapiens
ttgtctacccgctcctgggtggcagctccatctttgtctctcttggtcatcactgtgtccccagatcccaacaaagcacctcgtacaagaaagtgctcagtccatagttgcagaataaatgaatgaatgaatgaatgaatgaatgaatggaaagtgcttagctccacgcccgacccttagtaagcacctgaaacccaatgccgtgtggtggtgttagctttggctcccgatttctagccccatccaatcccaccctcatcagcccggcgcccgtgctttctctgcctggccagcttcctgctgcctgcacagtctcctccctgggtcaggacgacctctgagggaatcgtgggcctgcacggctggctccctctggctctgcctccagctcctcttacatctcccgggggcagaggcttctgggaaacaggctttgaagctcccctgggtcagacccgctggggccttccttaggcattgcctgatgtgaccccattagtgaacaaatggggacagtgagacctagagaggggcagccatgtccgatgtcaggcttcggggctcccaaaacatccagggaagcttccaggactctggcttctttgttgtttttggaacagagctgagctcaggtgcctgttttctagatgacaaaactgaaccccgttacaggctttggagccaggtttgaatctcagtcctcttacttcctggctgtgtgatcgaggtttgtcacttggtccctctgaggctcagcttccttgtctgcaaaatggcaccctaatggtacccaactcacggaggtgtttggggggacaaggtcagccatcctgcaggcaggtggggtctctggcctctcccacggggtcctgggactcctggctccggaacccccaaggcccagcccctccagggcccgcatggttccctccttgctgggataatttacagtcccagggccatagctgctgttgctttatttttttcccttccccgacttctcccttcctcaccctggcctcacttctccagaaccagcttgtttttgttttctgtttttacggctccataaatgagtcacgggtctgatttgatttaatttcgttgtaattgttatcttttcaagcttgtttttttccactcggttactcacgagaccacaaaaacctaaacaggacggggccttccccagcccggcctcctggtcccccgggactccgggccagggtcagcagctcctggagactgaggtggggtctgtggagcttctgtggggagggacttggtgtccccagcaggactgggtatcccgagtcccgggctgcagctctgttgctggacagccttgagagaattgttcgagctttctgatttccccagcatcctccttagcaggctttagaacagggaaccaaaacccaggcacctctgggccagaaggtgaaaggatgagtaaggtggcctggtgctggctccggtgaactggagagaacaggctctcctcaggggacggtggcctctgagccagcaggcggcccggatcttcccatttagtaagagaagccagaagtctgagattgtatgtgaaaagtcctgatttttaaatgttggccaacgagtcaaattaaaaacaaataaacaaaacctgactctgtggatatctgtggccccgtgggccacctctggtctagaaggttccaattctagctgcggcagccgtgttctcagtccttccacccttctgcctgagcagtcccctctgcctgaaactctctccttcttcctcctcatctcagtcactctcattctctgaacctcggtgtgtctcctgttcgcagctcagaagagatgacatctgcttcatccatgttcgccttcccaaggcgcctagttgttcccaattcacttttgtttctatgctttctcttccatggagggtctgtcttgtttgagaccgccttcgtagtgggggaaattagccccttagttgttaaaagtcataacacatatcctgcctgtcttatcattcatttctaaaatggggcacgatacttctttggtcatttaaaaaccgaagacgcgaggccgacgcctccagggatgtgcgctgggcggtaggagccaggtgtggggccaaggagtgggggcggaggaggaagccaggtccccagccagggggctgagggctgctcctccaaagcttgggtatggacatgtgaccagggcccaccaatcacatgcagccatgccagatttatgaatcagaagttggaaatgttgggggctgattgcttaggactccgttctggggtgggtggggctgcagcccggctatttttccagaagctgcagtgggccagttctgggggcagtgaccagggct

SEQ ID NO: 649 - DNA, 2495 bp, Homo Sapiens
atacagagggtatagatttttctccatctttttttttcttacaaaagaaatgcaaacagaaaacataaacaagagcaaaatcccatgtaaatctaccactcaatcatggctaatctttaatatcattgtttttttctaaaattgggagtttgggatcacactggatctactacttggtaacagactctgatcttgtaacacatttccattgtaattctataccatcattttcatggctatagacttggcctatagctgtgaaagtagattcaccataatgggatcagccaatctcctttccttggatattaggatattttcaattttttattttcatacagacacttaagtgaatgaagcaaaatgtctgcacatattcttagttacctaaaggtatgatgttagattgtttttcttcactcatatttttactacatcagaatgttgattacagttatctttgatggtatgatgtgagattattactttgtttccatacttattttctctaaatgccttgcaatgaacaggttttatttgcataaacacaatattatttaaaatgatgccatgaaaatttctatatgaccaccgttttcatggtaatggcttgttacggctgcctgtaattccacataggggataggccgtaattcacttaaccatcccctatcattgaccggctgggctttttctaatgtctttaagatcgttatacaggaaacctactccatatctggggttacgtcctcagggagcagcccagcaaaggctggtgaacagatttcacacctttggttcatcctgccaagctgctttcccgaaaagatgttccaatttcccctcccaccggcagtgcgtgggaatgcctgcccagccgccctcctctccctgagacggttcaggcccctggacagtcgcatcctctgctaggagggcaagagaaagcaggaaataatttggccagcaagtgaccccagacccagagccaggagtgatttttaacaagcctgattctcagaacagaacctgcagagaaaaagaaagcaagcaaggaaaaaaaaaaaaaaacccctctctactggaaaaaacatacacatacacagattaaaataatatttggcacttacgtcgcacttttaaaattcttcaaacgctttataaacactagctaattaattaagccgcctaaatctggctgcagtcggtggagagagctcgagaggagctaaaaaaaaaatgggggagccagcgctacacaactccagattttattgtcgcctgcctggggtgtgattacaggcctccggctgcaccacaagaatagccctgctccaacatgctgcacgcctgactccgcagcctctcctgcgcctcctgctccctcaccaactgctgactcacagccccttgtggtgttattgataaggataataataactgcaagccaggctgagtcccgggctccgggcctgcaccctcccctggatatgccagtatcaactccacctaacacatgaagagagaggagatttgcccagggtcatggagccaacgacatccttccttccttcattcattaccgcattcattctgcatatttttatcgatgacactgtgttttaggcaggaggttggaaacagtcccttgtggatcctacatcctactattgggaatgtgacaatccagagaaaatcaaatatgtgaataatacagctatgtgataataatgggaataagaattaaaacttacccagcacctatgcagcaggcataccaccgtgtcagggtcctcatgactgtgctggggtggatgccggaaccccacttcatggatgatggaatgggggtccagggaaggtgggtacagaggtggctaagaggggagccatgctgtcacccaggcctgctggccctagcaactgtgcttccccgaggcagcctttccagttggtccagtctcgaggctgaaatacagacctatccggaaagttcctagctcagtgctgctggtgctgcctctgatgtccccgcctggatgggcctcccgggcctcccacacatttggccaccagcctcacccctctcaggccgtctgatgctggctgggcctctgtccactgtgggttctgtctgtccactgtgggttctgtttttttctcctgtgccatgaagatcttgccatgttcaacttcaaatggaaatgaaatgagaagctggacttcctgataataaaagcagttgaggtcttaagtggttgatcaggaaaaggaagtcgaaatggtaatatttacacccaaagcaggtggagtggtcttaggcactctgagactccactcacctgccatgagaaccgggccccaagggtgatcccttgccagagtcaagactgggtgaggctgggaatgggagaaagaggcaggacaatgggcagatagccctgggcttcctgcagtgagggcagataggggtctgtgagcctctttccctggct

SEQ ID NO: 650 - DNA, 2491 bp, Homo Sapiens
aaaaaagaagacattcacggtgtctctgtaccacatgtctgacagatacaccatgtgtatatggtgggtatgtgctctgtatgattaagcttttcctatgtgtataatggatataaaatgtgtgggaggaggatatgccatgtgggaggtgaatttgctgggggcatctgctatatgggatggctttacagtatttgcaataactatattttgggtaatcatttacaacataaaatgcgtattaatgtatttgttctgtgtatttcctatttctctgtgcatatactgtgtagggtgggcatacaccgtgcatgatgggtacaggctctgtgtctgcttagtatgccatatgtgtgggatgagtgcaggctatatgtggagtacatgttgtttatgcttgtgtgaaggttataccccgagtgtgtgtgatggctgtattttgtgagtaatagtatccaaggcataaacagtgtctacaaagaatgtgctgtgtctgaggagtgtacatggtgtgggtgatgggtatactctggggagggatgtgttgtataacagatgtgctatatgggtgatgagcatatactgtgacgtatacacagtgtgtgataacattacatggggtatgtgtgcgtacacgccacatacggagcatatattgtatgtgtgatgggtatacagtgcgttgggtataatgagtaataagtataggtagtgtatataatggacttactcttcatggtgaatatatactgtgtgggagtgctaagtatacactttgtggcataaataagccctgtgtgatcagcacacggtgtgtatggttgtatagcgaagttgtcattgtgatgggtctgtctggtgtgtatcaggcaccctggtatatggaggccatgatgggaatatgggatgtgtgcctgagtgggagcaggcagaggggactcatcctgtggggagggggcatggcagggagcagttggatcttcatctgtttccagaacccccagacccttgagcccaccgaccacactgtttcaggttcttcctcaagttcttcctcaaatgcaaccagaactgcctgaagaatgcggggaatcccagagacatgcgccgcttccaggtgggtctggagagagggtttccccttgcaaccccaccctttcctgatggaggggaggggagggggaagggaaggctgtgaccctgccaccctgggaaaggcctccaaggcagatctctgcccagccctgtgcctccccagcctggttggtgcctgctgggggtggggcagctccttctcaacttgtgctggctgccaagggaggcttcattagagtcccacttaagaagatgctaattgtgacatttttacatgattaacgacccaggcaatttgcatagcgtgaagcggagagcagctgcccttagcacatccccaagctgcacacccctctcagtgcagggcgggggaagaaggcagccccagttttctccccagaatagggcaggggctcctgctgctgagttctccggctgatgctgcccacctccacttgcctaagaccccattcctggcttggaggtccgtggatacaacccagcattctgtgtatgcaaaaacagtagccattctttgcctaaggagccagttttttcaggggtctttatttttgtagcgcctggggagtcagttcatctgggggtatcacctgatccagctggcccccttccaccagctcagacactgcaggattgaagccctcctcctcccaccagtgaccctaaattccagcatccaaccaccagcctcaaggtgctggttccccaccacattcccctcccgggagcccccgagggccccagccaggctggcctcggctctccccgcaggtggtggtgtccacgacggtgagcgtggacggacacgtgctggccgtgtccgacaacatgtttgtgcacaacaactccaagcatggccgcagggcgcgccgcctggacccctccgaaggtcaggacccccggcccagccccggccgccgcgggcccagccagccccccaggccccacctcagcgcggtcccctgacctgggtcctctcctgcctcccagctgccaccccctgcatcaaggccatcagccccggggagggctggaccacgggcggcgccaccgtcattgtcatcggcgacaacttcttcgacgggttgcaggtcgtgttcggaaacgtgctcgtgtggagcgaggtgggccaaccccgccagtctccctctgggcctaggggctgggccctcccctcgccggtgcgggacctgcaggcctcccctctcccctcgcagctcatcacgccccacgccatccgggtgcagacgcccccgcggcacatccccggggtggtggaggtgaccctctcctacaagtccaagcagttttgcaagggatgccccggccgctttgtctacacaggtaaggagtcgggcgggggagtggaggtcta

SEQ ID NO: 651 - DNA, 2395 bp, Homo Sapiens
aagctcactcccacctccgggattttgcacttgctggtcccttagtctggaatgttcttccactacagcaagacctgttccctcactttcttcagatctctgctcagatgtgacttccaagaagccttcttgccttccccatccaacctgggcctccattcacctcgctctctatccccttcctctattttatctttcattatggcatttatcactgcctgtggttaaattccttatttatttgtttattttctgtttcaccactggaatataagctccacagagcaagtagcttgtctctcttgttcactcctgtatctccagcacctagaataagcctggcatacagtagctgctcaggaaatttgtgcaaaatgatgaataattaattattatttctcttctatgatcattgaagagctatgtttttgttgttgtttgttttttttttttttttgggacaaacctggctcccaacctcaacttcaggagatgaaggttgcatttttaagggaaaaaaatgtacccaaggaacaatttgatgacaaaatctccaattttctgtaacatggattgaagtttgtgtcttcccagttttattcgaagatcctaaaattcatactgctttttccaaatcctaacatttagattgtttttcaaatctaaagttgtggatgaattcttgtgacttctgtacgtactttgactgctacggtcactcgaagcttccttttcaaaaccacaggatggcttagctaaaccatgtcctttccaaactactttactgagtccctcctgttataccccaaagagaagatgtactcctttattagcagttggaacctgaaagaataaataattcaaaatagattcagcctttgttggtttctatgactatgaaggtatggaacatcattcattaacaagtgtcgtcggctgactgccttctcttgcacataaaaaatgagcatgcatataatcgcagcaacctgcctttgctgcagagtgaacagcttcagaaatggaccattctgtctcatcctgtctttacatatgtgggacccagcatgaggctattcagaaacaacagaatcaggtcgaggccagtcaatacagtcggtagctgttattgaatgcccactgggtggctgcaggctcctggctgaccacgtttctaagagctggttaatggagtcctcgttacagtcttggttaagctagcacatttaacagcccgcagtgcaaatgaaaaatacataggtctgactagggagcattttccctttctgtctttttccgtaaagagaggaaagtgattgctctggaagtttctgacattaatagccatgttggcatgtggctgtaagacaacctgagttaagatggtgatatgccacttaaaataacaaggccggcacagtggctcatgcctgtaatcccagtgctttgggaggccaaggtgggaggctgggcttaagcccaggagatcaaggctgtagtgagctatgattgtgccattgcgctcctgcctgggtgacagagcagaaccctgtctctaaaagaaaaaagtaatagggtgtgctgtgctattgttacatttataaaccactccttattttccagagcatggttgtttttatgatcttatctgctgcaagagaccttaaatgatattgatcaatattttcctgacagtgtaagttttcattctcagaactgagtattatgcaactgacgacatggggagtggggcttgaattttctggaccactcagggttgggatgtgagtgccactggagagccccttggcccacaggaaggaagggctgcacatgggtatagggccacacggaggtactgtatgagtggtgggaggccagctggcatcaagcactgttctctaccatcagtgggtgtgaatacgactgcaggttatttttctgtgctgttcaggttttgcttttatttctcttttgttggtctgatcaagctgtttattgtttgcagatggtaacaaaatataattaagttgtttgttgttgaagctcctgtaggaaaaaattatctagttttatcaactctgtaaccacagccctccttttcccatattgaaatagctatttatatgatttttttataatgtgaagttcttaggaacatagttattatagcagagctaattgtaatatgtttgaatgcaaggatccaaatcattgaggattactgccattctgatacctgtacaaaattatgcactgtcaaaaaaaaaaaaaagaaaaagattatgcattgtcattgaggcagtttgtataggatagcaagatcttctccaagtggctttcctttgacagtcctcacagatggctttcctgtgagttgccatcacagtccctt

SEQ ID NO: 652 - DNA, 2469 bp, Homo Sapiens
gctttctctctgagggctctaggggagatccttccttgcctcttctagttttggtgtttgttggcaaccctaggccttcttgggtttgtaaatgcattgcaatctttgcctctgtcattacacagctcttctctctgtgtctctgtcttcttctcttagaagaacaacagtcatattggattaaagatctaccctaatgagctcatcttaacctgattacaactgcaaagactatttccaaataaagtcacattcacaggtattgggagttaggacttatcctaatatcttttggatcttatgatatccagttcagcccacaattaaacccacaatgctcttcgtgagaaagaagcagcagccatgaagaaagcctagatatttttaagggtggagagcgctcttgacctttcctttgacagccttgagcttccctaaatactgttgtcctcactgactggcttgtcttaggagtagggtttttgatcttcaaaccttggagtgcagttcagtaaagtgagacaagcataccttctgtctctgaggtccaggagcactggaagagtggacagattaattgtgaatagagaatgccctgaaaatacaggaagaaccaccctcctgcagatgtagctctggtcccttgtgggagcccctggaccttcggtgaggcagatctggaaggctacagcaggggatgtaaagagccccttcctagacccgcttcctggcccattattctgcccttccaaatgtattccaagggctcctcattttgatcattgctcagtggcattgttgtagaggaagtaggagggtgcttggtggagtttgggaggcccatgaatttctgcacttggagaaatgttaatgttgagcttatatttctctccttgcagcacagaagaccattactaggtctgtgtgtagaagcccaagcagttagagggggcctctgcgaggcttgtgggatttttctggccagaagatgggccatggtggaggaaggccatgttaaatggctgtgatccactgcctatagggaagagtacgcaacacacacccaggagggcttaggtagccggaactgtggcggctccatacccccaaagtgaattttaaacttgacttatttatgccgttctcatagcaacaggaaaactgttccgacctatagccacggaagactctgtaaaagaaactgtaggaggaaaaaaagataatgccaggaaaaaaaaaaatttaatgaagtaccattctttcacttattcagtcaactgagaataacagtttgtgcatttggcaatcaaatgggaagtggcatttcgtgttgcaacatgaacctgctcacattaagtgatttatttttttgtttagacacactgtactgagaactttcttcaagtagaaagctattaaaaatgtgagaacaagcagtcctcactaacctgaagcatttggggacttagaggaatgataaatgcaaacagcccagaatccagaaactgtcttgaacatttaaactctagactctgggaatgtgtgcatgtcttcagttagtcagatgtagataatttttctttctgtgaggtctcttttcacttatatcttgtctggacagggtggagcccctgcttaaattctatttctagcttgaagaaagactaaattattgtagaccaaagccagtgctactcggaaaatggaaaagacataggagacagggcatgtcttctttagcccgactgtgaacttagggcccctcctctggtgagtgctcctgggaggttgcacaaggcttatgttcagctactgggccaagctgaaggaacgcctctcatctctctcatgtttgtactgaagatccgtgtttggtaaccatttcatagatcttttctaccacttgatcctgggcttgtagttaatgctgtgctcagcatatttctgtgtgatcttgataagaaatctattggccaaagaccttgtgagctatttctgtcctctgtctctctcatcttctatttaatatgtttgtctgtattatatacgtataaatataaccgagttgtattacattaattcttttttttttcaaaaatatattaaaattattccccttttctaacctgcccatttatgagctcttgcacggtaacatcttgattcccattttggctgagaaactacataaactagtttattgcatgctgctccattttgtattcatggttatgatattgaaacttcaggaccacacacagatagcatagtctctggccacttaagcatgtaaacagtctggctttttataaagtggaaaaatatttcttgtgcactattttaacatgatcagcatgttgaaacttggtgtgcaactgtgtcaacatttctttggctctgaggagcaaacccggagaacctcatggtaacatataaaatgcaaagctggtttgtttactactgggattt

SEQ ID NO: 653 - DNA, 2485 bp, Homo Sapiens
tcattaagtctttttaattggatgcctatgaaacctcaggctcaagattagatttcttcttttgatatcagcatgaggttttcactttgttaactgtagggaagggtgcggtggatcctaagatttgttgttttgtgttttgtttttgttttagttcagttgaggcagtggctagcaattaaggggaaaaataaacctctaagtgttgagatttagtcatcgatatagcttttggagtaaatttgtattttgctactcattgcctggccaggcaacaagtctattttgtttggatctgagcagcagtttggagaaaaaaaaaatcatattgacggtaatagcttgaaacatgaaattgtttttattcccagcttggagaaattgcagggcacgttttgtttaagcaatccctttgactccagtctgaatacaaatggaataccaaaagtgttgggcacattccctcttatctcctacccagagactgatttcattaccataattgtgggcttgcctggctcttggcagcctctcccctccaagacccttaatagccttgcagacgattgttgcagctcagttccctcagatggggctgcagagaagaaaggttatgtctccaaaggctcagcatcgccctgtcactgcccagcttggctcggctctacccagctgtgtgctccttctccacttgtctttctgagcttctgtgtgggtccctgttaccattactctcccacgaccattcattccagcaaatagcaatgatacaagatgtatgatgtattccttttcttttcttcccccctacccttttttttttttttacttttgggattactgaaaagctccacaattatttacaaatatgcaaagggtgcctacaagactggagtaagggtggtggcatggggtaaagctagtagtgcccttctaggtgtcccgtgacagaggagaagggtgcacttggcctgctgcagcctgagtagactctggggttgaaagtcaccctcttgaccatgtgtccagactccacaaaaccacagcccgggcccattggctgggcaacatcatttgaagtgagcagaataattcaaacctccccattcgtaacacaaaaggaaggggttatttgtctcagggatgggcacgccctggtgcaatttggcagagcatctcagcaactctatcagatgtcaggttagggcaaaagtggaaatgcgtctgcccagtacatcttgggttgattacttggagtgcatgtttctgattcatttgcacataactcatccagggggtgttgcaagagctatgcgatggccaaaggaacccaatgcgtcttttattatgttttttaaacaagtctctctacgttgattgtctcttggaaccaagaagcttcattcttccagccccgtgacagacttcaaaatgagactttcataaatctgagaacaagttctagctttggctccaggactatctgctctgaccctaagggttagttgaggagtgtgaaggctaggatgagccatggggtgagtgaaaattgtagctgggaaagcctcgtcttgaggagcttgtacttatgtctctatacaccctgaagcaaccagcccccacctgcacctgtggtctttttgtttctttggtctcatgaggagacagtagctctgtcacttactttttgagagacagtgtggcaaagttagggacagcatgggctctagaaccagactccccatgtctgccacttactagccctgtgactttaggcaagttgttgatgtctctgtgcaccagttttccttggtggtaaaagttatctggcaatcatctcaaaacttaatagtttgagacaatgaccacgggattgctgtgggtcaggaatttgactgggactcagctgggagagcttgtctctgctccatgtgatgttggctagagtgacccaattgaggctggaagatccacgatggccctactcacatgactgaggcctcagagctagacgtgggctgagggaccttggttctcctccatgcagcctctctctttacatggtctctacacatgtagtggtctaggctaagcttccttacatagcggttagaacattccaagagaatgaaaatgaaagctgtaaggcctctgttaatacctgtcaccattccactcctacccattctgctggacagagtgaatcacatggctaatgcagatctccagggaggagaaatgggctccacctctctcaatgggagatgtggcacacaaaaacacagatgggaggtctttacaagagttaaataatacaggtggagcatttaggatagtgcctggtacagagtttgtgttcataaatgttatgttttattataatatgattattctggtatcacttcaggaacaaatatagtacatgtttacttcctgagtgaaaggcttctcaataccacatggaggagagacaaactctccaggc

SEQ ID NO: 654 - DNA, 2500 bp, Homo Sapiens
acacaccatgatgctgtcaaccctctggtgtcaccagcagcaatttgactgctctatcttgaacatgaaagccaagttctgaattttcagaaatggatcacagggtcatgagggtaagcactcatgggacccacacgaggctgtgcccagtttaactcagccctttctgggtttattgattagcaagtacttctagagcatcaatttgtggaacacacagtattttcaaaagacaagacataagcaaaaaaaaaaaaatgatgtcagaggcctggtggtggccaaataattggggagcaatattaatagggtatcatcaatggccaaaaaaaaaaaaaaatgagctggatgtaggcaggcaattagcaatgtttacagttaagaaaactcctgctggggttgttaagaattgtccttcagcacagggccaatggccagtggaaaagactccacagagcaaagaagggtttgagaggtatcctgaagtctgagtgagatttatatggatggcaagggacaagctggccttcccgtgtggcagatacatggtcagaagactagagggctaagtggatcagagatgggtgatgagattgagatctgacttgcaactctgccactttctaactgtgtgacactcatccccagtggttatacaaccactgcaggcttcagcttcctcatgtgtaaactgtagacgatggcaccctttattggaagagtaaatgacaatgcacacacagcatttaaagcaggatctgaggtacacagagttattcttcatggttttcatcatgactattatcatcgtcattgttaaaggactctgacaagaaaacaggattaagtgtgagtattaacaacttgcctctgttatccctgctatggtgatgggaggtatttctagttgggttacctgatccatgtcaatggggcagctggaatgagcaggtggtaggaaaaaaggcaggaaaatggattaaacctggttcataaagcactgagaaggcaatgggagagccaagttcaggacactgttgtccagtctggtcccacatgaatttaatatttcacacttgtggaattttacgaggggccaagtcaggctgcacggtgaatcctggcttagccgtgagaaccctgggagaaaatgaagcacaacagaaattcccatagaaagctgcgggggtatcgcagtcagagcagagagcccggaatccgtcggcctgaattaggacttagctaagtctatttcatcaaaactcatgaagctaacagccccctttacttggcttctgaaggaacactcccattgtgtaatcacttccgtggaaactgcaatactgtgtctgctattatacagtattaatactaaatggccaggtgacaaaagccaaggacatcaagctaaaagctcatgctgcattcttattgcacactacaggctacaaattgagagtgtgccctccactactttaaagttcctggggctggatctttgtctagcaatttcatttacataacatacctgcaatcatttttttaaacctccaacctatttctctgaaataacagcattagggtttttgattgttattttgttgctgttttgcctgagggaactaccagacagcgatggtaaatgtaatccatagcataagccaatcatttgaatggaggttgtcctgaacttttcaggcaatgtgatgggtgaagctacagtaacacttctgagtaggtcttccttgttatcagcaaccagccccatgcatcagctaaatgccaaggtggggtctcctggccagtacactggacttctgttgaagcccccttaggaggtgctgtgggtggggggagtactgcggagagggcaaggtttcatctctccaatctgagcttcagttaagatctcaactgagcagggagtggtggctcatgactataatcccggcactttaggaggctcaggtgggagaactgcttgaacctaggagtttgagaccagactgggcaacacagggaaaccccatctctaaaaaaataaaatacataaaataaataaataaataaataaatagccaggcatggtagtatgcacctggggtcccagccacttgggtggctggggcaggaggattgcttgagcccaggagtttgaggctgcagtgagctatgatcacactactgcactccagcctggacccagagcaagaccctgtgatctcatccatcctcttcttgtacaagtggtgacactgaggcccagtgatgaaagatcctgcccaaggtaggaacatgctaccatcttgataggaaggggctgaaccaggccataaattcctcttgcaagtctccaaattgggtgatgtttgcatcacccaggtggctgttggcctttctgtgagtcttgccatcaagtcttcaaggctccagaaaaggtgtcctcaaattcacataatatgcattttgagaacttatggtctggtaagtatggtgacag

SEQ ID NO: 655 - DNA, 2419 bp, Homo Sapiens
aggccaaacaactagcaagtggtagattcagtatgtgggcctagacagtccttctccagagactgactctcactatccctttattcagcactctctgtattgcatgagaaaaaatacatgttgcatctgtagctgaacttcatacaacgcacaccaactacatttgggagacagattcatttatttacaaattcccagtggccaccaaaacatctgatagttaaaaagcccatcttaaatgtttgtggaaatgaatggaattggatggttttagtagcttcaatttgactcatctaagaaaacagtataacccacatgtagctgtcctcctgagggtggcctctgttttcactatctgccagccatgaaacagggctgcttcatccctgcacagatatcttcagtagaacttgtcagcaaccaacctcacttctccagcatgaatattagctctctctctgcatgcgggaggcagaataatgaccttctcaaagatgcccacattctaagccctagaacttgtgaatatgttatgccacatggcaaggtggggttaaggttttagacgaaatgaaagttgttaataagctggctttgagacagggagattatcctgaattatctgaatggccccaatgtaatcacgagtatccttacaagaggaaggcagaagagaaagtcaaggtgatatcatacaagaaatatttcatccactgttgcgccgttaatgatggagaaatgggatcataagccaaggaatgaggaagcctccagaagctggaaaaggcaaaaaaagaatccctgccccctacaagagcctctagaaggagcacagccctgctgacaccctgcttttagacctctgattcctagaactgtaagagaatgaatttgtgttgttttaagccactaagtcggtggccatctgttacagcagccacagaaaactgcccactgcaggatgaaaagccactttctcctggtatttctcaaaggctaatctaagagcatggattgttctgtatcttccaggagcactattgcaaagtcgattcattacttttttcatttgttccgcatcaccgtgctggggctcattaacgccctgtcatcgggtgctctgtgcgtaagtagaagtgtgttaagaatcaatcgctctgacctttattccctgttggtgttttgtcattcgtgggctgcttggcttgacatatgaattactctccagctgcctggtgctggggaggcacagtcaccagcccccaaatatttcagacatatgccaattgcaatttcaacacacattttttttctaccgtcaccctggaactgttccattggcaatgcatgaaatatgaacaagaggaaataattgacaaggcaccactgttgactaaggggctaacctttgaggaagattaaaaacagatgtccttgaagaagaaagaactgaggaagtgaatcttctctcctcttaactctttagttcattgtcctcatccaaaaattaaactaacacactctgaagaaggtttaaggagatcaggaattttcaagaattcatttgtattctgtagcagacagcttgtttgttccccattgaaaacctacaagaaacaatactgcaacctttgttatagcaaataactggtgggtgtatccctccatgccaaacacatgccaagcataaaaaatgtgcctagaaaaacaaataactttggaaggctcttttcccagtgccttcttacttcctttgtcttagtcctcctttctgtgatggtgcccaacctaagccctggatcctttgctgttgatttcagtagcatttctccctgacttgcaggaaactgcccaaggctttcaaaattaccttttccataaactcctgttccttcctcgaacaatctcaaccagcatctttgcaaaaagctgcctaattaatgacttcatgcacaagtgtgggtaagtgataacacctggatgtgttgcccttcccagaggacttgttttccaaatcttttcaaatagagacataatcagcctggataatgagtgctcaaaactaaagcttaacccttcatggcaggagtgtggtcagtgtgcgtgtgctcaggggaggtgatatgggtcattggaggctttctttgtgcccctcaaatcacatgatttgtactacccaaatgctgcccctgcttccactctgacgatgaaatgatttcatgaatatattgaccattataattatagccagtgacatttatagtatgcttcattattctcaacaagaaaagtttatttcatgtcatcctcaccaataagcctgtgaggtcaagaattccatcatgtccgtgctatacaccagaaatcaacaaactttctgtaaagggccagagagcaaatatttcaggctttgaggcca

SEQ ID NO: 656 - DNA, 2353 bp, Homo Sapiens
tttggaaaatatcaattaaataatatattttaaacaactttgaaaaagataaaggcatctttttaatttggggcaccctattagccattaagaattaatgttattatctcctcatctgtttagtgtttagaacctctcccaagtctgctgataatggtggcaatgagggccaaaggatggagctgcttagctctggtaaatactggccaggcacagaggctcatgcctgtaatcccagcactttgggaggctgaggcaggcagatcacttgacgtctggagttcgagaccagcctggcctggccaacatggcaaaaccccgtctctactaaaaattagccaggcatggtggcacacctgtaatcccagctactcaggaggctgaggcaggagaatcacttgaaccctagggacagaggttgcagtgagctgagattatgcccccgcactcaagcctgggcaacagagcaagactctgtctcaaaaaaaaaaaaaaaaaggcatggtggctcatgcctgtaatcccagcactttgggaggccaaggcgggtggatcacgaggttaggagatcaagaccatcctggctaatatagtgaaccccgtctctactaaaagtacaaaaacaaaattagccaggcgtggtggtgggctcctgtagtcccagctactcgggaggctgaggcgggagaatggcatgaacctgggaggcggagcttgcagtgagccaagatcacgccactgcactccagcctgggcgacagagcgagactccgtctcaaaaaaaaaaagaaaagaaaagaagaaaagaaaacataaaatgtccagccacccaggacacaactgtgtggcctgaccgttcagttgtatcactcctcttatctggaaagtgctccagtgactacagaagttgctagaatttccaaaagcaagaagaaagtgatgggaaaatgtgtcaaatccacaatgggagaacactgtgtcactagaaaattatatgaccctggcaaccttaggagtatggaagaaagatttcaaacaagtttctgactatgtatctttttctaaatttttttgaatgctgaagaaatgttaaatttcattaagttttacagccagatttaatatagacataaatccctttaatgttcgtttcagtcaaaagtgagcggaacattatcgttaaaccagtgcatgtgggagaattacttgaggaaaatcaaaataggcacagttgggaacattaagccgtggccatattagacgcaagtaggcgcaatagcaaaattctttaggctctaatggactgggctattttgcttctcagtttccatacagatgagctttgttctggggcaatatggttgcagtttgagagtctatctgaaggagctcatttctctttcattagtccatgagcacagtgcaatttcagctaatactgttacacagctcctagctgggttatttggttaaatgccttcagggaaagtagcaagacagaataaaaggacaaatgcaatgcggtttcttgttctgagttcctgtagctgtggaattacattggcagttaatcattaccacgttgtactcgtgatcataaactcctgttatttaagatgttattcaagtctcacaagaaacatcttgtcttctgtggcacaatttccttgaggtcgggtttgtgcacaactataaccatagagacctgtttcttgtgcttcgtggacatgctagtaggtatatagtgccatttgtgtgaaattgaaaatgacattccctactggtgggtgaactgggaaacagcaccctgtctatgggcaaattagaaaagatgtccccttctgggtggacaaatgagcaaaaggcagcccctctgggctgaccaattcttttttaaagcctcctccaccttggggtgtgggggtggtgcacatggcttggtaagtccaatgcagaccctagttgctccctgtgggcaggaacccctggcgcaatgcacaacctgcacaactgtacacaacagccctgattacagaatccattttcacaattttgtagttggaccacagagtttgcccctcagtactctaaaaatatctgttcaatcacatcagtggatgtccatattaaatacattggtcttctttcttatggcaagtaactgccactctctgccaagggcagtgttctaaccttggaaacaaacaggacactcgtaggttgagaaacagaagaactagaggacggtgactcctaggggcttgaccagtggtgggcagtggagtggtggaaaccacggtggcacctcttcaccatcgcaatgtaatgctctcctcagcctccatcattacct

SEQ ID NO: 657 - DNA, 2486 bp, Homo Sapiens
tgcatattgctcagcaaaagaagccaatttgaaagggttatatattgtatgattccaactatgtgacattttggaaaagataaaactgtacagacagtagaaagataagtagttgcttggggctccaggggtagggaggaaggagggataactaggtggagtgtagagggtttttaaggtggcaaaactattctcttatgatactgtaatgatggatacatgacattacatattttcaaaactcataaaatgtagaacatcaaaggctgaccctaatgttagccatgcacctcagttaataataatgtatcaatattggttaatcagttgttacaaatgtacctcaccaatgcaagatgttagtaataggggaaactggttatcgggggagcatttgggaactctgtacattctgttcagcttttcccaaaaccactctaaatttgttaagaccttattttaaggtctattgacaaatgacaagaaaaaaattatgtaaattggagttttaaaaattagtatttgtgattattaacttacaaaataaattggaacagaattcatggtttgcttgttaaaaaatgagttctgtttgaaagacaaaagggcgacattatagaaatggaaaatactgtgtttgaggttgtgcatggtgtagtggaaggccacagttcaggggctggtcactctgtgtttgagtcccctccagcccgtttctgagaagtactgggacttcaaattagttacaactaagcttcggacttcacatctgcaaagtgaggatagggagacctacttgatggggttgttgtgaaggtgaagagagaggaagtctgtcaaagcaattaaacaacacccggcatgtggagctctgtgcctcgccctgcttcgaaacctttcctggtgctgacctgaatgtttctctctgattcggtcaacagttgtgccatttttggctagtgatctgtggctgggctgccagccgatgacaggcagttccccaagcaggtcacaacaaggtggcaattgaccttgctccccgaggatgtctgttcgggttctgctagaagccaagggctccctgatgtggggtttcggtttcacactgtggcactctgaacaattctttatgggctggcaaaaggcgtttcacacttcagataggccccaggaggatgatttgctttcttcaaggagaactgagaattctcagatgattggaaggttctgtactctcattttagcacctccgatagattctcccacatgtggcaaacacagtcatagctggaggtccattgtcggttgttaacaggcagtgaactgttgctgaatcagacagtccacgtatagggcatttccatcatcacagaaagttctgttggtcagagcatctaaagcatattcggcctctccccctagccaccctgtttatctcttgcttgcattcctccttggtatttgtgctgctgccaccccagttccagcccccaatgcctaataacatcctgatagatcaatagagttgtgttttagcaggtctaacatcatgttgtatctctggcctctcaaatggcagagctactcctctgcttggtgcttaaggcctcatcagggccctgaccgcctgtgtcaccttacagtctccatcctccaggatatgccgaggagtgcatggagtgcacacacagactgcttgctgtttattgagtaagctttgtcagtctgtgctaggtctgtttcacaatccactctccatctgccctggtcaaactcttctccattgtgtatctgcttcttatatatcaccagagacaatttctccctcaggtaaacacctgaatacttcaggtttcccttccacgtgacacccagcatatcctgcttcatatgcaatttgtctgtctgcatcccccagccttgcttcttcctggagtgcttgttcctttaggaacaggtgctctaggccttcttctgtgtaggctagcccagcaatacataattaccaagcaatacatacttggtaaattgtaagatgctttttccaagatacaatttctaaatttcttctctaagaagttctttcctaaacttccataggaacaagccagcatacttgcattgactccacattgggagactacagaatcgctccctcaagcaatcctctctccttgcatcagtctcctgtctctgtgcctctagactaacattcagccacactagctgagtgtccccttctgcagactaggaggattgggttgtgtattagacactgtccatgcctagttcgtatctcttaggcgttactacttagtatgtattatcagagcctcccattgcctgaacctgaatctctttgcctgagggttctgggagacttctccaatccctaagaggaccacaccacctgcccctcaaagcagaccagaagttccaggagaatgaagacccctgagaaaagtccttgaccaagaactgatgag

SEQ ID NO: 658 - DNA, 2457 bp, Homo Sapiens
aatttttttttttttttttttatcaaaacacaaaaactcaagagactttttactaatgttctttcacgtggtttgctagaatgcacatttgtttgctacaatccagccaatgaacaatgaaatttatttaagatgcttcctgcaaaaaccagagttgatgatgtgccattatattagtgattctatagaacaggatccatgtgatcaactcatgcatgagtctgggggcttccgggaaaacaagttatgttatctctgcagaccaactgtggcctcctcttagcagacaaaattgatgtggctcagcaggttcccctttgtcatagatgtcagaaaatgtacaggcaaagtagctgcccaattgcactcagcagttcctctctgtgatgtaatagaatctcacgctactttctctgggcttgtgcttctaccactggaagcacattagaatcactggagagctttccaaataacacagtgaaacccaggcctcatcccaggataattaaaccagaatctctgcatgcagcctgagaaatgacatcttttaaagccctctaggagcttcttctgtgtatccagggtgagccagtcctctttaggtagtcattctccttgtctccccagctgtcttattttgtatttgatttccttgtgaactgcccaaggtccatttagaagtacactgggataaaccttaaataaaattctatagtgtgtttgttagacaaagtacaaatgtattttcactatgtagagaagtttggcttttcttgaatgtaggagtctaaataataaatctgaatagaatttctgtgaagtgtcaaataatgtcattatttcaggttgattcctcccatacctattccctgcaatagttcttttagccacaccgtctgattgccacaggaaaggatgctgcagacctctcctgagtggtgattaagtgaaatgcaccaaagaaatgaggacagtgagcaactaagatgcctgaagcaacactggaaagggagtcaggtctgagccacctctttttgcagccagtgtgcagtggaagtggctcgtgggtgttccatatttggattggagagcaaagcataatcccagcgctaagggaagcctcttatgcttctggaatagtgccccatacttccctgaaaaggtaataaaatatgtgcattcgctgattaggaacaaatgtcaaagcgtccaccatgatggaagtgtccgatttccatggctctgataagtcgccacaggatctcatgaatctttaatggctggcctatatttaggggctttcagtttctgagggtggtaaaaggtccacagagatgctattctcctagcacactggcttctgccaagaccggtgtctatttaaagcacctctcgtctttcgaatgtacagagattctgctgacaacaagaaactttcttgggcctgaaattagatgaaaagacctcccactcagaaagtgtttattaatttatttaaaaatatgatctggatcatccactacatgtcagggcttattctgggcacactgaggaataagacagggtccctgacctctgagcttgcattctagttaggggatacaggcactaggtaagaaaacaaataatcgaggtaatgacagtacagggtaattgctatgaaaagaataagccgggcaatcggatatcatttaagcacagcagtgacatgagcttatttgcattttgaaagatcactctagctgttggatgggaaaaatggattgtagggggataaaagcaaaagccgggaaatcaattaagaggccattgagtggtccagggaagagatggtagtggtgatagagatagaagagagcagatgtgcaacatatatttgagaatgaaagagaatgtgctggtgattgggacagaatcgcagaaagaaaagaagcaagaaaaactccaaacgggtggcttaaccacttggtggattgtgacagcatttcctgagacagagaagactgggttgtacatataaagaatagatttgggggaaatttcaagtgtacagtcatctaaattatccaagtatggctattatctaagggtagatatgcctagagtctggctagaggtcaagcctggagatactcactttggagacataagcttgtaagtggtactgaaagctagagctgacctggaaagacaactcagttagaaaatgagccctttgaggctaggcatggtggctcatgcctgtaatcctagcactttgagagcccgaggagtgtggatcacctgaggtcaggaagtcgagaccagcctggccaacatggtgaaaccccatctccactaaaaatacaaaaattagctgggcgtagtggtgcacgcctgtaatcccagctacttgtgaagctgaggaacgagaatagcttgaacctgggaggtggaggttgcagtgagctgagatca

SEQ ID NO: 659 - DNA, 2431 bp, Homo Sapiens
ggttaaatattaacttaaatattaaacattaattcacctgtttatctttattcttttttaatgtgtctactagaaaatttgaaatgacatttgtggcttgcattacttttctgctggatgtaaccagtatagagcctttaaggcttaatgcagtatctatcccagggatatttgcagctgaagtaatgatttttatcttaaagctaaagaataaatcttgcattgtaatatttatgatggaagagagaatttgggagacaaatcaagcaagtaataagccatatgctcctgaggctagtcctattcaggatgtaaggcaaatgctgagtgagattattgtgggattaaatgagtgaatacacagcaagtacttgaaatcatgtcgtcgtcatcgttatctggacttttgggatttgtgttgtttgccttttgggagttttcaagctcatgaatcaaaacatggttttcctcttgcgcttttagtcaccgtacaattctttccgagtgcttctgagtcacacaccatccgacagaagtggggacaaggcacacagaagtgccactggtcccacaaagctgtccagaaaattattcaaaaaacaagaaacctaggcagcacctgtgctgtcctgatataggtaccagcaccaccctcaccagtcagccagtctacatctgcactgtttccagaatttgaagatttgttcataagcacaggggtaccgagttgagtggaccaatgtgtggatgtttgaaccatttactcattatttaggccactttaaaagtctcagaaggaggagacaaagctcttttaaaacttggaagatttaactggaaagtcttgctagaatcttgctactgtgagttttcagctcccaggttttttggatcccaagagtaatatttgattctgactctgggaatgttgaacaaaacaagccaatggattctgaacgtggcatctgccttccatttttcaaattcataagagcatctctccctcctgtcacatgaatagagcagcagctgctgactcaagagcgccgggaaaagggtgattgtctttcacttggcatagacacccctgaggacaagactactgagttaataatcgatttcactcccctgcaggctctcccgcagctcattcgtgagggcaggaggaagggcgggtgctctggactcatttacagtccctgtttccttaaataattgtgagtaaggaggacagaaggcggcaaacggagtcagtgagacagctcaaatgccgcctgggtgttgcatcacttagacataaaatatcaaccctaaatgccaggctgttctgtgtctgtggatgccccgaaaccctctttccaccctgtgctgacctagcccgaatactgactcagcctttaatccgtgttctctcttcttctgcagcccctgaatacgttgttcatgcacctctttgtggccgtggatgagtattctgttggctgttgcaaagagattcttcggtgagtggatatggccgtgcagtggtgaacatgaaagagactgtgtggatagttttgaaatattttttaaaagacatgaaattctttggggtgtttaatttgcttgtaatttgtggctatattaaaatatttactttgaatagcaatgatatttctgaaaggagatagttctttgaatctattgtccattctgcacgctgttatcatttgaggcaaacagatagtgcagtaatttaaagaaatggatttaggttgaggggagtaggagaagaattaagtgtcgcaagcttggacatttctaaaaactgcttttctttatcttatctttagaaatgtttattaacatgacagacttcaaagcatcctgaataataggatgcatggaaaatgaccagcagggctaccgagtcatggcgatgtgtctctgacagcctctgacagcctgcacagacatttgggggtggtggtcacagctttcaagtcactttgtaatgtcacaccagaccgtccagatgccaggtcaaaggttaatattagcagaaatctggtgtgccatatgaacatggcaccctttattctctctgcctccatgggacagatcgaaaaggggccctttagaacccaaggaaaagtagagaagaaaaagaaattgccttgaggctgttcttgccattgcaggtggggagcaaaggagcccatgtggatttaggaacacctcacctttttagtgacagcatttgtcttcatcaagtgccagctgatgggattgctttgttagtaacactgccccaccctctctttcctcaccagaaccgtgtataaggcagtgccagagctgcacttcatatttctcatcgtgccatcctacatgagcctaggtaaggcccgcccaaccacctctggtccccggtagcaaacattgaaaattc

SEQ ID NO: 660 - DNA, 2402 bp, Homo Sapiens
ggcaaccactgtcaaccagaggaaacagaaagaagtccatcaagtttgtctttctgaacagccatggcagttccaggccaggcatgcagcatgcctgagggcaaggctgtgccctgtgggaaacccttactactgaaagggtttttagttacaaggactttctttggcttgatagctagtttggaggagtttggggccatcacttcatacaagttccttgtcataactgtaccctggcttaccttgacatctggtgtttactccaagctgaggttttagggaagggtagttggaggccagcggcggctcctagtgacagatgggcagagcgtctgctttggcatcatccagggtgtgggcagcagtggtccgagtaggcaccactgacctgcaggcagggaaagcctgccaggtcagccatgcgcttggcatcaggaggagaggatcagagccagcagtggtcacaatgagggcaaaaccctcacagtggaatattgtcacccaaaagggatgggtggctgtagggctttttggatggaagcataaatgagaaaatacacacgtttctgtaaatggacctgtttgggaagacaaggccacagtacacatagttttctagcaatctaaaccttatgtgtcatgatgtagatatttacaggacaagcaagaacaacaaaaccttcagttttgttctccagtataagataattgaagacacttgtggtgaaaagtacttctgtcaccaggaagatagataacagccagcaatcaatgcctttctgttgtacaagttaaaaagtccattaaatccatttttttttcagtgcatacacaagaatacatttggatactcctgcaaattcatatttaagaatagtgtttctcaaatcggttatttgaaagaaactcaaaggaaaaagcagacacttccacaatatgtccttgctctgttgtagtctgtaattgtgaacttttgtaaattgttacaaccctggatgaatgatgggaatataacaggttgtagaattggagaacgttaaatctttgttcctaatggcaaaacatgtttttctcattttcatcagaatgtgtgatccatgccatttgaaatcaaattccaaacacaatgagccattagtgtaatagctcattactaacagcggtcttataaataatacattcttatcatacacatgcagctcgctgtgaagccagcaaaaggtatttcaggccatcgaagttttgttgcgccagcgcggctgtagattagaaggacatctccatgtgaaccaagatggatgccaattttccctgccgagagtcaggctggccgtctctttctgcacatatggtagatggattggttaatcagcgtctgctgagtcttgggcctgaaattacagagaagctagacaactgcggctatgcagcctttgttcacgagtgcaaacaagacaaacaatcacttgttatttgggaaaaaaattaaaatgtttattttggacttttattaaagtgtcaatggctttataaaacagctgtgtaaatccaggctttttcagcaagtatcattttagggggcctgtaaagaaaggaatatacatgaaaaaattaatttttaaaaattcccctcatatttcagtattgagaagaaaatagaggaggtctcacttttattttgcaaacacgtttgagaacaaatgatttttaactgggagacatattcgagaacaaatagtagtttaatacctatttttttttttttttttggtgtcatttaaaaaactgagtattattgtagcccgattctctgttttaggagattaaagcattttctctgactgggcatttatggaaagatgctgcgttcttgggaatagagaatgcctgtgattattgagttctgctactttctgaatgcaatggttatctaaaagtctgaacacttgagagataggacccagtaaatgcaggtttctaataagagctatcagagtctaatcagtcaaccagaatttgcttaaaatctactaataattattttatgtgaaatttaaaggactatgtattttctctctctttttaaattttaaatactttccttgcagaaaacaatgaaatacagaattacttaagggatatattaaggagtttcagtcacagccgtctctccatgtggaatatgatagaattaaagtctgttgttaatttctaatgttttggtaccaatcaggtacctggtacccaaccaaggttcagatcagctagttactcatcttctcgcctatgtattactcatcaaagactgaaaatcatggggacgactgcaagagcttcagaaccaggcatttcagggtgatgggaagttcaacatttgcagatcagacccacctggtgaacca

SEQ ID NO: 661 - DNA, 2471 bp, Homo Sapiens
tggattaattttattacattgtaatggtttgtactttaaatgtaaggataatactaaatttccagttggccattattctcttcttccctttaggctttttgaattaaaatattaagaaagcgatttgctcaattcatcttgtcagaatttatagccaaattcattaaatgtgcaaacattttataagaaagtttacaaggtatgttaataattatattcatgcattataagtgtactatctttttaaaaaatcaaaaaaatcacttttgattctataaagtgaattaaaatggcttgcatgttttttacttaaaaataaaggtgacatttttaggacattaaatgacattttagaagcccatgttgaaaatgagctaataaagccaattaatccatactaaatattaaagaaacacatttcctctttttgaaagctataagacactaaattcactggttctcttatattaaaattttcagtttaattctttaaagtagtgctcttcatggacaaatacaaatgttagcactaagagccattttcatacacaaaactgaaaacttcacgcacatggagatcagaataaaaaatgatgcaaatatttaatatgaagtgacttttggcatctgcgttccctcaatagaaaagagggttccctttatgtcaggctttgcaacagccagaatgggacttttatgaattcaggagttgacccacaatgcatctattctgagaataataagcatgttaaacttggaattcattaagtattctctctccatagtagtaataacaaaaaacaacagcaacaataataataataatagctaacacttaagtagcttttactctggaccaggcactgtttgaagcactttctatttattagctcatttaatcctcacaactttaaccctttagattaggtcataaatcccaatatgaacaataaatctgttgcctattatttcaaagctttaaaagagagttttcagaagggtaactttcagctccttcaggagaacaacttgaaatgaaaatgaagattatacatactatcaagctgaaaaacacaatgtcattcctcttgagggatggcttaatatgctaatgtttaatttaagaactttaaaaacgcccttctattagtaattctaaaacaaaaacaagtcgctacataaagcatggctaaaataccactaaaggtatgacaaggatcgaaactgcagccaatttagtacacagcacacagatcattggattgttccagctcttcccatgatcaataccaattgacatggctgaattgattctgcagcaaggtgctccaattgttgaaactcatcacgtgggccgtgctccagagtcccggcctcttcgtggacatgcctgcaattctgcaggattgaccccattagcacagtcagaggcttggcaagtgcccgacaccaggcaaggctggattccatacccacggttctccacaaaatgctagatgtgatatggggttccttcaactcttattattaatcaacataaccaaaatttcaagatacaatttttcaaaagtacaaaatttagaaaacttaaaacatttacaaaataataaatttgacattataatttccaaagaggcctagtaatacaataatacaattttgtgctcatgatgaaaaattctttgaaaatcccaattcatatttaattcctataaagcatgcataattcagatatatgtaagacattcaacaactggatgagagtcccctttaacatatttgtatcactgattttcaatgacaatgaatcacatggcaaatgctttatgagtcagtacaacaatgcaatgaaaacgtacctcaggtttcttcgttatcgcgatgaagaacatgtgattcttcattgggtaaataatgattgaaacatctccaaaggcagttgggataatacccctgcggtagtctctggagtgttcagaccagacgatatggacctcgtcattccccaagtgacgaagctgcaacagcaaattgactgtttattaatcagggtgataacagcagtttatgaggggtcatggcttacaaattgaattataaaactcaaaggccaaaaaaatttcactaccaaaaaaggctacaacattgatgttcttctgtgaggattttaaaaagcacaagtgcataaaaacacagcctgtcttcttaatgtgttggtaccaagataaggcatgctagcttcgcaggcacattacagctggatggggctgaggcctttgtaagaatttattttctaatggaattttactcctgcgtcagagtcctgtgctttatattgctgaatatgtttctaaacaattaacaacacgtgtcttttattccacattgcagttgtgctttataagattctcaattcaatggttattatgaaaataagaatatgaacataagagaacataagccactacaac

SEQ ID NO: 662 - DNA, 2499 bp, Homo Sapiens
tatctaattcttgcctgtggcagatcaggggtccaccactggacagcattcatgccatccatggccaggccacatctctgaagccatctgtgcaagcgtgtttgtgtgtgtgtgtgtgtaacaggaattagtaagaaaaccacaaaccacaaacttatgcagctgttggccatgtacattaatcaaaacacacactgaagtacagtcgtgtcgctttatgatgaggatacattctaagaaatgtgctgttaggcaatctatgatcatcttgtgaacatcatagagtgacttacacaaacctagatggtagatgcctactacacatccaggatacaaatgtgcacaacatgttactataccgaatagtgtaggcaattgtaacacaatggaaattgtctgcatatcaaaccacatctagcacagaaaaggttcagtaaaaacacagcactataatcttataggaccaccatcatatatgtggtctgccactgactgaaatgttacatgactatactatagtaacgtgacttatagttatacaacctattatagtctcaatataagagtaagaagcaaaatctccacacacacacacacacacacacacaaaatcctagtttcttttcttagatttcagtatggttatctaaaaaatccttaaaaataatcctgatttaattctatcagtatcacattagagcaaagcagtagtaacatgctaaattctaacatgttcagtctgtcataataaaaattacctcatttaacaacttatcttcctaaaaaactttgtatgtgttcacaaaccatttttcctaagacttttttttctttacatgggtcttagtttctacaaatcttgatatttacattcttaaaattactgtataatgcttaattcagtagagttcacatatggtaaatagtttagcaagtactaatttaaagttttagcatttcagcagacttttttcctacatcagaaataaacagataaatagataagtgaaaaaggaaggaaggaagaaaaaaaaacatgaaccatgcttcttccaggttaatgtttaagcctgctttaatcacgtcctttgatacactttaaggtccatatcagtcaaggcaaacattctaagggaccgagcagatggatgctgcagtttagaaagtgtgtggtaaactcaggatccaagagtggaacaaaagatccacctttttcataattaagcctctgattaatgccctaggctcctcagcacacacctgtaattactcacagaggtactcattgtgctgggacttgtctcggaatatcaggcatcaagctatccggcagcagatggaagcacatttctgttgacatatgttgcaatgaaaggattcgtgcaaacctggctagcaaggtagcagaatgccatgcatttgaagattaataatgcaaacaaccatgatgttaactttgttatgcttgtgttaattccatctgttgagatgtggaactaaaccttgaagcttgtgggctttaaaaatctttagcacatacttgaatcaaataagccccttttcaccactggaatttagagttttaattaaaaaatgcttttctaggctaaatttatgggaattatgaactaaatcctttaacaagctaataccacaatttgtaaatgaatccattttgcattgtaagatttgtatgtgtaaaggcaacaatctgtaaaatggggcattcaaaaaatatgactaagttgctatactgatgctaaagacagcagataggcatgtagctgagataaagtcacatggctccctcaccccctggacctcagccaatcacttcaacggaacctgctactatgagcaagaaggttggaaagagagggcaaaataacagatggctagcctaccctaccctgccacccacgtaagacagcgccctgaggagacacagcgcctgtgtgaagtcgccaaagacagcactgggggagggtaaatgggggggttaaagagggaactatatgaccagtcagccaaattatggccatatgcctgcttccgttgcttctccacactgaagtggaacaactcgaagactgtatctttgtgataacattttaaaattaggaataaccacgtggtactcaaagaagagccgctgcatattctcaatagtgggacatccacaaaatgccccactcatttctaactcagtagaatccttctttcaccatccccaccatacattaagacacagctataacagaagtctttgaaaaatataataaaaatctgaaaccttcctcacagcctccagggctttatatatacatgggaaagaatgatgctctcagacatgagtcattcatgtgcaatcctcatgccttttgccatctccctgtccaaagtgaacattacttgcctaacaggtttttcaaagtgactcatgttttaatttttttatttccataggtttttggggaacaggcgctatttggtcagatg

SEQ ID NO: 663 - DNA, 2400 bp, Homo Sapiens
acaaaccatttttcctaagacttttttttctttacatgggtcttagtttctacaaatcttgatatttacattcttaaaattactgtataatgcttaattcagtagagttcacatatggtaaatagtttagcaagtactaatttaaagttttagcatttcagcagacttttttcctacatcagaaataaacagataaatagataagtgaaaaaggaaggaaggaagaaaaaaaaacatgaaccatgcttcttccaggttaatgtttaagcctgctttaatcacgtcctttgatacactttaaggtccatatcagtcaaggcaaacattctaagggaccgagcagatggatgctgcagtttagaaagtgtgtggtaaactcaggatccaagagtggaacaaaagatccacctttttcataattaagcctctgattaatgccctaggctcctcagcacacacctgtaattactcacagaggtactcattgtgctgggacttgtctcggaatatcaggcatcaagctatccggcagcagatggaagcacatttctgttgacatatgttgcaatgaaaggattcgtgcaaacctggctagcaaggtagcagaatgccatgcatttgaagattaataatgcaaacaaccatgatgttaactttgttatgcttgtgttaattccatctgttgagatgtggaactaaaccttgaagcttgtgggctttaaaaatctttagcacatacttgaatcaaataagccccttttcaccactggaatttagagttttaattaaaaaatgcttttctaggctaaatttatgggaattatgaactaaatcctttaacaagctaataccacaatttgtaaatgaatccattttgcattgtaagatttgtatgtgtaaaggcaacaatctgtaaaatggggcattcaaaaaatatgactaagttgctatactgatgctaaagacagcagataggcatgtagctgagataaagtcacatggctccctcaccccctggacctcagccaatcacttcaacggaacctgctactatgagcaagaaggttggaaagagagggcaaaataacagatggctagcctaccctaccctgccacccacgtaagacagcgccctgaggagacacagcgcctgtgtgaagtcgccaaagacagcactgggggagggtaaatgggggggttaaagagggaactatatgaccagtcagccaaattatggccatatgcctgcttccgttgcttctccacactgaagtggaacaactcgaagactgtatctttgtgataacattttaaaattaggaataaccacgtggtactcaaagaagagccgctgcatattctcaatagtgggacatccacaaaatgccccactcatttctaactcagtagaatccttctttcaccatccccaccatacattaagacacagctataacagaagtctttgaaaaatataataaaaatctgaaaccttcctcacagcctccagggctttatatatacatgggaaagaatgatgctctcagacatgagtcattcatgtgcaatcctcatgccttttgccatctccctgtccaaagtgaacattacttgcctaacaggtttttcaaagtgactcatgttttaatttttttatttccataggtttttggggaacaggcgctatttggtcagatgagtaagttctttagtggtgatttgtgagattttgatgcacccatcacccaagcagtaagcactatacccaatttgtagtcttttatccctcatccccttccaccctttcccccaagtccccaaagtccactgtattattcttatgcctctgcgtactcagaacttagctcccacttatgagtgagaacatacaatgtttggttttccattcccgagttacttcgcttagaataatggcccaattattctgaaaaatttatgtgtatcctttctcataagtaaaaagtaactcaagtaatacaatgacagtaatcaatgctgctaaatttttgctaaaaataccatcctctgatgaagactctgggtctgagagcagctctccttgttgaatataagcacagaatgcaatgtcagggtggtgtgaaagaataacttctctcaactccagctggcctacctaacagtatcacaaggacctgcagagaggaggaaaggggccatcctttctactgtgtgattcaatgctattcagcgctgcctccactgagatggctagtgagaaacggccctgcactctgacgtggtgaaaagaactctagaacttgagccatgaggcctaggtccaaagccttgtgtgactgtgggcagatcatgtcatacccagagcttcatgcttctcttccgtaaaatgaaatgatactc

SEQ ID NO: 664 - DNA, 2490 bp, Homo Sapiens
tcagccaattacttacttccctgagctgtttcctcatttataaaatgggcataataatctcctaaattataaaaatgttttgaggattaaatgagatcatgaatataaagcattcagcagaaggctgggcatccattaagtgcttagtggtagctactattactagtaccatctaggctaataagaaacaagataaactgaggaaccaaaagccccaaaacttcaaactttttcttctggacctcacttttatatcctttccattgaacctagagatagcggttcctccttcttattaccctggcacctcctcgtccactactttccacaattgtcctcctcatggaggtgctaaggagcaataaaatgcccaaaaggcaagagaggaggaaggggaagcctctacttaggaaatttacatcctagtcagtcctggtaccagatgtgtttcttagcagtgcatcaacatcaggagggtctatatgggaaggcaacagcagattcttagcattttccctaaaccaggactagaactggtcccatcctgaccaccaccacttctctgggtcactgtgtctcagggcccagaccatccctctttagcaaagcctgtccaacacccctaggtgctgagaggcccctcctacagggcctcagagtacatatgcacatctcctttagaagacggtagcgagctcgcattggaatttactcctctccaccagcctgattgtctgagggcttgcatcatctctctttcatctctatatacctaatatctagaaaaggaaccctaactttatttcagataggtaaactagtcactgaatgcaggttgattctcagggaccaacctaggcccaggtagttctggtttaaactgggttcgcagccattcccaagtggggagccgaaatcttaaagtctgattctttctcttgttgaatagaaggggagatgtgcaagaacgacacaactccattccagatactaatccagaggaagaggatgggagttaccacactgactctcaaaaggggacaagagacccacattcatactcccaagcttaccacagattaccaaccacgatgcaacctgctacaacagggggattccctttgaagagatggtgccaaaatttgatcatgaggcttttccatgtgaagagagaaaagggggtgtctggggattatccacgagaatctggggagggctccaactgcacaaactagctgtgggccacagaatgcttgctcagctcattagcacctgctgcttacagtgaccattcatccaacagactggccgtgaacaagatgatgggatcagcgggttcatgccccagagagctttgctcatcattaacatgagctacgtcctgttcaggaaccattcctcttgttgaagaaacactgcgatgtaatatgataaacacgtccccatcacgagtgtagatttgtctagaaagatctgcattaaggtggctgcattttgcatgaatcacatgctggggaggggtaggtagcactaaaaactagtcccacttgagccttcaagtcattatggcatatgtgcctgcttcactataaacctcaaaggcctgtgacgtctggctttcattgtttaagtcccctcctcctttgcaagggtggaattacctgtttgtaataccagcaattactatgcaccttggaattgagcagagagtgtgctcgagtgtgcatgtttagattggagggaattacccctaccttcaaagtcaaattctactcccccttcaatttgaaatcatgcacctcagcctctggaaagttgggaatggcagccagaaggaaacaagtcacatcaatttggctgatgtgagagaggagcctagccctggaaactccacacaaactcagaaagagaacattacgtccccacctcccacacgtccacctcatctgttctcctgaacaagcacaaacaagacacaatagtttagtaggctgctactgaaagagtgagtaatgggcttctaggaaagaggctggtggtggctaaggagcttgtactgatagaaccaaaggaggaaagcagcagccatgtgctcaccttgatctgcttttaatggggctatgtcttcacaaagaaaagagccaacaccctgatcctactctcctacacttttcaaaaggcacaggaagtccctacctacagtcaccagcagcctcttggataaccaaagctgctagtgttacctaggaacccttttggggatctagtctctctctgccctttgtctgaaaactcctctgatccagaaagattcctgggtttgtcttacataagcagaaggcctgttccttcagacttgtccttcctcagcaaaactgtgaaagaattctacttctctttcaaagctgctcttctggtctcacattttaatcttaacaactatagactatagagaagctgacagaacctgtttccataaaacaaacacaa

SEQ ID NO: 665 - DNA, 2475 bp, Homo Sapiens
gccaccgcgcccggcctatggataaggtcttgatgctggagaaaggagagtgaacaaaacaatcatgatccctgccctcatggggcttacagacagggagtaatcagataattgcacaaataaataatcatagattttggtaaatgctaagacatttacagagggccagaagaaaacatgtcaggcagttccaatctctaggtcaagagagacaggcattctctgttgagctggaagaggaaactaaggcccaggacagggtaggtgtgcctgttgtcgcttggtgagtcagggctgtattaggaccagaagtctcactcctgactactgaataaaaggcctagcttcaggctgatatccatcatgacacatcttcccactcctctccctgctacctcctgattccactccctttggaaaataagttttgatccgcagccctgacatttgacgcccataaacctctaaactccatcttcattatctcctcacccccaccccatacagagtgcagtccagtcaggttggcaagggctgctggtcagggccagatgaccagaaagtgtagaggaggagagaatttggggctttcaggctgggagcagctagggaagggccaagccggaaaagcagcatctgccaggctggtaagagacaaggctcaagtgcaggcactgcgaggaagcgagagtgaggtagaaggatgctctaatgccaggaagtgacgtgcagggacagagggatgggggatgaaggatgaagaatggaggggaggatgaagctgggccacatggctaggaggaagagcagcagggaaggaatgcacagagagctctttgcccccaggtctcttccaatccctgtctcctccttctcttacccccacttctcacaattccagcagagggctgaggggaacacagtaaaattctggagactgcttcctagggagcagagtaccttactaataccccggccagatccatggctcagggaggggtggggtaatccacaggagagtgaaggcgttctagtccccaaggacttttgagaggtcatgcagtccatgcctccgtctcccaacacccaacagaggggaatcatattctctttacccctccctagacatgaagagattctccgcttctcccagaccctctgcttctcacaatccctggctgtggggaacttctcttaaggcacagattggatccctcttgctgcagtctctgacttggtttctcctatcctgtcctctgtggctagagaaagccctcttctgggtgatcacagcggttccttaggatctccccttcaacattccttcatcgttagttggttcttcccagaaggtaagcccaatcccttctactgcagtccctagcatcctctccgttgtcgcatcctacgcctccaaggcagaaatgcacccccttcctcaccaaataattaacagagacaagggagaagaagggagagatccaagaagatggggatgaattaaggagatggagctggaggtggatgcttgacacagaagaaggaagaccggggacttcccaaggcagggcagggacggggtcagcgggcctcaccggtgtcggggtctcccagaaaggcgtcctcgtccttgcggcccctcagcggggccgcgggcgccggctcgtcctcgggcagccgcgggaagctggtgatgctcatgtagtccactggcgagtaggcgcccagggcgctctcctggctggcctcgttctccgccgccatcctcgcccgcgccccccagcagcgcagcgcctgccggaagtggctgcggcgggggagtgggagggcggagggcggggcctgatcttcgcgacagccgggagggggcgcctctcccagccctcggccgtgtcccggtctgactcgcccccgtctgctcagcgctatcagcctgcagctggcacacaggtgcgtgtagatggacagccaggaaggcagcgcagggtcgaggggagagcgcggggcaagcgagacttcagtggctctgcactttacgcagctcagggaccaaaccccttcctccttccagcctgaatacagctagtgtcctcctcaaatcccaggcttccttttcgggccccagaccctttcactgaccgcaaatccctctcgaccccagatcctgtctctgaccccaaactcctcggaccccagacccctccttgaattccgagatcctcctcctccgattttagactcctcctccgaccttagacctctttttcgacttcagactctgtcttcacccccaaacccttttgaaaaccccagcccatgcttcatctccaggcctctttgactgcagacgcctctttggacaacagatccctcctctgacctcagatcccttcccgcaccccgacacttctgactcctctttcaaccgcattctcaaactttagtgtgtgttaggatctttgaaagcggatcccc

SEQ ID NO: 666 - DNA, 2498 bp, Homo Sapiens
tcccctacagctgggcgtttaggtgattgacagctttttaaatattatgtcagcactgaagacattcatcttcccactctgcaggttagaagactgaggcttagtgatgtcggagggccccacagctagtgagtgaggaagccaaaatgtgaacttgatggctttttttgacttaccccatgtttgtgtgtgacagccatggctgtggcgggggtgagagtgggtacagagatgccagcttgggtttgccattgttagaagtgaagatgacacctcagtgctgcagattttgcaggaggggactggagccaagccacaaacttttctctgttaggagatgggttcttggagtgggtgtggtgtctgaccatccggggagatggctgaagctggggatctgggaaggctcccagaagggaggtggcctggggaaccaggggttcagtccttccaggatggactggcttgatggtggcttttcaagctcgttctgttcccagccactgggcatcctgtccatcctggaggaggaatgcatgttccccaaggcctcagacgccagcttccgggccaagctctacgacaaccacgcggggaagtcacccaatttccagcagcctcggcctgacaagaagcgcaagtaccaggcccacttcgaggtggtccactacgcaggcgtggtaggtgcttgctggaaccccagccctcggccaggctcctcccgccctgctccaggtctcccacccgggctcagcacctgacttgtctctccaggtgccttacagcattgtgggctggctggagaaaaacaaggatcccctgaatgagaccgtggtccccatcttccagaagtcacagaataggctcctggcgactctctatgagaattatgcgggctcctgctccagtgagtatggagggacaagatctccactctgacaggggcccacagagcgacattccctggagtgaccaggccccttgtctctattagctgagccccccaagtctggggtgaaagagaagcgtaagaaggcagcatcgttccagacggtgtcccagctgcacaaggtaaggccccatctgggagacagaccctccctcttggcagcctccagccccgtccttcaccccctgccctgtcccctgtgccttgggcgggcggctgttaagacttgcagtgatgtttaactcctctccacgtgaacatcacagcaagtctgtgctgcttcccgtccctacgctgcctgggcagggtttgtggggaaggggtgggagccctggggctctgggagggacggggatttggcagggaagtgaagactttggtggtggtgatgggagacagcgaagggtctcccatcaccagaatgagagtgaaagagcaaaagtgcagggcacttagggccctgctcccgtctcggtcctgaccactgcggcatccaattctggttctctgccccctttgtgcctttccctcactcttccccactgccaggagaacctcaacaagctgatgaccaacctgcgggccacacagccccacttcgtccgctgcattgtccccaacgagaacaaaaccccaggtagtcacccagggctggcctggctggggccgggaggcatcatgggaaggtgacagggcagaggccgggaggctgagtacatcttccccctcacctcgcagggtctccactgctgctttttctctggggcctgcgggtgtgcctgttgacctctgaccttttcccctctcacgtccaggggtcatggatgccttcttggtgctacaccagctgcgctgcaatggggtcctggaggggatccggatctgccgccaagggttccccaacaggttgctctacaccgacttccggcagcggtgggtgaccccttccccctgcctgctgctccaggtggaggcctgaggggctgggcaggacacacatatcagagcccaacagacggtcccctgtctggagggggaagcagggactgtgaggggcctggccaggtatcccagcaagacatgggggtggctcagacctggccggggacttggggagaagtgaataggcttggggcaaatagtggaggtggagcctacaggcctcgctgataagctggacatggaattctggatgcagaaaagacgaatgatttctagttttgggagtgagcaacctgggagctaccagtggtagatttactgagctacaaaaacagggttttttgatttggaggagaggtgaagggatactggtttgagctctgttttgcgtgtatcaggtttgaaatgcctccagcagacatcctagaaaagtcatgggggagattgggattatcaatctggagctcagggcagcgggcagaaaggatgcagatttgggagttgaacgagaatcatgtggacgaggcttcatgagacacctggcacatagcaagcacctgggcagtgctgccagctcctccccgttccctcaatgggcaacaagcat

SEQ ID NO: 667 - DNA, 2282 bp, Homo Sapiens
ccggctaaatttttggagacacaggattttgccgtgttgcctgggctggtctcgaattcctggattcaagcgatctgcctgcctcggcctcccaaagtgctgggattacagggtcttaagtcaggtcttaagaacacaagggggaaaaaggctgctcatctatggttgtgtgatggccaggaaaacatttctcactcacaactgctcctttcgtccacagtcctccatacacacagaccccctagcctttattttattctatccttttcgtcatttgaggaagtgatattcaaattaaatttaaataaagttacactgtgaaaagtctcactcccattttctccccctttagcccaattcccacctcactcccaccaaccactttatcagtttcttgagtatccttcaaactttttatgaaaaagctgtctttaaataaagctaatgttttacaggtgttagcaaggttcggggtgggggagggtggaagaagtagtggactaggtcctattcaacctggtttaccctaaagcagtgtccttcgctcactcaaaaataacaataatcatatgttgggcacctgttataagtcagatgcttaatattaactaccttcagcccttagtatgcaccagaaatgcactaatgctttacacaattgccccctttgatctccacaacaatcttaaaaggtaggttactaattctcatcttcatcttacaagtgaggaaactgaggcacagaaaggtcacctgcccaagcaagagagaggagcagggctttgaacccaggcctgactccagagtccctcttaaccgtgacgctctacactagcaaaccagatatagtctctgcacccgctggaactcagcctaatgtgggagacgggcgagaaaaaggcagacaacaaagaaatacgaaattatagactaagaaagtaatgtaaacgaaacgaattcgcggctgtgacagaataacaatggggacctactttagaaaggggaaggaaagagtgtcaaggaaaggcctgagaaaatgacatttatgaaatgctcgggaaccatttgggggctgcaatgatgaccccctcccccacgcccaatacacgggataaactcgaggcccacagaggctaaaacaaacacgacagggtcccccagacgtgtagacgtggcgcaaagaagggaggatccagaaactgggcccagggttcgtacacgccatcagtgtccacagcagcccagccccgctcggcccctgacaagggacatcaagccagctgcttcccacggccccgctgcagctgagagcgtccgggcagctcacagggaggccttccggccagccaaaagggctttggcccgtccagcggcggcctggaaaggcctcttccccggccccccgccagctcccgcctggtccgccccgccccgcccctcctggtccagcctcgtacctgcaccgcccggaccaggccccggccggtcagctggccctgccgcagctgcagcagaatgttaccaggccgcggccggccgccccatccgccccaagccgccactgtggctgccgaccgtctccctcggccggctccagacccagccgctaccggcgccgccgccatgtctcctcgtcggacaaacaggaagcaagcggcctcggggccgcggagatttctacggggcggcggaggggtcgccgcagcgcccccagtgggccgtcggcggaggcgcaagccgcgtggcagggaccgtgtgcggcgtggaggctactgggaattgtagtcctgcgcggcagcggggtaggtgggaaaagagatgtggcctttcctgcactgccggtttctctggcccccgggcccagcatttcggcgaaatctcccaaggtccacattctcccatttctctcgccgatttgggcaggatgcaggcagctggccaagaaatgatcctgggcttcaggtcaggagtcaggccctcgagtccgcttcctgcctgcttctctctacacgtgactcaccgcggacatcgaccaagtcatcgcgctctgccactgcgcctgtgtcctcgtcaggtcactccatctatagattctgggagcctgatcaatcgtagttcctggggctttctctgcgcccgacaccaaaccatgtctaggggaaagggagggtgtctgggatacagtggtgagcagaacggcctgggatcctttatcacgaaatgcaggttacaggggaagacagcagatccatacacaaagaaacgcagtctcaaactggata

SEQ ID NO: 668 - DNA, 2452 bp, Homo Sapiens
aaaaatacaaaaaaattagccggttgtggtggtgggtgcctgtaatcccagctacttgggaggctgaggcggagaattgcttgaacctgggaggtgaaggttgcagtgagctgagattgcgatcacaccactgcactccagcctgggcgacagagggagactccatctcaaaaaaaaaaaaaaaaaaagagttcccagatattgctggtgttccagggaccacactttagaatcatccctgtttcctgataggaagagatgaacagagggaaaagaagtggtgactgatctcacctggattattgcaatgtcccactgtggttccaggcttctccttcactccggtcactgagtcttcaccaggagcaaattaattttcctaaagcccagctctaattatgcctctgctcaaagctctctggatcctctgacactatccaccattgctgtccactagaaatgtctgtagtgatgaaatgttctacatctgcaccgtccagtatggtaaccactaaccacatgtggctatgagttttacattttgttccattaaatttaaatttaaataatcacatttggccagttgctagacagtgcagtgcacttggtttgtcattcaaggctctgcttggcaccagctcctttctatctcctcagggatagcctcaaccctcagtatcccaggctccaggtcatatgcagcgtttcctgattctaccttgtaattcccagcactatggcttgtgttatgctctctcctcagtctacattgtccttctgccctgcctttaatgcccaacccacatatgacctcttcctcgaaacctcctttgacacctgctgctctctaatctttttctcctctgaactccccaacactctgtcctcttcttacaacctttagtgctttctgttttacattgcagttggctggtgtgggtactttctcttactaaactgtgagcttttggaggatgtgactgttttctgtagagagctcttgcttcctactgtaggtccctccaggtacacagaggagttcgacaaatcccacaaacctttgtactggcacactggggatacagagatcggtaccataacttccctgtcctcaagctgctcacaggcttctacgagagtctgattcatgcccagagaaccactgaagccaatggttattttaggcagggagataaaagccacagagggcccagttggcgaggggagtccggcaggagctgcctaagcagaaggctgtgtttacatacacagacgacttctctgcccagcctggcctagtgtggggagatgggaacattcaggcgtcactgcctggctgccttgtgaagttgcggattaaccagtgatgcagcggctggtctagccgtctggtccctgcagatggatggatgaagagaggactgaaaagacagcagagcagtgccagcttctggaagtgaagtgctggctgggtggagtgggcacctgggctgggaatgtgagtgcaaggaaatgtttgtgatctgacagcagacagcaggtgaaattctgctgggtctggcttggggggttatgaggtcttcataacagtccctgttttaaatggaaaaactgttgaaaagaaaaaaaaaaaaaggaggtcaggtgcagtgggtcatgcctgttatcccagcactgtgggaggccaaggtgagtagaacacttgagctcaggagtttgagaccagcctaggcaacatggcaaaaccctatctctacaaaaaatataaaaattagcagtgcatggtggtgtacacctgtagtcccagctacttagggggctgaggtaggaggattacctcagcccggggaagttgaggctgcagtgaaccatgatcacaccactgcactccagcatgggcgacagagtgagaccctgtctcaaaacaataataacagcaacaacaaaacagaggaaaaaaagatagaaacagctttctggctttagactctaatcctaagagtattttacatcctgaaaatctctagcatatattcatctctgggacaaaaacattaaaaaaaggaaactttattgatgttataacataaacacagaaaagtgcacagatcataagtttacacatacttgtgtaactaccccccagacatgaacagaatatgtcagtatctccagaataaacctgtgtgaagcccaatgtgtgtaggattaatgatagaacaaacacaggccttggagtcaggcatgcctggggttgaatcctgggcccctgcacctactagcagtgtgaccttggatgagtgatttaacttcagtttcctcccctgtaaaatcaaggtggatctataatgtctgccttacagggaagtaggagatttaaaattgaaaatataggcaagttgctaggcacagtgccagcacataagtggggactcagatgctctctgcaatg

SEQ ID NO: 669 - DNA, 2498 bp, Homo Sapiens
cgggctcaacccccagcctcctgggactgttttcccctttaaacagtcatgggtgcctcaaacagactttgggtcagagcctgatgacttcctgggatggacaggggcccatggagatgggtgcctaggagccctgaagcaaagctctgcaacccatcccccttcaccagagtgagtagcaggaaccgggaggcaggggtgaggaactcagagtttcggttaaggccaattcaggcagcactcactggaagcagctcagagcaccaagagggcaggagcaaaagacccttgtcctggctcgtcacctccctcctcctcctcaccttccacttgccctctccttaccaccggcttctgaagactcaaagagccgactgaactcccagttgccaacaccgaacccggcccttgggaagacatcctcccatttaacggatgaggagactgaggcctggcttggggaaaggtgtctcttgattcagacagaccttgtccttccatactacaagcatttacagaactcaggctggagagcagatcccggggaaaatggggagacagagacatagttgagcaagacaccaacactctaatgagggagaagcccatttggtcagaagagccacaaggaaaagttaaaacctaagtgctgagggcagacataaaccagcagcatgctgtgagctccacagccaggggcactctgggtgttgtgccaggccatcatccactgacaagagtcggcaacatttcagcctcctccaaaaccgtgcccagccagcggcaggagagctcaggaagcttccagcctcccagggagaggtcaacacgtgcaagctgggctgtccctaaagctgccatggcacctggaagcgtgcagatggagcccggctggcacccagtaggtgctcatgtccactgaaaaagcaaaggcaaagcctgctgtccgggggaagccctagggtccccacatggccacagggaagtcctgttccaggtgggcagttgccctcctctcactgcgaacatggaaaggcactggccacgaggggccaatggggctgttgtgtgcacaaggtctgccccagggagggcaaaagacactgtcctgggatttaggaagctgcctctgaaccggttctcccacgacatcatcctccaggctgtgggaccgttaggctgggcggaagtggactccagccaaggggatgttcccagatgtcatgctttcaaactggacccgcccagaaaggcaggcagagacaggcctgcgcccgggaaagccctgggtaacgactcaggatggcattcaggcctttcctgggcaggggatggccacaggtttccctggcggcggtgtctatcaatcccgtcccaagaaggagagcctgggcgtggaggttctgggcagctgaaggcagagatccatcccttccctggctacccacccccacctcagcaacgcctcccagaacgctccaaagctttctcaagtccccgctcccaggttagggccctgtagccagttccaaggtctttttcaggagcgcgcttcccaaataaagttgagagggggcggggggaatgagggagccccagatccacctcagagtggtccccagagggcttgggcccctttctccggattgttcagtgggaaggagggccggctggtgcctcaggcccgcgggactgtgacagccggcgacccctgcgacctccctttctacccgggcgcccccaccttgagatagtcgttctccgagcgcagctcctccagctcccgcaccaagccgctgggcccgcagtccagcatctcctcggtgaggtcggagaaggcaagcgaggcgctgagcggcaagcggctgctgcccaccgacgacgcggccaccgacggctcgtccggggaggcgggcggccgcgggggctgctgcgcggagggcgcgggctgggccggctgccccgtacggacccccgccgggcccccggccgcggactcggcgtcgctgctcagcgccagctccaggcccagcaggcgcgcctcctccgacgcgcagtccgacacctccgagctgctatccgtgaggctggggggcggcggtggcggtcgcggccccgcacccgagcgcggacggcccttggcacggaccccggtgcggaccccggccacccgcacacccgcaccgcgcgccccgggagccactgcgcgccccttcttgtccggccgtgaggagaacgcggcgctgcaggcgactgctgagcccgggcctgggccgcggcggcccttagccagcgaccagccggccacgtctttgggccgggccggcgacggcgcgcggtggctctttttcctctccggggcaggcgcgggtgcaggcgcgggctggggaccgcagccccggaccgggggctcggccgccggcgcctccatcgcggcctccctcggcctcagcgagctgcgcgcatggcccaggcccgcccggcctcgacgtccctgg

SEQ ID NO: 670 - DNA, 2500 bp, Homo Sapiens
ttcttttttactgttacccctaccattctggtggggacagaaacagagacacagccccttgcaaagtcagacctgaggctggctgagatgcaggttgggtattttgcatattttgctggtgtgttaggctgtgttttcacaagcccagactaaaaatggggatattaggagttgctatttgccctagaggcacaatggcagcaagagacatctctgaaatagcaccctgcttttctcctgggagaatgaggagcttgcctctctcacttccatgggaatccatcacagcccccattatccttgcactcaggcaccctcacctttccaaaaggctttgcatccctgatctctcaggctttccacagtgggagccccagaacagagcaactcagcttttatgtaagttgtggactcttatttgttttaaaggaaagaaacatccttgtatgctccatacaccaggtgccatagcacattcataggtctcaggggttaggatgtggacatctctggtggggccacgattctggctaccacacagccccaccctttggctggcatgcaggatctcctgagctctctaaacagtatggtgagtatggcatgactgcaaggagggcttctttctggtgtctttctggtggtccgtagagaccacaaagagggaaaagatcttgtcaatgctgttggatgtggttgaaaatgttctttctgctgagtctgagaagtgacagcatgctttgctggctggcgtggttctaggattttaccccgcaaatctgaccacagacatttggagtcctaaagagttagaaaaatctgtaaggttgaatgcagaagtttgaatgcctttattttgagccctcattgatcataattacctttgaacagcaaccactgcaggaatgaaagaaaatttggggctgactaaatgaagtagtgtaagattctgagcaggggcagatttggccagcagtgcaaaaaaaataaggccctgtgagagcttacaccctcttcttattttgctgcagcttacaggtagccctgcccaatccccaacgtacgctcttatggttcccaggcaaaccacaggagatggcatcggtcctctcaggagtgacctagcaatgctcaggtcctaaggcagacctgtccatgttgccaggctgggctagcttggaggctgccttggcatgagcacgcaggcagacagatgctgacgccgcttcaaagaaccgcccctccaggtgctgagggcggcttttctgatgctcatcctgtgtcattgtttattttcataaggcgcccagctgctgcggtgatgatatttatatcaataagtgctctattcatctgccggtttcagggaatgcttgccagctgcgtatggcagccaacctcagggtacttctgagcctgatgtttttgcatttagagaatcagttctcaaactctgtaccaacatctgggcctgaaagattcttcattcacccaggacccaccctgaaagggggagctatagccaatgaccttgacctttgtttcaaaggttttatatgtcccgaagtgaagttctttgaaagtcatcctctgtgcctgagctctggttttgcagaaagggatgttgaaaaagagaagagcaaacagggttttgcaggccagacttcatgcccaggctcatgagctgagttcattcttttatttcttcagccaaaagcgtagggtggtgatgccttcagactccaaaactctgcagggaatgttccagaactctctgttttatgagaattcatttattttttatagttatctcagtttctaaccttctattgctcaggccccaatcattgacattatccttcattcctctttctttttttgacagggtcttactctgtcgccctaggctagagtactgtggtgtgatcacagttctccacagctttgatctcctgggctcaagtgatcctcctgcctcagcctcccaagtagctaggattacaggcatggaccaccatgcccagttcatttaaaattattttgtaggactgggtgcagtggctcatgcctataaccccagcactttgggaggccaagatcagcagatcacctgagatcaggagatcaagaccagtctggccaacattgggaaaccccatctctactaaacatacaaaaattagctggctgtggtggctcacccctgtaatcccagctacttgggaggctgaggcaggagaatcgcttgaacccaggaggcggcagagttgagatcgcgccactgcactccagcctgggcgacagagtgagactccatctcaaaataaaaattcttttgtagagacagggtgtcactgtgttgtccaggatggtctttaactcgtggcctcaactcctgacctcaagtgatcctgcttccttggcttctcaaagtgctaggtaagattacaggcatgcctggcccttgattcctctttctctctcttattccatagtcaat

SEQ ID NO: 671 - DNA, 2477 bp, Homo Sapiens
atggagctccccttccagccttcactcgaggattgacaaagagaagtcaggagagaaggaagctgactcagaagctgttgagaaggagggcattcgagaatagagaggccctgggagccagacctaggtaagagcttatggatccataaagggatacacatatacacaatggaacgctgctcagcaagaaatgaacaagctgcagacacagacacacacaacaacatgagtaaatctcaaaaaaattcatgcaaaagaaaaataaaagaatgcatgatgaccccacttatgtgaaaagttcaagaacaagaaaaactgctctatggtgataaaagccagaagcatagtgacctgaggggcaggtactgaccgggacagagcctgagggaagtttctgggatgttagaatgttctctatatattgatttgggtaattaaataacagaaatcaaaatagtgttactataagggagatgactgcctgaaagaaggcataagaaaaatttgggaggttataaccatttctgtatcttaactggggttatgtaaaactcattaaactgtgaactttaaacagaagtatttttatgcatataagtgataccttaaaagttaaaaaaaacaaaaatatggatatgtgactcactggatgaagagaatgccactaattacctgaaagggaacctcagaaaattgggagaaaatgagcctttactcctataccattccctcttatcagcaccatcagatgcttgaattcctaacagtttttcaaacaagaggttgttcaggcacacaccagtttcttatccatgaggcttttcacttctaacacaaccaatgccctcttaacagactccacaccatcatctgtgcaaagccaggagtaagtgtttaacatctgacagcaccctctgctcacaaagtttgcaactaaattaaggaggaggaagtcttgccttcatggagctgagggctgagctgggagatgacatcagtgccttccagccaggcatcaaagcgctgcgaggacaaggatgccaggagccatccatgagacctgggcagcagcggccctgagcttccaaggctctccttcaacatgtagatggtgaagtgaccccttcctgtaattctgccacatcctcaggcatcaatctccagaacaattctgtctttcttttccctgctgtgagcacttgtaacagtttgactccctagaaattcctacagagagtaaaagtgtttcaaatagctggagatggagctgtgcgcatgtactgtctgctctagatagaaatcaaacgttttgagaaaaaccaaacgttactaagacgtgaagtgagccttgatatgattaaggtgagtgtaacctagcctccaacactttacaccacacgtctcaccccacctgatcacccttttaactgcattttctattcactgaccctccaggtctgtgggaatgcctccacccacccaaccctagccaccaacacaaacacattcatacacagacagaaacacggttgtgccattctcatttccagacttttgtctgtgccatttttcccaactagaatggctttccttttacttgttttttttgttttgttttgttttgttttgagacagagtctcaccctgtcacccaggctggagtgcagtggtgcaatctcggctcactgaaacctccaactcttgggttcaagcgattttcctgcctcagtctcccaagtagctgggattacaggcacctgtcaccacgtccagctaatttttgtacttttagtagagacgtggtttctccatgtttgccaggcaggtctcaaactccttatctcaggtgatccaccctcctcagcctcccaaagggctgggattacaggcttgagccaccatgcccagccttcaattacttttaactaaaccatgcctatttttcttttcaaaactgcttcatgacgacttactttcgtgtagcacagggctaggcacagagtagatgttcaatgctgattaaactttctacgatttatgcgcaacactgttttcatacaataatggactgaggatcaaaaaggactaccttggggccagggttcaagctttccttgaccttggcttaccactagccagatgtgtgactctactcaatcttcatggtcctcaaatttattttaccttgacaatgaaagattcaagtcataaaagtccctaaattttctctaccaagggccacagggattctatgtgtactgaatgactaccctaacagtgagcaatcggcagtagcccagccttctcattcttccctggcttgggctcacagtccttggacacaacctaagtagatatagcatcaaatcctccagtaggtgccaatcagaattagtctttgttggctgggaacggtgactcattcctgtaatcccagcacattgggaggccaaggcaggaggatcacttgaggtcag

SEQ ID NO: 672 - DNA, 2439 bp, Homo Sapiens
ttttaaatagagatatgtttggcagagccaagaaggaatgttcatttctgcttggggaagctgtagaagtcttcacagagaggatgacatctaacatgagctttgaaggatgactgcgagaagaaggtgaaggggcaggcatagaacaaagaaaaccacagaggtaaaagcatcaaatgatgaaagatcgtgctgtttcatgcttagaggtttggcaagtttcttgttgcaagtttcttgctgcaaagttgattagaactcaggtttcctttcattgaaagtccgatgcttgggggctcaacagctgaaatatttgcctcagggcccagaacttaaacgtggtggtaaagtattatctctgaaaagaaggaaaaatgtactgatttttaaaattcaaggtgaaaagggaatgcagatgttcatattttaatacactacaaaagatccctggatacttatctcctggcctacatcttccttgtttttgtattgcagacatactttagcatacacaggttgtatagaagacaaagtaccagttttaggatgaataaatgggaacactgatatctcgagaggccttctcagcatggaaacacaatgatgcaacctcatgtggaaataaaggtgctttacttccaccctcacttacttcaatacgctggcacatgcttgctttcaagcaactccctctctagacatggggtttaaccacctgccctgcagatgacgtgtacattctgacatctgcatggaaacaaggtaactcagtcttagaaagccaggagggtggccaagatcacagcgggaggatggagcaaatccttgggtttatgtccctttagacgaggggggttcactctcttctgaaacacgggctcatttatacaagcaaacagatcagaacacattacaggaaggaattcccacggcatgcgctgctctttgctttgccttgtgaagataaaaggaggaagaaacaaaagacttagagagcagagctggtatgaaccatgaagctgctctacattaatcatctccatcgcccccacttcctgctgcccttctcgacataggccctgggtcttttgctgggaaaaggcaggtcgaactggagctggctggggagctcattagcacctcgccagagccgagggctgcctgccttccaggaggcattttgaactctcccttcagttacttccttgcaatcaatatgctgcttttgcagttgctccatccactgcccttgcagccatcggaggctacaggcttctaagaagaactgttggggtttatcaacatacacatcttcacttcacaggaagcagcattccatggtttgcacattggtcctctgggctcataacacagcagggtccagatctggggagaagcaggcacgagggatgtactgggagtagggaggaaggccttggccaggtgctctggcaatgtgggcaggaaaaggccttggtggcaatgggtgttgcatgaggaggtcctatggtcagctcaggcaaaggcccaggagtctcaactgggaagcagaccctgaagccatgtctcccaattcagacctaggggccctgaaacgctgtgtctgagatgcttttcccttactgattcctgtaatgcctgagccagcttgtagctgtcatgcatatggccactagggaccaggagaatttgagttctacatgtggcctggttggccccatccctctgggaggtcatcactacagctgagccacaagatcctgggactgggatcctcatagacctctgggacagtaggttctggggagtgacattgactccaaccctgcaggtgtagccttccagaagccagttcctctctgtaaaataaaggcatataaaggaccactcttagcccttccaatcaccagcaggaacccaagagagagtccctctagccctgagagtctccaatagcatcatccttcttatccaaatccaataaagcaatgctgttcttcaaggcccactgaccacaacctaatggagagctgaggctgccagataccaagacttagcattatagaagggcagagcatggcaggatcccaggggaaaagaattagcacaacctcatacaaaatggagtaataatacacctacctcagaaaatctgctatgagaattacctagatcatctctttaaagcactgtattacttagctttttcttagtgacaaacaaccccgaatcttgatgtacgcagatacttgtttcttgttctcagttagctccaggctgtgtttgaatctattccctatgcctctcattccaggaactagtctgaaggagctgttgctgccaggggcaggttcttccagtgacggatggcagcaggcaacagagcaagcagggacacatgatacctcctgaaatctctcctgggaactggcacaccat

SEQ ID NO: 673 - DNA, 2500 bp, Homo Sapiens
atttttttttaaaactcaccctggaagaagagatgctccaggaaacataaatagatcactgctttgtaatcccaggaaaattaaagagaatttaagctctacgaaacaagcaattaaagggtgagaaaacatgacagttgttcaagaccgggagtgtatcagcttctcgacaacacccccaggttcccccagggttgtcttctgggcaacctcccaggtactgtcctctcatcaatactagatccgctgcagttcctgaacatgtgacggcacagtatgtaaaaatgcatatactattagggctggaggaccctcatctagtcatcgtcaatgacaggacaataaaaaccaagttcacgtatttattaagtggcaaagctatagcttagaccccaacctgaccctacatgtataaagaggaaagaagagggatgaagataggatgttgggagggaaaaaggaggagaaaaaagggagagaaaatggaagatggaagcaacagctggggtgcagtaaaaaggggcactggactagccagaaaacctaccatgaatcaaatctgagtacatgccttcaatttctggggctacatgcccaacaaacagaattgttgggtcacatagtcacttgatgtttaaattttgagaaattgccaactgttttccacattagctgcaccatttggcattcccatcggcaatgtacaaggttctaatctcttagctctagcactcactatgttgcatgactctgaaaaagtcattttatttatctgaacctcactttctttttctctaaagagtaggggttagaactagctatcctgtttctgcctattcacacattctttctttccatccaaatcctgaccttccactgcccacatctgtttccaagagtttcctgacagtgtgaagtactgtaatgagtaagtcctagctctgctccttagagctagaattatcttaatccatatccccaagttatattaatgcacttccatttccatccatatctctcagcgtacattttttctctcttgtctattcttttaacctttttgcaagcatcatcttgttctgtctgtcggctgtcagcttttctctccgagcttctgcggagttgccagattcttgactatttccccaccctcagctcataactgtttttccctggagctcagcgactgctaagtggtctttgtgaaatcctattaggataatctccctgtctgtgtctcctctcagctgggctgcctctagaaacctcagctgtcttcctactcacaatcggcaaatcataggctggctcctgagtcatccaacatcgtacttattcacaaacatgcttagatgagctctgaacctgtcgaatcttgtagcccacaagcaagagttaaattcactggagattcaactcatatgtcttctcctgcagaaggtgtctcctgtttatgcgggacccctattccctctacaatcccaggaatgacacctgccccctttttactttttctgtttctgtttatgtttatcatctatctctctcatcagactgtgagattcatgagagcaaggagctggagtatcttgtccaaagctgtatcctcagtgcctggcatattacaggccctcagtacatgtttgttgaattcatgaatacgtgttcctcttccatagagtcaatcatggatctgcctacctgtctacctattagacccaaagctactttggggcagactgagatttacctgccatggtaacacttgttaaaaataaaattactctgacacttgttaaaatggtaaggaagacattattcaagattattgcaatggaggagagaaattaggcaaatataacaaagacagctggggatttagagccaaggaacagagtgagtggatgaaaaattaccaagaggagacaagggtagggagattcttgctaaaacaacttaccagggttcttaccgaaggcaggccaggatgatcagatagtgctatcatccgaatgtttgtggaggccaaaactcgtatgttgaaacgctaaccgccaaggtgatggtattaagcgatgaggactttggggagatgaattaggtcatgaaggaatgggattagtgtccttataaaagggaccccagagagctgccttgcctcttccatcacatgaggacacaactagaaggtgtcattttttaatgaagagagatctcacgagatatggaatcttctagcaccttgatcttcaacttcccagcctctacaactgtgagcaataaatttctgttgctaagaattagtttatggtacttttttatagaagcccaactggactgacagatgtcaaggggttgggggatcctcagtaggctaacctagcagagttcttgctaaaactgggctagacaggccacagacaagatagccaaaatcaaagcctagttgagaagggaattcagaggagcatgactaaaatttggtcaaggggagagtctt

SEQ ID NO: 674 - DNA, 2473 bp, Homo Sapiens
ctcaaaccaaaggctgatacgttcttgccctacacttcactcaatgctggcaacccaatgagggacatcaggataaaatcgagaatgcgcggtctgtgcttgtgaattcctaccacctggccccagctagcctcccatcccttatatctgccaagacaaattcccccaaatcccctctcccctggccagaagtgacctccacattcagccccgattatggaaggctgtcacaggctattccttttgctgggtaagcccttccccctttcaagtctatgttcaactgtcatatcctttttgaggacttcctttagctcttccctccacctctactgccacacttaacagagcggagttgtctcctctggcatcccattgtcgatagcccactcctgagttacagcaacaacggccacctgactccactcatctgttgacctgtccatttctccattagcctatgatctcctttagggcaagattcatccttatctgattcatctttgtatcccagatcttagccaggcaaacaacagggatccagtggagagagagatggataggtgggtaggtgaagacacagatgtacggttgaacacacaaactggcaaagttccaaatgaactaataagtggacacctcactgagagacttaaatgcagaagggtgccaggacataagaggaacggctgcgagttatgaaaatgggctccatggggcaaatcaaaagtccactgaaggcaaatgcatcataacaagactggcatttcctggagtttccgggctgatcaatcactttcatatgcatcattcatttactcctcacaatgacctggtgaggtaatgagttactattagctcaatgcacaaggaagctgaggcttgtggacatcagctgaagtctcacagccagcgaatggcaggccagggcaccagggcctaggtctgcctgcctcttccatccaccttctgtcatcacaagccttctgatctccagccctctgatctgccccagtgggaccctcctgcgtctctgctctagttgtagaggacccatcaggcacttagagagaaatgagtggtgttgtgaacattcgactgtgtccatgtggaatccacacacacagtttgcctgaaaatgactgataggatggaaactgacaagtcatcatccgcttcgggcaccagcgatgactggttaacatgaatattgtgttgatttccgctagatagaagaagatgtcacttgtcgttaatggggtgtcacacgtacacttgcctaaaggaaaatgctcttttggtgattgttctcaattttcacctcattttatagccataaaaaagaaaagattcagcagaaaggatgaatccacctaggggtaggatggaaaggcattcttctcatttatttccttctttctttaccagaacaaccaaaacccagtgaaaatgctggtgcaagtcagaagagggggacctgggttctaagagcagccaggtactctgggcttcagatcagagcctcagaatccagcagttatgcccacaaggtagccaaagtccagccagtaccaccggtctctcggccagctatacttgcctctgctcaacaatgatgatttgaacgtacatgtacaaataataacagataacattactgagcactttactatgaactatggaatgtgctaggtaaagacgttactccacgtaagccataaaatcaacctatggggcaggtgcagatccacaaaccctgatttaagaattctgaatcctcaaaagctttgaaaaccaaaacattttttcgtaagtttggtacagacttatttggtgctaagatttgagttaaagtgatatacattgactaatagttttttctatctccttcttactattaatattcatactttttgctacaaaaatatcaacatgcttgatttaagggtgctaccacagcctctgctgagggatgttattaataaatatggtacatttactatattgctttcctttaaaagttaaataaatctaaatccgagcacatttggccccaaggactgcagacaagaaattgagaacctgttaaacccattatatggatgaggaaacaggctcagaaaaggtaggaaactttcctgaggttacagagctcaaaagcagcagatgaaggtttacatctaggcagccttgctccagagctggcccggttaatcagtgggctttgctacctttgacaaatgcccctgctagctggtctcagccccatcctcccagcgcagcagttcagtccctgtttgttcttgagcaagaagtaagcatgtgccttcttagtcgaggtacaaggcaatccccagggtatccggatcataattacaatgctttattaatataaatctcaggatatagacctgtgtttcaaatcaagagtcaaacacaacaataacatcagtcttaggtaactaccagtcaa

SEQ ID NO: 675 - DNA, 2408 bp, Homo Sapiens
gctgattcacacaggacagggagtgggctcctggttctggtcttgcccagtccaggatacttttcccagctgagtcagtctgggccgggacagacagggctgcctcacgcacaccctaagacagcctcaggtcagggcgctgcccagacctgatgactcaggagtgtactcctggattcagtcttgccttccaaacatctcccacagatctactctgctgccagcaccatgcagacaccgagaggcacaatccctaccctcacagaccatccactccagtacccataatcatcactcagccactaccctgtggagacacagctgatcaggacagagtctcaggtccactcccaccaaaccgcttgccaaaagaaagtgtcaaaggtcccgggcagccctacagtacatcagttaccctgctcccatcctgtagctccaccgagtgggaacaatgtaccctcaagagcacaggaaacatttggatgcccatcacccttcctccagcttctgggctcaggcttctgtttgcccagagaacagcagctctgagcaaagttcattattctactaattaattcaaacactaaagtgcctagtatttgccaggagagttggggtttttcattaagttcaatacaccatgcccctcccgctgaaagacattcccatcttctccagacgccataactgcaggagctgggggtctgcttagaatcacagaatgccaggacccaaggagctcctgtcctcccgtttcacacaacttgaatctgagcccggaacagggcagggacttgcccaaggtcacacagagcgttcgctacataactcaggatagaaagaggtcaggtctctgtttcggacaccccaggcagtccttcactcagctgagactgccattgacaaaggagggtgtctgagaaggaacatctgtccctaagataaggttattatcattgcaggagaggcccaggaaagctgcttcagagccactcctgtactctccccactgggcttctggggagaggcaggtggaacctgaccctcatgcaccctcttccacccccacagagggagaatgctggattcccggaagggagcggggtcaggccacaaggaaggcagtggccaggaatcactctctcccggggagtggggagaatgctgaacgcttggcacccgtgggggtggaaagccagagaggttaagtgctgctcagagatgacttcatgactcgggaatcaggagctgccgggctgctggtgctggaattcaagcccccgcacatagcccgtgcctgtggctttggtttggcagagcaggaggaaggctcctcatggctgcccaagtgcctatacctaagggcagggtccctgtgctcctacctccatctcctgtggcaaatcccccaagaacccaagtgacaggccttaaccaagcacacagcctgtctaggtccttttaatagtccctttttgcagagatggaaacaagggctcagaaaagtaaagtcacttgtccaaggccacacaagcaggaagtagccacactgggccagaacccaggcttcactgacctggacatttaaccacaaacacataaacacacgcatgaacacatatgtacacggggtcaccagcctgccccaggctccaagggagccctgttaagtaggggggtcaatctagccgggagaaagaaagaatggtacactttggccagctgttgaccaggtcaaagtcctcaacaggggctgtagttccatcaggagacttgtctcaggctgagagaccttttcccacccctcactgcccccaggagccatggaaggttgtttatgcatccagcctctctttcagtatgtgaaagtgctaagaggtatttcaaaacaacccatgggattagcatgcccactggctgttaggaattacctccgttttacattagagaaatgaaggctatgagcgaaagtggggcgtgaagatcttgcagccaagtcagcagcaaaaccaaggctgaaaccaagatttattcccagttcagccctctttgtgggcacctgttcatccttaacccttcatttttatactcagtttccaaaaaagaaactagtctagtctgaagtcaccccggggctccgcggcacggcctggattcgatcctatttcaaagctctgaaaagatggagtcttcaaaggctgcatttagatgagcccaggatttccctcctacagcaagtcaaggggctgggaagaaacttcttccagctcccagtggtgataggaggacacagggaattaaatctctccttgagctctggaagccccctctctgccctgttttggtcccttctccacccatgacctctgacaagagggaaggcaactccaaagtggataagagccatt

SEQ ID NO: 676 - DNA, 2498 bp, Homo Sapiens
gttgtgcatcaaggcagattcacaagtgtgagttctgccacttcctaactatatgagcttgggagtttatttcatctctgaaatcctcagtttcctcttttgtgactagggctggtagcaccttgcagggtgatgaggattaagaggaatgcatttgtgtgtgcaagggacccagcacgtgatcaatgaatagtggctgtgattaacccctacctgccttcctcctggccagtgggatcagtgctcaaaggatcagaggcctgggaaaacttgcagaggcagttctgttgctggaaggaagctagcctggggacagggagatggtgctttgcaaactgtaaaggaatataatctataataggttatcattttgcttctgagcccagagacttttcaacaaccaatcaggtcccttcagactgtgaaaaaaagatacagagatagtcagagacctgcccaaggtcacacagctttgaccacctgtcctaagcagacagaggtaaagaccatttttattttccccgaaggtgcaaatgacagtgaccagaaacacctgaaattctacttggggacctgggtccccagggacaaaataaataaataaaaatctagaaggtaaaaagaaactacacaccaatccatggtctggtgctctggtgcctgaatggttaaaccaggtctgggggtgggggtggagtgagggttcaaatgtcgccttcaaggtcgggttactctgaacacaatcactcaggagagagccaggcctggcactgcctgcaaccagcttttcaccaagcctcagggcagcccattcccacagcaagaactccaggatcctagggtgccagctagaaatgggggaagggttcaggagcctctggatgtctccctgccaggagctgacccagcacccttgttactaactccctggatgatcgtggacaattcccttctctgagcctcagttttccaatctgtaaaagacaggtctcaaagagacaagcctccctctgtcccagcccagtaaccaagctgggcattgctccgattaccggtggagacagccaggagggggctggctccctcagggcctcagagacagaggtgcattgaagttggagcttgtaatctaggcagcagatccgaaatccctgctggatccgagggctagggaggctctcgggatgtaaacaaacctcctgtgttctcagagcagagtagagagcccacgctgcagccttatctcagctgattagatcagccctgggtgctggcttcctgcctcttcccagcctccctcaccgacccccaaggaagccatcctccagaccaggtcagtctgtcccacagacggctccggcagggcttctccaaggcaaggagtatccccactctgggtagccgggccagccatgtgccacatctgcccccacgcccagaggctagagtgacaccgccagtccccgcaggcctggccactgactgctgggcttcaccaagtcactgtttccacacataccagcctctccctgcctcccctttccattaccccaggtgtcacctgaccagcagcctcttctactgtgccagagaaaactggagcagccgagctcccgggcctggaggacagggggaggggtgagatgcagcctgaaggggtgggggccgctgaataggaaggtctgggctgaaggtgggggttgggggaagcaggaggcaagaacaaggctgggaagtgggggagggaggaaggatggctgtagaaaggtcaaagccagaaagaactgctgagatcagagtgaccttttggggagtactgcagccccctgaaaaggataaaaaggtctaaaccccaataactgtaactcttagtttacattttcaacatatgcacagacaccacctccccaaagccaaactctggccgggttaagaaccctcgtctaggtgctaataaagccagaactttacaagtttgccaaacagcgatgatgacctttgagtgccacaggtgttttatagaggacactggagttcacatcaacaaagtgacgtattaactgtgtgtgtccctgggtgagcagcagagctaggacgggggctggagttttctgtaccctctttttcagtcacccagccttcagcagatgggaccagagaggccccagtgagatgcaagaatgtgcccaaggtcaccactgtgttagttaatgacaaacaagcccaagaagtcaggcttattcttctaaggttaaatgagaccccaactgttgacatatgtgttctctctcctccctctctagggcaccatgcagtgaaaacatacgagaaactggcttttcagaacactgtaccttttctgtccaccaacaccccacccctcaaagtgctatttgcaatcactcagcctccttaagggtagaaactctgcccctccagcacaggagggtgaccccaggtcctggacagtgtccagagtggtctgatacccttggcaa

SEQ ID NO: 677 - DNA, 2452 bp, Homo Sapiens
tgaatatgtgtgtgtgtgtgagtgcacgtgagtgtgagcttgcaagctccttgagggccaagcatctggctgtttattccatctccccagcacccagcacggggcacagcaccaaacatattgaataaatgaataataaaatatacaacagtcatcagactcccccagttgtcttctaggatttctggaggattcagccactcttaaatcccaggtacagatggacagtcgctgggaacctgaaacactccaggcacagttctagaccttttactgctgtctcattgatgtctcatcttgtgcatcagagcttactctctccccgtcgtgtagatgggcaaactgaggcccagagagagtctaaaccccacctaaagtcacacaggtaatgagagacggccccaaagcctgacaccacattcagaattctttctaccacatcaagtgtggccagccctggaggagaaatccccctcaagccccatcccttgatcataaacaacatgaaaaacacaagagcgatgttttctcatcccagggggctgaaaaatgggatttatgaagccattaattacttcctcctaattaaatcaaaattaaatgtgagcataggtacgttttccttattaaagacaattaaacggacagtgcggctacgcaaataaaatgagtccaggatttaaacggaaagcaaatcaaataaaaagcctccccgggatgaggggtctgttcacgactgtgctactcgtaaaccaggagttcatcaattttctttaaatattagcaacttaattaaatctgctctcctccccactttaatcctgccgtatatctaaaatagatctcaccacctacaggagttggtcatgagtgctgaccccataattctatctttttttaaaaaattaaaaatcctacaaaatccacatccagctgacagaggcctcgggggaaattatagttcggaaaacggattagtcagagtacccagattttatggaaatgctgggaggttgctttgagggtgggtgtcgtgagaaggttcggggagaggtgggccagggttgccaatgggggcagggccgcggaaggagctgtttgtgtggggccttggcgacaaccgcggggcccagcggttcctgtgggtgctgacaggagcctggcggtgagtgatggaggaggcggttgtaaaataggttaccgtcgggcgcccggggttcactctgcggatggtgctgttgctaagctacctttagaattcgacaaggacggatgctccgagcggctccctggggtggggggaaccaggaagcagtgaattaactgaaaccgtggtgaagtcctttcttcctgaagagtgagagagcgtggtatgagagtgtgtgtttgcattcatatgtgcccacacaagcactcgtacatacgagggactcagctggaaaggggacaggtggcttttaaaagcccaagctcatattcctagggttggggggtggggtgggctaatgacaaccttcccccccacttagtggtaagaaactatactgttaggttgccaaaaagactttttgggatttggggcgggagttcacagttagatggtacactcaagatggtggaactatccataatagtgagacttacaaggtgagacttaacaacataaaagtgaatacttactgagcacgtgccaggacccagagagtattctaggttcttgacaaatgctaactcactgactccccaacgccagactttgagctaggtcccagtaatagcctcacttaacagataaggaaactgaggcacagagagggtaaaaaagttggccctctgtatccgtgggttctgcatcagtgaatgcagccaacccaggatcaaaaacattcagaaacaaaattgggtctgtactgaatgtgtacagacgtttttcttgtcattctccaaacaatatagtataacaactacttgcatagtatttacactgtattaggtattatcaatactctagagatgatttaaagtatatgggaggatgtgcataggttatcggcaaatgttatgctattttatattgggttttggtatccatgggaggtcctggaaccaatcccccatcgagagatactgagggacaactgtaatgtgcccaaagtcaggaagatcataagcagccgagctgggatttgagcccacgcagtacagctccaggtggccctttaaccacacacaatgccacctctcttaagaaagtgtacattgggcaaatatttgctaagagatggaaacttcttctccctccctggatggagtgtttttctggaggtggccttgagagtaagagagcagggcaggggctctgggtgaaggtgatagagaaggagggtgacaagtcacaacagcagtggcaatgtggggactggttgctgggggaaacagaaagggccctggg

SEQ ID NO: 678 - DNA, 2489 bp, Homo Sapiens
atctttctttttccagttatgtacaatatatccatataaaaatctcatattttaatgggattttataaatatatacatggcatcatactgggtgtatcactcttttttttttttaaacagagtcttgctctgtcacccaggctggagtgcagtggcgccatctcagctcactgtaacctccacctcctgggctcaagcgatcctcctttctcagcctcccaagtagctgggattacaggtgtatgccaccatgcctggctaactttttgtatttttaatagagacagggtttcactatgttggccaggctggtctccaactcctgacctcaagctatctgcccaccttggcctcccaaagtgctgggattacagatgtaagccaccgcgcccagccggatgtatgattctttaacctgcgtttttcacactccaggatgtcttggaaccatttccatgtgctagcataaaaattcacctccttggcttgggacgtggctcacgcctgtaatccccgcactttgggagtccgaggcaggggggtcatctgaggtcgggagttcaagaccggcctgaccaagatggagaaaccccgtctctactaaaaatacaaaattagccaggcgtggtggtgcatgcctgtaatcccagctactcagaaggctgaggcaggagaattgcttgaacctgggaggaagaggttgcagtgagccgagactgcaccattacactccagcctgggcaacaagagcaaaacactgtctcaaaaaaaaaaaaaaaaaaaaaatccacctcctttttctgcactgctgggtaggattccactgaatggatataccacattttatttagctacgacctcatcaagggaactttaggtgttttccagtttctcaccaggatgatggacatttttacacaaggctctttgcaggtgttactctgggtcagaaagtaaaaatccctcgagacggggattgcaccaggtcccggtcctcagccccactgcacttcacctgtgtcaaggccacgggaacccttccaccgtctctgccagcagatgccattcagcacccaccccaagatactcatactttgacccggaagagaccagaagcaccctgcagttcgtgtggacaagtctcccctctgacttacagtcccctcaccctcgtacctaggagagggatggcagcgctgagggtcgtgggattctcttccctggaggctcccccatcctcgtggcctctgcgcggtccagctcccctccgagctggctcaaggggtaacttgatccaggtcagctggtggagtatgaggtagcgtctagctgagcgtcacggtattttattaagtccgaaatgtgatcgctactgttgtcacactttagcgcccccaacaatccccttacaaatgagaaaaacagagcctccccaaatgcctttcctctgacatcaaggaaagcgcatggaaccctgcccagaggcctgagcccgggtgaccccaggagtggctccagagcttgaggaaaggcctggggggcggagggggtgtttttccagtttcaggcaaagcagtgagctgggggctatctgctgtttcctctgcgcctgggtctgtaaagtcagcggttgccgtttaaatcccattttccttaacatgtcaggattgctcattctaggccatccatttatatggccatggctcagaggtctcagactcacatgcctagtggggtcaaggatccaggtaacgtaaactgaagcaagccccgtagagatggtgggaaactgtaaatggatgccctggctgaaggaggtagctgaaaatctggagagagaacaagaacaagaagagaaagggaagaggaggcagagagaaaagagagaggacatcccccaagtttacatattgcccattgcttcaaaaaaatttaaacatgcaatgagctaagtaggtatgtctccaggccagtttgcaggctcttccctaactgaacttatcaacacagtagacaagctgccggcctggctccctcacccctctagagcagcactgtccagtagagatttctgcgatgataaaatatctgcagcgttcactgcaataaccactggctacatgtagctcttgagcacttgaagtaggactaaagaactgaacctttaatgttatttaactttactgaatttcaatataactataactagccacaggcaactaattgctaccatattagacaacatggctctagattctttcaatgtggagggtatcatcgtgcttgactactgcaaaaaagatcactccttcttggggagagggggtagattatacctgagaccaccaagcattaatcagagtcctgggtaaatggaaagaaaggaaattcgaaatactgagcagtaaaagcttaggtgtaaccagatgtctgctggctcaagagtggtcactcagtgtccttccactcccccacttcccagtgagttt

SEQ ID NO: 679 - DNA, 2458 bp, Homo Sapiens
gtgtgtgtaaagcaatatggaaaaatgcggaggtgggaaagatagagacagagagacagaagagatagagagatacaagagatagagagatagagagatgctggtttgaggccctggggatccactcttacctgaaaccactttttttttttttttttgagatggagtctcactctgtctcccaggctggagtgcagtggcatgatctcagctcactgcaacctctgcctcctgagttcaagcgattctcccgcctcagcctctcgagtagctgggactacaggtgtccaacaccacgcccagctaattttttaatttttagtagagaccaggtttcaccatgttggccaggctggccttgaactcctgacctgaggtgatctgcccgcctcagcctcccaaagtgccagaattacaggcgtgagccaccgtgcccagcctaatgttttaatttttagtagagatggggtgtcactatgttgctcacgctggtctggaactcctgggctcaagtgatcctcccgccttggcctcccaaggtgctgggaatacacgcatgagccaccatgcccaccatatttttactgtactctattaacatgttcacgtatgtttagatacacaaatacttcccattgtgttaccaccgcctacaggattcagtatggtcacatgctgtaggggggtttgtagcctaggagtaataggtcacgccacagagcctaggtgtgtagtaggctatgccatccaggcgtgtaatgcactccatgatgttcgcacaatgacagaatcacctaacgacacgtttctcagcatgtatccccattgttacgtgacacacgactgtacattgcttggaactggcacatagcaagtgcctactaagggttatattttcattatccaccaatgggcccgtcccctgttatagccaacttcttgctgttaacatctggtttaatggagtccccctgcccccttggagaggatcactagctccccatatccttcctgcaccctgcttcgtggcccagcaggtcggccacttcccctgcaggcagctctacggtggaggctccacgcggctgcttccccatttgtctgagttaagtgctcctggggaacgattcggagcctgatgggaggaggagacccttctgttttctctcccagccccaaatctaactgaaattgccttgtaataattgcatttgtggtctgtgaaagctgtgtctcgtggcgaccagggactgagattagctggtgaaaaacctggcacaggggcacacacggcatcactggggatactaagcaagccacggacaatgggggagacagagggctcctgcaaccagaaaccactgggaacctcggccacctctccctgctgcagacatgtccccgccatgccgggccggcgtaggaacacgctgttcctcccagcatcagttctcccttttcccagtaacacaggtggtaatgtggcagagtgcccaaagcgtctctgcagtcagactgtctgggtttgaatcctggatctgccacctcctagctgtgggaccacaaaggactttgtcccctgtggttgttggcaatgaaacgacagtgcacccccacccactgctatgcacgtggatgaactgacaggcatgcgaagggtgaaacaggacctgatctgtcctaggggcctcccaagaggcagccagcaggacagaaagcacccgctgctttcggaggactttctctcccccacgacgggccatctggctggaaataccaacagggcttctttaaggacatcagcaactttcggtacatgttcatcccacaccatttccacccacacactacattaaaggtaatcgacaaacagctctctaagagtccaaatgttccagagctgactcgctgaatcatgcaacaccatttcattaaatatttattcactttgatttggcaatttgtcctcatattttggaaccagcacacaaacacatctacgcacctgcataaatatacaacacatacatatacacacatgcatgaatacatatacacaagcacaaatacactacatatacatacatgaatatacaacacacatatacacacgagtgaatacatgacatataaaaatacacatatgcattaatatatggcacacatacgcacatgcatagatatacaacattcacatatacacaatgcatgaatatacaggtacatatgtacatatacacgatgcaggaaaatacagtaaaagcacatatacacacatacacgaatacacaacatacacatatacacaggatataaaatcccaaaaaagacagaaatgcatcttgcttcttcacctgtttccttctcacagccaacttccaactggacttctgcctccgcagccttcccagagcccagacttccccaaatggccagagggcccttctgagtccaagag

SEQ ID NO: 680 - DNA, 2422 bp, Homo Sapiens
ctaccggaaagagaagctccagcattctaatggagctccgccttcagcacaggtaaggacaggctccaggctcagagctgccagttcgagtttaataacctagtttatttttgtggtattcatttttaaccctgtgttcaatttaaggtgattaactccatacagtttgccagaaccatctaggttttaaaactgaaagttcacaggtgaatggaggcaagggtggttggtcacccctgcttcaacttatgggtatcagatactggttttccattaatggcagcttccttttaaaataaacatttgaatttaaaaaggggccggacgcagtggctcacgcctgtaatcccagcactttgggaggccgaggcgggcagatcatttgaggccaggggtttgagaccagcctggccaacatggcgaaaccccatctctactaaaaatacaaaaattagccgggcgtggtggtgcacgcctgtaatcccggctattcgggaagctgaggcaggagaatcgcttgaacctgggaggcggaggttgcagtgaaccaagatcgtgcaactgcagtccagcctgggcgacagagcaagactccgcatcaaaataataatagtaaaaataaaacaaaataattttaaaaatttaaaaagagagtcacttgagggaaaataccaagaaactaatagtacctttggtgaaaagaaatggcaaaaatattgtgaatactgtgtcatgtgagtgagtgatggtgttgagaaatgtacaatgcctgcaagtctggaaacccaagctcagttcctgggttggtggcccactggccgtttgactctaaacaggttgcttgccctctccgagcctccacatcatcccaagctcacaaggccaaccatcctcagaggtggggagaggtcagagggcaggcaggctctgttgtgggcaggcaggctctgttcacccttatcctcttaagggtgaggtcttaaggtatgagttgctcccagtgcaaaagctggcaccaacagcagcaactcacaaatctttggagaggcccggcattccccactcagtgactgctgagtttgactgatggggccatgtcggcaaattagccaccattcagcagagacaccctttagagatgctaattgcccagtgctcatgcgtccccacccctccctggcacaggcggctggctgtcgatcccctgccattattgtctgataacagtgcttgatttgtctacacagaccagggcccctgcatgcatgctgttagcatctaactaccagccagcacggcgcatgaagcacggttcattaatgctcttgaggggagcaaacaggtgctggcagaaatctattcccgtggacaaatctgtggacacgtgcaccctcatacgtgcccacttagcccccaagtataggaatgagtcagtgtcacgtgtgcatatgcattctgtgaactactcatacgccggctaagaagcagcctcagacacatacgcacaggatggagtacatgcatgtacataacaggcaatgctacatggggttgtgttaggattacattacagaacacctgtaaggcgtcttgaacagcgcccggcatgtggttaattactcctcagtaaattagatctcttattattttttcccagtgctcctttatttattgaggtataacttacacataataaaatgcacaagttttaagtgtttagtgcagtgccttttgataaatagatacacttgtgtacccaccaactcagttaaggtccagaatatttccatcatccaggaagttctctcgggttcccttccagtcaatacctccaaaagcaatcactgttctgatttctcttgttatagttgaattttgcttgttcttgagcctcatataaatggaatcatatggtgtgtccttcttggcaatgcctattgtggatgctcagatgtgtgcacagccactcacacttacacacatgtgcatggatactcagtcagactcattcagaaatggggatttctgagctgtaaatcccttggcctcagcttgcagttcagctaagcctctctgggttcagaggactaaaggagatggggagagcccctgatgctgggtccagccaccgtggggggctccttccacattttcttcagcttcccttactgagtgacctcagacaagaactgaaaatctgttttctcctgtgaaatgaaatgaataataataacatacagctcataactcccctgtattgagcacttattatgcagtaggcactgttctaaggactgcgcaagttcgagtccactctgtcctcccagcaaccctataatccaggtatcatcattacctgtcttatgggaaaggaacctgaggcacagagaggcccagcagcttgtctgaggtcacacaggaa

SEQ ID NO: 681 - DNA, 2465 bp, Homo Sapiens
ccctgttaatagggtttccaaagaaactatgggatgcccggttgaatttgaatttcagataaacaacaaattttttaagtataagcacatctcttaactattagcagtctggcacatatcattccaggcctttctctgtgaagacatgtacttttttttgagacggagtctcgctctgttgcccaggctagagtgcagtggtgcaatcttggctcactgcagcctccgcctcctaggttcaagcgattctcctgcctcagcctcggagtagctgtgactacaggcacacgccaccatgcccggctaatttttgtattttgagtagagacggggttctgccatgttggtcaggctggtctcaaactcctgacctcaggtgatccgcccgcctcacacattttttttggtatggtttgtatctgacaccgtctgcagcttgcttttcctctccggggtatcaccggggccactgtgtttattagagcaggctgtgaggttgtggactccatctggattaggatccttgccccgctgtttgttaactgtgtgatcttgagcaggttaccccacctctctgagcctccgtgtcctcatctgtacaacgtggaggatacgggtagctttgttatttcctgtatttgttgatcttgtctcttttgaaagctgcatagaatggagaggccgtggtggctttaaccagtcctccgtgatgggcgccaggactgctgcctgtttattgctctttcaaaggaggcagtggaagggggtcgagcaggaaccgggcacataatcctaagacttagtttgctttaaaaaaaaaaaaaaaatgaagggtgtttgtctccctggaaaccacttgctaatctccaggatatcgtctctttttcaggcgaaggaggtggaggagaccatcgagggcatgctcctcaggctggaagagttttgcagcctggctgacctggtgagtggctgcctggaaggcgtgggtttaggcccaggccagacttcaggcccttgctggagttttctgcggaagccattttggtggtgagttagcaaccaggaggaatggggcagcggccagcgctgagaggaaagccacgtgcaaacactccctcctctctctctctctcgctctctctctctcactcaaccccaagtgcttcctgaggcggccatcttgatctcgtccttccctcgagatggtttttattccgcagaggagccaggagtggaccacaaggtggcactctcgggcaccgatgcagggagccgttcagcggggacgctagactatatttaactttcctcagctctgcaccgtcccctgtgcaaacatggagacagccaggaaatggcttcaggcctgcgaggcctaggaggagcctcttgcccaggccacagcccgtggtggagttgggcatcgagttccttcctgaatccttctgttctctctgcttttacctcctactctgtctggttggcccaaatctactagcctggctgaggaggaagatggaagacaatggcccagaagacaaagcctcccacgccagagtctctagaaatcgcctctagaggctgggtgcagtggctcacacctgtaatcccagcactttgggaggccaaagcgggcagatcacttgaggtcaggagttcaagaccagcctgaccaacatggtgaaaccctgcctctaccaaaaatacaaaaattagccgggtgtggtggcaggcgcctgtaatcttagctactcaggaggctgaggcaggagaattgcttgaacccggaaggtggaggttgcagtgagctgagattgcgccactgcactccagcctgggtgatagatcaagattgtgtctcaaaaaaaaaagaaaagaaaaagaaattgcttctagatcccagtgttcctaggattgctgccagccaggtgtggagcccccaggagtgctgatagaattttctagaagctcccaagcttattagaggcaaaccagtaacctgggcttgaggtgtctgcctggaggcccaaagggtagagctccatattgtgaccaggccctgtgtctccccagagtggaggaagcctggccacctgggcccagtggtgtgcgtttatgtccctgagaagcaccgtgtccggaccctgagagtgtttgtgagaacccaagggagtaacagtaacagcagccccagatgttcattgaacgcctttctttgtgcccggcacaaagccaccctagacagcaggcactgagtcatccctacctattcagcggacctcggcccagcctctagggtcacagcagaaatcccaagaggacctatatggtttcttctcttgagtcaatttttacgttcagatgtgggtccaggtgggagctaggtaacaagacaggcttttaacagcctggattgtcctttctttaccaccacgcattggactctttctttctctttctgtctt

SEQ ID NO: 682 - DNA, 2474 bp, Homo Sapiens
gacaggagaggaattcacctcgccaagaaggactcttctcccagacaagaaaccaacatggctctgccctctgaaccctgtgtgaagtcaaccaggctcccagagtgcaggtagaagggcagctgatgttttctgagcacctactatgtgcctgatactttcagttccttgatctccttctattgctaatacaccaccaaccccatctcagagatgggaaaactgagtcccaaggtacatagtgtgaggccaatccaggcttcaggccgagtctgctgggtgattcaaaatccagcctttgaagtgggaattacacaaaggcctttggtaccaggaacaatttctgatggtggaagtgcttagacacaatgagtgttctaactaaaaactcatttctctgtggcctccttcaaatggatgcaaacggaatgaactgcaggattcttggacttaaaagcctgttcttcaatgcaggggaccaagtttaggcaaatatttagatccctgaaaacgagaccattttctctatctccacggcagcttcggagttgcaatctggatcgcatctttggagagcagcttcgtgtcccagcaaagctgtgggtaagtgatgggctccagcccggggggccactgacaccagggacatgagtcacagagggcaaaggtccggagagccttagtcatgccccagccctgtctggagtctgacatttcccagagggaagccccatctagagactcccataccaggtctattgtttcagagaacatcacgccgggtacaaccaaacccagggagagaaacaggtgggaagagcaggtgtctgctctaagatggttccgattgttccagggcacaaattcacggaaaaatacttaatttagaaaaaaaaaaattattttaagcatatgcatttatatttattaaacaaagctcaaaatacaacctttggggacctccaagtaataaaatgactcatgtcaggatatgatgactcagtgggaaagagggaattccaccacccacgcgtcctttctaaaaaatcaatttgtcctctggacaggtgatgggagcctctgccatcagaccgttccaagaaaatcgtccagcaaaacaaaacaaaaaattctcttcaaacaatttaagtttcaaagctgagtaatctgatgcaggccagtttccaacctacgcccccgcaggacacacagagccagggagctagttggccaagcctgggggcctgaattaagaaggatttaccagccgaaaaattccaaaactctgtgtcatgtgaaggaaccttccaaaacattggatcccacccaggcgcagcgagtcgctcaaagccatggcaacccctttcccgctgccacatcacttttatttttgtgtccttagattttttcctgttttgcaatgttttgctgggacccccgactccgcctgaggccctgtggccaagggccagggttcccactgaagtcaggaacagcctggacttcccagcgtgaactttgcctgaagggttacacattttttaaatttcagagaacatccaaatggcttttcagcaattactgagaatgataaataggaaagaccctgattgttctgtttggtttctctgtcctctctgacatgactagaaaaaattactcgagttgacgacaaatgctgccttgggattccacctctgtcaccagttgtgggctgacctggggtgcatgacttgacatctgtgagcctcagttacctcatctgtaaaatggggataatgctgcccgcttctcagggctggagtgacaactaaaagagatgcattcattcaacaacacaaatgagcacctgctatgtgccggggaccactctggatgctgaggatacagcagcaaacgctgagactctgctgtcaaggaactaagagtccagcatgagagaccaggtgataaatgaacagacagacaaggtaggtgatttcaacagcgctaagtgcccccaagaaaacagagccgggcagtggcacagaaggtgacaaggtgtctgggaagcgggacaacttcagaatgacggtcaaggaggaccccgtggaggaagtgacctttgagctgagactgggaggaataggaggccgcaggcttgaaaagaaatggtggaggaggccggacgcagtggctcgcgcctgtaatcccaacactttgggaggccaaggcaggcagattacgaggtcaggagattgagaccatcctggctaacatggtgaaaccccgtctctactaaacaaactacaaaaaattagccaggcgtcgtggcaggtgcctatagtcccagctactcaggaggctggggcaggagaatggcgtgaacctgggaggcggagcttgcagtgagccgagatcgcgcactcgcgccacgccactccagcctgggcgacagagcaaaactccgtctcaaaaaaaaagaaaagaaaaga

SEQ ID NO: 683 - DNA, 2463 bp, Homo Sapiens
tttgttcaaccaatccccttgtgacctcaattattttcccgtctgtttctcccagcagactgggcactccctgaaagcaagaattgatctcatttctccctctatccagagtacacagctcacattcagcatctgttgactgaatgggcattgctgcctatcctggctgccgcgacagccctggaaggccccaggcagggtggcaggggctagaatccactccattctccgcagcttaatggggttctgcagagggcttcaagtgatgctgcaaagccccacactgagaaatgtcactcccatcctggccctgagaggggacaggggcttggttacaagctgggactagcacccaggttactaacaagtcccaacaagcttcccaaagtctaacttctaccaaaccaggcaccctccgaggctctgtctctgcccaaggcaagcgcagcaatgtgtctgcctcacgacttcaacaacttcgggtccaaagtcaaggtgcacttgggccaatcattcttctccctcccgcagcaagaaaaataacaatccaccaaaagataaatgcaaaaagaagatgcacgtgagaacgagtccacgtggatgtgtaagcacttgctctagagacatagtcacggggttgctttagggccagtgcatgaacttaatatgatcccatttttgcacaagacttttctgcatttttcaccccaatattacttggctgaaacccccggtccagccccagaccacccttgttcaatccctgcaaacaaggccacatttgggtactcatggcttattccacgcctccccccatgatagacgttcgcctgagcccagcctctgcagccaccgccttccaccaaagcagatccttccccctcctttgctcacggaggagtgagggggaactgctgagaggaggggcagattggccagggagggggcgattgagaacaggaagaagatggggtgagatctgagaggcacgctttggacacaataaacaagcctgctgccttgttcagaaagggacccgggacccccaatcccaccagagccctaaaagcattagttcaaagttaaagttagatacacgcaaagctgcagcccccgggggaactcagagctcaaaaacaatactctctttgactcaaaaaccacaagggaacacccacggcatacttcttgattaaaaaaggaaagtgaaaaataaggttttctttttttccttcttaatcatcataaaactaacttgtgcctattccatcaagtcacgacttctgttggcctcaagcgagcccaattcatgttggccacagacacgaggggccgggaagcttgggcatgtcctagtgaactgaaccggtcctttctgaatggttgtcatttccttcctctgcttcctttagcacaggaaagccaccaaggagccgcctacgccagcacatccatcacccagactcccagggcactgttcatctgagaggccagacacagcggggctcaccaaagcctcaaagcagcagcaacaacctctcaaccgctgttcttgagatagatgaagtacctactatgtgacaggcactgtgcttgggactggggatgaagcaacgatgaaggagatgaaagatgaatgtgtggcaggggggtggatgagtaggtgggtgaaggggttggaagggaggaggaaaggaagagagaacatatatcaggctatggaaaaaaagaaacaaacagaggccaggcatggtggctcacgcctgtaatcccagcactttgggaggccgaggcaggcagatcacttgaggccagatcactggccaacatggcgaaaccccatccttactaaaaatacaaaaattagccaggcatggtggcatgcacctgtagtcccagctgctcaggaggctgaggcatgagaattgtttgaacccagggggtggagcttgcagtgagccaagattgagccactgcattccagcctaggcaacagagtgagacttcatctcaaaacaaacacctaagtagaaagacagatgatggcaggagagaaaggggatctattttggtaggagaatcaggggaagctgctttgaggaggtgacaattgagctgacagctgaatgaagcagagaaagtagccatgtggatagctgggaggagtgaaaggcacgtgcaaaggccctgaggcaggagcctacctggagtgtttgaggaatagcacagaggccattagcaggtgggaatggagtgagggagtgagtgagtgaggaagagaggcaggcagggaccgggtgacacggcctggtccacggtgaggagcacaaggctactctgcatctatactccgggaggggagacacaggagggctcagaatgggggtggtgtagaccaaggtacactctgaacagatcctctggcagctgtgtggggagcagatgaatgaagggtgcaagtgg

SEQ ID NO: 684 - DNA, 2493 bp, Homo Sapiens
tgaagccattctctttcgtcctctggtctctagaggcttctaaacatgctgaatccacacagggctttgttgttgcagcctaaccccagctgcgggagccttgggcagccttgcacctgctccaataaaaagtggggaagttgtgcagttctgttaatgaatgctttgggcttgtcactcccttgaaggaaaagacaatttgtactttgaccatcttccagaaaggattgggaagaaatacttcaataatgcaattttttaaatgaaacattttattttgaaattaatttttaattcaaagttgcaaaggcactacagagagttccggtataccctctcactgagttccagtttcccaagtagtaaaatcattaaataaccatagatgctaaaattggggaaaagattcagccttagactctattcatcctcaaataagtttggtgcattcattcaaattccattgatctctgaaagagggaggcgcacacatattcacactctggggaccattttcttgacatttaaaataacatgggcagtttaatctcagtattttaagattaagtacttaaaaactgaaatttggactaatataccaacgtaaatcttcatctggccaacacaataaaaacaagagctaccatttgttttacacctactaggtgacagcctctgcgcatgggtgatatgatttctatttctttagaatctgttgaggaagagattctcttgtagcctttataaaatgaggacacaaatgcagagatgttaagtaacttgcccaaggtcacacagctaatgtgctgtcatagtggaaacagacacataggtttaggctgtgtctaaagagaatcactgtggatgccgttccaatctcccttgccaagtcacacccactgctgtcaccgagaacttccgttacacggcagtgaagcccccaatcccccaccccatatatcacccagaattagctgcaaagtgtcaggagacttggccaggcagccccaagcatcagcgagggctggaagccttcactgtgaagccctttatagaaagccgcggttggcagcccccgctcctgcatgggaacaaattaacattggcattccaaacacaggaaaggaaggaaattggaaacacagtttatacttggccagccctttgaaatactgtaccatgctaccgacatcaattaatgaaaagcagggttgtgtgagaggctctggtttggaaatgcattaacacacgttcaacatgtttgcacaggaaccggattatatgcaccctggctccaaaacaataaagcaattaccctaaagctggtgctctcggagttgtcattaattcaatccactccacgcggatcagcacaggctttgcgcggctccccacaatgccttccgacacaaatgttgaaaaggcggtattgcacatgcttgcctgagtttcgcataagtaagtgtcaaacttcatgcactctaatatccccccaaatcataaacactctactttggagcggaaaaaaatacacagcagcagtcctagtattccctggcattgctatttcagtttgagtttgagcaattttttttttgccggggaagcttaaatgaactatctgttccatattaagaaataccaagtcacattttttgtcaattattatttgtcagatgccatttgctgcaaaacccggaattcaatcccagcttgaacacacagctaataccaaacggctcactaatagccgcggtcgtacatgggatcatttgcagtgaacaaacgcccttcctctataaactgtttcagggattggaaagaaaagcatgtgaagctctggaataaataaagcaccgtgccttgagctgcccagtacatgacccttgcatgctgtgagaacaggctcaaaatgacccaagagcaagtgcccacttcgcaattttgtaagaatgcttccgagaaaggattttagatgatgtaggtaaatctcattgtttttgacctgcaatagaaagaaccagctcgcttcttgaaggaccagcatccccagtcactgcctctacacacatgtccacctgcatctggaatccagggtccaagcaacagacatcacgggtgtctcctccccgctcctggtgacgtcatctcctcagctcaactccacgttgatctgggatccatcaagttggagcaatttgagtgtgtaaagctaaatgtgttatcattttcaccacaaattaacagtttctatgtaaatattggtagttcctcaccccatgaaggcgagagaaggcaaaatggcaccggcgcatttgatttaaactaattaaaagcagagggttgtgcaattcaatatattgattttaccagtgggacttaaatcttttataataagtgtacacagctgcagtgctctcccaccactacgctgtaaaggctaatccgcacattccttctgacaataacatgacaggtcccacacatccctgc

SEQ ID NO: 685 - DNA, 2396 bp, Homo Sapiens
cgggtgggggtcggggagttaggggtctagctgggaggggggcagggtgacttctctccaccccgcagccctcgctccagaagggaactcggaagcctgcttccctcctgacctgaacatgtagcgggcctggaagtcaactgaatttcccaagtccactgggctgtgtagctgcctaagaaggaggggggctctgagaaccgcccccaccacccactgcagagtctgaaggagccaaagtgggaccactttctggttgctggcaggacgatgcctatttggcctctgcaccggttcctgttgggcgggtgatgggtgattggggggcccgggagaccctccacccccatagcttgccagtttttcactgcggtaacaatgacctagtcgctatggcaatgaggttaattaatgcatctatttggcagaactaaaacctcggacgcattcaactagccctgatattttcatccttaagaagccaacctctggtgttttatttgtctaggcatgtaggcatgccacaaaacaaaacattgccacaaaaggaggagctgtaagaagaaatgggggaagttgtggggaggagctgggaggggggggtctctgcccacccctcagagagaagaaaacctggaatgtcacttttcctttttcgatgatggtataaaattagcacagtcaagtaaatgtgttataaacacaaagatgctgccaggaggcaaagtgccttcatttaaggagaggaagaatggctgaggggttttagaaagggggctgggtggtcaaacggttggagggggtgccgtctgcaaccctcccaagtactgtaaccagagggaaaagccatttcccccgagaacgtgcatctgcagaacgtctagacagtcataaagaggacaattaaaaaaagaaaaaagctgcaagccgcagtcactctcctcgccagggtacccacccggctgcaacctccagctaactgcccgagcaggtgaaaaattataaaagcaagaaaagccagtgtgggctaggaggaggccggggagtctgggccgaaaacagtttatgagcaagtgttttgaaatcccgctttaaataagccggtaaatgaattcaaccttgtcagatctctctcccctcacgcagaccaaatattccgctggcgtgctgtctagacacagataacaaaggactttttacagcgcacagagacgcgctgacaaagtagccatttaaagatgcagtattgctttctcggcctaaaacgatttgtcagatggacttaaatgaaaatgctaagttatcggtctggtttggggtctgctggtggactggctggggggagggggctggctgctccagagaactagaaaccatcatctgtgattgggctgccctccaggtcgctcttaaaataggactgtacgtggccgcccagcaaataattctggctcttcttgttctgggaaggcgcctgctaagatgtctctaacacctagtagcagcaattttgttgtagcactgttcacttaaagggggcgtgtggcaaaaaaaggttacatgaaaatgcatgggggagaacttgtttccacctgctccgggtggaccagaaccaagaggagaggaatctggtctcacctccaactttgcattttagcccttctcatacaaagggtcactataaaatgagtcaccctcccttcccaggaaagaaagacagggttggaggtgggctggctgcaagggtgtggcccggggacacactcagggtgacacccaaacaccctctaaactggggagtgggcctccatgcagccaaggttccaagggaggaagaacagcatccaggagctcccagagcctcaacacaagccgtgcgctgacctctccttcaggttacactccggggcagccggacaggggtggttctcctaaatgggggaactagtttcttcccctgggactgtcagcttccaatctagagaaagacctgctgcctgccagatgcccagtgagggctcattcactccagcgacctttctctgatggggtgccggccaagcggtcacttcctttccatgcctgccctgctcatggcagcttctatatgagactggtctgctctccttcctctgtctttccttcctgtcctcccttccttcctttttctctctcaaatgttgtaaagcccagacgctggaaccagacaaagcccatctccaccaccttcaggctgtgtggtccaagggaagtcacctccctgagcctcagtttaccctgctgtgaaatggggtctcaaccacctgtcctaaagagctgttgtgaggattaaatgcccttgtgcattaaacccactaaccagccactaacacggcatccaccggcctctttcaaca

SEQ ID NO: 686 - DNA, 2500 bp, Homo Sapiens
ggctctctgcccgtggggatcctgccaggttgttcagagcagctcctcagtgtcactctcctccccaccctccctttccttggggtctagccgtttctagctccagtgttgcccctcccaagctggatgtaacctagcttctgtcttttacctgttacctcatttgtgcagttaacattttatgcacgtcccttacagtgtagaaggaaaacataattctaatctgactccattcagtgatgttaaatactgcatgtgaacatccccatccagaagttcatccaatgtagactcatcaaaaagcaggagtcctaaatgtttgcattgtgcaagcatccttagcacattgctatataggtgtttaagagtgtcttaagagatatttggaaaattggttggggattgtttttgttggcctgggaatgtattattattttttcccagttcacataaaggggtgaagccctgatgtctggaaatttgctctccaaagtgtttccaggaattgacaatatttggataatgaggggtgtctgtactttccttgacctaaactgctggtagagggggatatttttgtatgattgggcaaggtcaaacacagaatcaaatcaggaagaacagggtctgacatgatgaatccctgcctcgccttgccattgacaagagacagaataaatgcccccaaagaaccctgcaccatgaacgcttgatggcaatcctgtctcagggctttgctgctcgctgtcaggcagcaggtacactacccagggccgtggggaaggcgtcttgcagccacactgcagcaggaggctggtcatatctacgggctccaccaagccaggatgcagagctcggcccgtctcatggcacaggctcgggctgctcggagcttataatgaattagagccacagctgattattttcaaggctggcgctcacgctgggtgcctgagaagacgatgaatctgcagtgccgaagtgctgcctggcctctcaggaaccagctgcagctgggattctctgcagccttccccgcagcaagctggggtagccatgagccctgcctgtccaacgtggggtcaggcgggcatgcctgctgtgtctggcagccttgacacccccagattctgctggaagatgctcgtggcctgaaagctcattttgtagtcgctctaccctgggatgcagcttctgcactggcaggattaacgcaaacagaatctgcttggctcattcctcgccgggcctcaacaggcctgcaacgccactgtctgccagggagagccactcggtgatactgttaattaaaaccatgactctgggggcaagaaaaaattttaaaacgctgaagtcatcttccctaatagaaatcttattttgaaggtgctcacggaggtcaggctgaccagaaaaacccacaagccataaataagctcaaatagttttatttaatttacttaactcggtgcctggagtcctcatggggagaggtgcctggcatcaacacagggtgggggtggccaccctcatctctagcccctgggtcccagagctgagaggagggagagaactgaactttcttggaagaatgtggaactgctgagtagatgctttggaatttgctgacccaggcatctgggagtacagcctgaccggccatctctgcgccaagctatctatagtccaatggctattttcaattggaaattcattttaaagtggtggcagtgacgggggagtggctgtatctgtaatccattatttcacacagagaattcccttctttcatttttttctggccaaagttgctgctttgaacgtgggtgggtcttggagcccaagactgagctggctgcttggagaaaaattggagggatttgaaaaggcccgagggagggtgtcctctgagttgggggtggcagaaaacatcttaaatgtgcaggcccaagccttctgcagtgaagggaataggactctggcttcggcagacctaactcagtctctgggttcttgggctaatttgtgaaattacctctcccctcaggactgggagagaacggccttaaataagtgcaatttaattcccttgattgtggtcctctttaatgaaaaaccaaaatttattctctctcctgctagtttcccattgaaagtcacaagaaatgaggctggggtggagggcctggagttgctatggaagcatgatgcctagaacccactatgggatggatggtcattggtgtcacggactgtggtgtagacattgtctcctgtgccaggatgtggcctggtcctgcacccctttgcctttgaagctgtgcctgcctgtgatctgggagtggcacgaacccacagaacccagcccaccctgcaggaagtgggagagctccccgggtactctggtgctgaggaagcacagcttaaagaggaaatttccttgaaatccacacagacctccttccagaatgttctggaaggaagcacaacttcaagagga

SEQ ID NO: 687 - DNA, 2495 bp, Homo Sapiens
ggttttgtcgggtatcaatcagccgtctgtgtgtggccctgcctcctgtcaccctgctctgacgccttccttctgtcgacaccaccctgtcttgattcctgtgcgtttcaagtgaatcttgaaatctggtagcgtcagccattcgactttactccttccaaaattgctttggctcttctaggtcatttgcattttcctatgaattttagaatccacttgtcatgtaaaaaaaaaaaacctgctagaattttgactgggattgtcaaaatcactctcaaaaatcactgaagttgactctgaaatgcagcatgcaagggtttgggtgtgcaacttgtacgtgagttctagtgcacaaaagaaagtgagagccagcaagccgggctagaggggataaaggagagagtggtggcgcatgtgcccaggctcccgtcggtccctgagagctttcctttccctagagtgaccacagggtgggtaggaggttccctaggatccctggagggtgtgtccctttattaataatgataaagggtgtgatgtagactccttaaccttactacatgtgaaaagagtgtttattgctgaaaggattaaataagataagacgctgagtagttgagctgcaaatgcttgtggattgaagtctaaagccagcttacatagacccacccacctgcccatttcctgccgtggcctcctgtgtcccagccaccaccatcgtcccatggcgcatggctgacgtgctgtcctgcaaagggccaggcgttaccctctagcatgtaccactctccactggcttcgttcttggggctcatgatacatattatttggttacttccaccttggagtatcacaggtcaaatcagccagtaactcgtggaactaacccacgagtggtgtttacccctggataatggcccagtggaggggctggcctgcagctcacacccaccatggttttgctgaatggtgctcgttagactttgcataatcgaatttagcccagctctatgaaggctctgcacaagctagtcccctctctccgctatttgatggaataatagatccataggagaattcatttgcaactctaagccccgagttaaagacgtctcaagggatgaacgtgggtgatttgtggaacactgcgatgcatttatgagatagattgcacgttcaccgcggcgctcaaagaaaccagatcgggttgcattagaggcggtgctgtaatccggctgtcctctgggaaagaatgcaagcttccagtgtgcgaagtatgaggggctgcagaggaaattgctttggtggctctggtcctgggagcaagtacctgcttctcgttcatttaagcacattagcgagcttcataaacacttaagtggctcacgagatgcttcacttccaggcctcgccccacctcctccgctgtcacacagaggccaccagaaaccacggtcttctgggtttgacagccaggcagacaggaccaggccaggctgcagctgctaacccctgcgctggcaacttccagaccccctgcacaatgtcaccgtccagtcattcctccctgggctgcctgccttcatggggcccctgcaattaaaaaaaacaacaacttattctcactcctttcttttaatatgtcttattaataactgtgtaaatttgtttactttttaggactccatcatgatgtaaagtagataaaacaaccaatttgtctttctttttcttggtacatgggtgtcctgcagccttcattccttccaacccccgcttcacgttcacgagtatgaagttgaattaactcatgctttgctgaagccggattgtgagattgtgtaggcagacgtggcttttcttctgagcctgcaaagcagcagaattcatgacaatgggttccgtagtaacagggactgactgcgccatgctgtctctgtccatccttacagcgctcaggagtttgcatgccattactgggaccattttacagaaaacagaggctcccaggggcaacgtaacctgccccaggacaggcagccacaaggcagagaaaggagggttggacctgcacctgtgaaaccacagccctggggcatggcttctgagactcatagctggggctgaagatccctaggggggctctgctgggctcactgctctccagagtggtccagcccggctgcagggtgctgcttccagcttggtgcactgcggccggaggaggtggaggatggaaagtaagattcaaagacagggagtgcaaggggacagtgatacttgaggactccgaggaggaagtaggagaatcatccggaatggccagcctgggccgagcctgggccaacacctgggttgagcccagcccacagagcggctcccgggtccttgcacctgcaggaggccagagctgcttttaccttcaaatgttagatgaggtgccagcacctggacaggagacgtcctgcagtcagctcacagacatgagggtgtcg

SEQ ID NO: 688 - DNA, 2500 bp, Homo Sapiens
ttgccgcgtttgtgacatctcgcctggatagtggcagcaggctcctcactggtctccagcctccactgacattgattctcaccacagaagccagagtatgccttgaaatcgctcaggtccctcctcacagccctgtctagagtaacagccctcccagatttacagagccccatcccaccccttctacccccacctcctactgtctgcccctccccaggcctcccagcctcactggccttcttgcaggtcctcaagcacaacaggcctgagggccactgcgctgactgttccctctgcctggaattggcatggctggctccctcatttccttcaagtatttgtccaatgttactttctcagtgaggcctaccctgaccactctatttgcaattgcaacctccctactcccacaatttcccatctcccttaccctcctctgtttttccatgccacttattatcttctaacacatttattatggtgtacagtattaactgaataaaatttagtaggggagacaggcaataaacaagaaaataaaagcatgagcataggaaagtttactctagcagtgagtgctctgatggaaataacaccccagggatgggacagagactgcagggcaggttgctttacaatggtcccagaggagaccactgagcagagactcaaatctgtgtccagaggcgtcctgaggagtggagctgcggttgggggtgggaaggaaggccattctaggctgcaggaactgcaagggcaaaggctctgaggcgggagccaggttcatgggcagatgtttgaggacacctccggcttccagggccttccagaagttccagtctcttgggtttggttgtgcattcctgcgaccttcaccgcaggcctcctcctccacccactagtgcagagcctgggggctgccggtgggtttcaggccagggaagcagaaatgggtaatttccagaggcagaaatcagccgaccccggtggcccggtgggtggccaacaaagcttggctggccctcgcgggctgtgtaggagcccaccctagggaggtacccagagacatccctggtttggctctgccgggaaagtgggccgagcagggagagggggaccagagaggaagagatggacagagttttccggacggtgggctgggtccgaggcccgcggaccgtccgaggggggcctctgggttcgaggccgcccgcaccgaccagtgctgtggctcgggcagttcaccgccctctcgggcctcagtttcccgccctggcagacctcgaggcggcctcggagatcccgggcctggcgaatactgggcggggaggggcgttaactccagcctcccgggcggggtctcccggctcccgcggccacgttgcagcccaggcggaggcgcgggatctcgagctgggatcgccctcttgggcttcggtgcgatcggcggcgggaggtgagagtgggcccggcgggctccgggaggaggtggccccagggaaggtgtggccgcggggaagtggcggcgaacagccccgacgcgaggacggggaaaccaaggcggcagccagggagaccctgaccgaggtgacctctgtttagggcgacaaccgggttggggctccccgcagtggccactggcccggcggtcccgcacccccagcccgcctctcctccaacaaaagaatccaggaagacggtggggcgggcgggaggcccggtgtgcggtggcctggcccccctactggtggagaggagggagcgcccttccccagacgcgggggaggggaggggtcatggccccacgggctgcccaccccctccctgtgccccagtgctgggcccaggacccccagtgaggccactcctctggcaaacatctgtgatctcttcccccttcctgggccccccctactggaatggcgtctctccccatccaggggcctggcttgtttttctccataacccttagcattaccggtccttatgttatctcttatttcactaattattctttcattaatttattagtatttattttgtttgcctacagtgtgtttccccctgtgggaatgtaggctccaggagggcgggagacttcgatttgtccactgatgtatccccattaattcaacagatccctcctgagggcctctctgagccctgcacggtgctgggtattggggttctcctgggaacttagctgagccccaccctagacattctggggctgggaacagtgctgtaaacacatatgacatcgtcgtgggatgaaggaaacaaaccagaaatgggggggtctactggtcaggtgaccttaggtcaggccaccttggtggtcagggccaccttagatgatatggtgatcatggaaggcctcccagattaggtgacttcagttaaagccaggaagtgctagaagggaaaagctaggaaccatgagggcatgtgtagctctgacctggactcaggcagggagctggggtctgaagagtaaagg

SEQ ID NO: 689 - DNA, 2433 bp, Homo Sapiens
actcccagcccagaagggctctgatctcagaactgggacgcaagggtggggagctcgagctctcattagcatttcgcttttgcacaccccctgcccgctcctcagccgtcacaatcccgtcctgcagcaggcccccccaccaacaccggaccctcgacggggaaggggtcagctcggcggccccagaggccactgggccagaacacgtgctccggactccacgtgcgcggaaaatgaactcgtacccgcgacgcggccggcgggggcggatggcagcgagggccggacagcgaacctttaccccgcggaggagtcggggccggagcccgcacgtgggtctgcgacggccccgccccctgggggcgtcccctcagggactctagccccggctggtgggccctgcaggcccgggcccgaccgcgtccgccaggccgcccggaggtcccggcgagcccggcggaggcggcggcccctccccgcccgacggccacgcccgcgcggattggccgctccccgacggcggggcggggcgggacgggccggggcagagctcgcggccaggtgaggcgccccgcccctcggcggctccaggtgcggctgtgggacctcggaccgcggcggggccggggccagggccggggccggggccggggcgccatggccgagtcccagctgaactgcctggacgaggcgcacgtgaacgagaaggtgaccgaggcgcaggccgccttctactactgcgagcggcggcgggccgcgctggaggcgctgctgggcggcggcgagcaggcctaccgcgagcggctcaaggaggagcagctgcgggacttcctctccagcccggagcgccaggccctgcgggccgcctggagcccctacgaggacgccgtccccgccgccaacgcccggggcaagagcaaggccaaggccaaggcccccgcgccggcgccggctgagtccggcgagtccctggcctactggcccgaccgttccgacaccgaggtgcctcctctggacctgggctggacggacactggtttctaccgcggcgtgagccgggtcacgctcttcacccacccgcccaaggacgagaaggcgccgcacctcaagcaggtggtcaggcagatgatccaacaggcccagaaggtaggcccccgccttcgcccccacaccgctgggacctcggccccagtcccctggaccgggccccacctcccaggcagggcccggggcaggccgccctgagcaccctctggaaaatgggccccaacccgcccctacttcctggggctgcagtgaggcctgtagagcgaatggctgggaacgtgtttggcaaattacaaggtgctggacagatgtcagccgtcggtattccagcgttcagaggcactggctctgctctgtacttctgaaacttccctgtccagccttcctccccagggaagactgggggccgaggccctgtggttaaaatgcaccactcaaaggtcttgatgataacctacgtgctgcccagaacatatcccgagccgctttctcatgtgatcgtcaaaacaacttcagggagtgggtggcggtgaccttcccggtcccacctctgccatgctgctccttggaccacccctctcctcccatagtcaaagctgagctggcgccctcacagtcacagcctctcctgggccgggtactaggccccagctgcctggaatgaatgggggacggggtatattgaggacctactgtgtgcctggccctgtgctgggcgccttggcacagcaggtcacctgactcggcagctcaggaaagggctcctacttagcatatgtgtcctgcttgagagttggaaggaggggctgtttccagggtggctggtgaggccagtccactgtggaacaggtggaagactttaatctttatgcctttgggtgggagtcctgggcagcttccagatcaaatgtaggatgccccactacatttgaactttcaataaacaacacataactttttagtatcagcttatcccaaacatgacatgagacgtactgatactgaaaaattcttcgttgtgtatctgaaattcaaattgaatgggaacgttttgtacttttatttgctaactctggctgccctacactgagatttgttaagaaacagcagcagcttttggtgcccaattcagaataatacaacaggagtggcttgggttcaccactcaaattccactcagtgagtgaggttggagtcctggttcccctcgaggctgaagaggcctgaggagggaaaatagagctagaaagaccagtgctcaggctcatcttcctggaaggggtgatttaggtagttggggtgatctagatagttggctacattggctaccagaaggaagggttaactttccactgcgcacatttctaccctccctctctataattc

SEQ ID NO: 690 - DNA, 2339 bp, Homo Sapiens
acaggtgaataaaaaaattaaacagtgtggggaaaaaacagacttgtacataaatcttcacagcagcgctattcacaatccccaaagtataaacagcccaagtgctcgtacgctgatgaatggacaagcaaactgtggaagccccatgcaacgcagtgtcgttcagccacggggagacgtgaagctctgacacctgatacagccaacgcgctgtaaaccattgcaccaggtgtgggaagtcaggtacaagaggaccggtacggtatgattccactcacaggaaatgtccagaacgggcagctccacacactcaaagccaatcagtgttgccaggggctgggggaagaggaaggaggagggactgctgatgggaacgggtgtcctttggaggtgattgaaagattccaaaattgactgtgatgatggttacacagctctgagaatgtactaaaaaccagtgaattgtgtgccttagatgggtgaattttctcgtgccaatgatatctcagtaaggctggaaggacacagacctggtcagcgaggagggcctgggccttgctaaagtgggcagagtctgtggggtccattggctcagccccagcctctctgtgcagccctggggcctggcttcttctgccgcaccccacaagctgccccctctccccagccggggccccaggcctgctcctctctgggctgagcatcacctttgccagaggaaggtcaaagcacctggaccccaacaccccaaggacccttgcaggcctcttccgggatccacttctcagtgagcgctgccgtgcgcacccctgggcctgagggctgggcatctcccaggtatgcaaggggctctccgtgcagggctgtgagcaacgtgggggcagccggccgcagtctccagccccggggcctgctggcatccccaccagcccccagcctgggcaccccacccaaggaacccggctcccagagtccggggcactgattaatattcacacaggcagcagagagctgctgaaccctgaacgcgaggcagggaagaaagttgaagcatctgctatctataaatcaaaatgaatttactcttcctctaaggacagccgctgtaataggccgcagccaacaggtcccatggtgtgatttctgcgcaggaagccactgctcacaccgggtgtggaagcatttgtaacccccaggggacctgctgctccacagaacccgacggaaagctcgaggaaggccgagcttcgggggtcacaggccggatgccggagctgctccatgggtggtgcccgagggagccctgggaggagccgtcagcccaggcagtgggtggagacgggctctgccttctgccttcaccagctccgcccagctcccgggtcacccaccacagccccgccagagcaggcagacgtgcagatgccaaggcagacgtgcagatgccaagccgcacttgctcactaaactcacgtcctcgctacaacgtagttgtcgagtaaatgctctccatggattaaaaatataagcagagatggccgggcgcggtggctcacgcctgtaatcccagcactttgggaggccgaggcgggcgggtcacgaggtcaggagatcgagaccatcctggctaacacggtgaaaccccgtctctactaaaaataccaaaaaattagccaggcgtggtgggggcgcctgtagtcccagctactcgggaggctgaggcaggagaatggcgtgaacccgggaggcggaggttgcagtgagccaagatcacaccactgcactccagcctgggcgacggagcgagactccgcctcaaaaaaaaaaaaaaaaaaaaaaaaatatatatatatatatatatatatatatgtagagacatgaatgccgattcttatgatgcttatttattcatgaaaccaatggcttacctgccagaaattcagtccctgggttgacaccaaacccaactgttggcttttcctgctgaatggaggggctgggagaagccgcctccagctggcagcctcagacctgtgtctacctggcaggcccccacccaggtggggacaggccaccaggcgggagtcactggggcactgctggggctcaggacacttgcaggatgagtgaaggaggaggagagggaggaagacagagaggaccacctcggccactctgaccttgcctcctggccatgcctgggttctcagaggcaggagctggggggctgcagggctgggggccacaacgactctccagctgctgtcaccctccctggcaatgaaccccaaagcccccacctccccaccgcgggtgccagacacaggcctggtgcaggt

SEQ ID NO: 691 - DNA, 2444 bp, Homo Sapiens
atttccatttgaaaaagtcctgactagtttactcccccgaaccaaccagaagacacaaagcagagctcaccttcctggaaatgggccctttaccccctctttttttttttctcctctagtttggaaattctttctctccacttctgcctgtcccaggcttcattggccatgatcgtcctccattgctgggtctcagtctcctcctccctccataaatctccccctttctcagatgaaaagaccaacactgaaaaggcaagttgatgtgctccggtttgcacagagccctggaagcagagctgggatttgaattctgggctcctgattctctgtccagggctcttcattctggcagagcaggagatcaatttcttctctttctttttttttaaatgaagcttttatacatagctatccacatatgtacaagcagctcttaaggccagagaagttaattccaaattttagagctgtggaggctctacagattatatggagtttcagctagtgattaaatctgaggtaacagcatctggaggctcagccttagcactgaggggagttggagggaaaaattaagccaagagtaaaatcttcccgttctgaaaataatagtggcataacacaatactcctggactgtgggaaataaaatggagagggacatgattagaaggaaacttctagaattctactaattccacgttcctcaaattggtacaactggtgacaatctcagagtcacctgtcatcgcatcaaagtttgacagagaaggatgacccacaggagcagccttgctgtgcttgaggattgtttgacacttgaaatgagcttcggatcagttcttggctgaagtccacctaggcccctttcgcgaaggctaagctatcagagtcaaccaccactcttgccccaccctgttcaaataccgtcgtcggggttgataactgtatccagtgaacatctgtactggaatccggagcatctacctccctccacctgcagcctgaggaattctgatcctttggtgatttccagaagcctctggacgcagctgtccgtgaggcggatctgcccgtcgccggcctcggggctggacgacacgcccggagtcccagggaggccgcgaggagcctgcccctcggccaggaagtgaccgctgtctgcgtcgcggcccttaaggacaacccctgggcggcaaccatcttcctccacccaggagatcaatttctttgttgaggttccacctaaggctgtagcactcactcactgaggttcctaagaaacctgcctgtcctaggaaacctcctactgagacctgccccgcactgccacctggtggtaagatataaaaacacaccctccacggtgggatcagattgcgcgcctgctccgcccccaccccgccctctccccggtggtggggtagagggatggtggaaagggaaccaagagctagttcccagaagtgtaggtatctgggattgagattggagtggggctacacctccttctctgttttcagtaccagccatagctctgtcactgtgcctctagtttctttcctctttgcagacattggccacttgtgaaactaattgtattccctctttgcattgtcttccaggacacctggaaccagcgtacagttcactgttagcaactggatagaatcgcatggcaggaatttagaagaggagcttaatctctgagtccacattccttcccctgggcctcattttcctaccttattttatatttagttttctgatgatgttcaggacatccttccagccaccttaactctcctctttgtaagggacaggagggacaaagcaaggttatacattcagaaagagcttgcctaccttctgcaagtctcagtttcctcccctataaagtgggcacaagaatccctgccttggagggttttgtgtgtgtttcaggagatgctggattaatattagtgtccaccctatttcccacctccccatcctccaggctctctgccagttatgtgatgcaggctaggatgcaaaggagatcaacagcacagatcactttttccccagtgccatttgtgctctgcaggcccagtgggtgcccctactagagccttgtaccctgagcccagtccctacctgccttctggaagatgttggctccagaattctctgcctccctcctgcaggcattgtggcattcacagctgatttgcagagagcccagatgcatctcataaataaggaatgtactgttctgcaggacggctgtggcgtggctgtgtgggggtgggcaggctggagtagacaggaaccacgagaggcagggaggactgtacaggggttgctgaccaggtggaagatgatgggagcctcagaaggtgtcgtgggacagggtcagggagagggctctatgcggccaggatctggatgcagattgtt

SEQ ID NO: 692 - DNA, 2414 bp, Homo Sapiens
ccagctccaccttggtcacctgcaggaccctgagccgtagaggattaacccagtcggcgtgcagggggcgtggcctgtgcctcactgcaggtacccctcctgtccctcccgcagcactgatgacaggccggctgtgctgggcaccgagaatgcaccggccctgctctcgcagggcccacagaccagggagggaggaagatcataaataaatgaagtgagcaaggcaccgtgcatgtattctaccagtgtctacagagcccatgctctgagccaggcactagtctagtaaataaacatcgctaacgtgtttcagacacttgccttatcctccagcctcaacctctgttacccatgaagtctcacaataggcctagggggtggccctcttgtaaccccatcttacaggagaggaaacagaggcccagagaggctaagctccttgccatgctgttaggcagtgacggagcctgcacccataatcggtatgctgcctcctgctggatgctaggggggtctccaggggctgaagctcatgtggtccctgcctcctggagctcaggctagtggggcctggaagaagaggggcagggcccttccatctgttacagtgaattccaggtgggtgagatcagggaaggcttcctggaggaggtgatgtttgagccgggatctgaaggtcaggaaggaattaaccaggttcagagggagagagaatctactccttctactcatgctacctattctttgacaccccctccaggaagccctccttgccctcttccagacggagctcccacactacagctgcactatctctgtctgtgcccgagttcccaccagactgtggaactcccaaaaggcagtgcagggggctggctcctctgtgtccccagcaccacccagccccgggcacgggaatcagaggctgagggacggcaggctgtgtgggctgaggtgggagggcggcatagccgaggggcccgtttgtcacactggctccaggtgcacagggtgagacactcaggaaccctgctgctcaggagaattttaggccaatgacctgccggcccctgattagcccctgatgttgctctgtgtcaggcagcgcgccaggcagatgaccccctctttgaccccaggagaggctggagtaagcgtgtctccagccaggacgtgcaaatggcatgcagtggaggaagccagggagcatgaattgctgggacccagctgtctgttctggaagagggcatttttcccccctgcccatgttaactttatccttagcttgtacccagaactccaccgctgtctatcggttgggcagacagaggctgccttgcctggctgccaacacgaaatggcattttgctcgaggtgttcctcctccctcgcctttccctgcctctaaattcagagcaaaggtagcatgagtcacgactcatcgacacggtgagggacaagcatgctccgccagggaggggctttgtgcggtctgaaccggggactgcagcaaacgatcgcgcagcggggactcaagcccctgatggtgccagaaaaatataacaataacagaaataaacaccaaacccacaaaagctcagtgcagaaggcccagagtccaagagcgcccatgtacgcaggccggccagctgggggatcttgggcaagatatccttgaggataaagatatccctttttaacttcagtttcttcatctgtaaaatggacaggataatacttatacctacttcataggattattgtgctgacaaataagtgagtatcatatgcccagcacccactaaggttcagatgcaataaatggtaagccgtactgccatcattcagatgctcatgaaagcctctgtgtctgtcaccagctaaccatggtgacctgaaatgagccttggaaacctaggatggcaaggaatgggtctagtttgtgccctggtgtattaccaagactttcataaatggcatgggaaaattacccctgaagatttatgaccacaagccagccctcaaacaagttcatagggacaattgacacttccagttctgtgtgcaaaaacctcaggctgagaatttagatgaaaatggctttctctagacttctcacaaacaaatgcaaatccccctggagcaattaaggtgacattccaaccacaggagcatcttacagctgagagtcactaaacacacgaggaaacagggcaccatgagtaagaaccagcacaaacctcacctagctgaatcagatccacagagtccccagatagcagaattatcagatgaggaatgtaaaataagtctgtttactacaattaaagacacaaaaaagaggagagttcaaaatatgagttgggaacaagagattctaaaaatggaccaggcatggtggctcacgccagtaa

SEQ ID NO: 693 - DNA, 3544 bp, Homo Sapiens
ctcagcaacttctcccacatgcctccccaccaggctcaagatgaaagcctctgtctcagcgtctcctccctcccctcctctatcctcttcccctccacccacgaagatcccagggttctgcgagggtcggagttccctatgcactcccacaccaagacagttgtcaggatttgcccaacaggaagttctcccctaccagagcccagttccattccagggaatccatctcccctccggaaaaaggaaaattgaagccagatgctctctgggatcgccatttgaggtgggcgtggctattaggacgctcagagagcccagcgcggtgaggaaagcgacgaacttaggagccctggtctgggtccagccaccccttactacctatttgaccttcatcaagctctttgacctttccaggctttagtttcgacatcaataagatgaattaatagctgggcatggctcgcgtctgtaatcctagtactttgggaggccgacgtgggtgtatttgcctgagctcaggagttccagaccagcctgggcaatatggtaaaaccccatctcgccaggcgcggtggctcacgcctgtaatcccagcactttgggatgccaaggtgggtggatcacttgaggtcgtgagttcgaaaccagcctggccaatatggtgaaatctcatctcttctaaaaatacaaaaattagctgagtgcggtggtgtacacctgtaatcccagctactcgggaggctgaggcaggagaatcacttgaatccgggaggcggaggttacaatgcgccaagatcacgccactttactccagcctgggcaacacagaatgtctcaaaaacaacaaacaaacaaacacaagaatcacctgctctgggaagtgcagtttcttccagcctacctaggccaggagcaaagtcagctcatcaatttttgccagcgcctcccttttcagaaattcttttctcaataaaagatgagaccctctcttttcttttaaaaggatgatttgtgtcctgtgtcttgtctgtctgctctgtccacaaaactgatgaaagctccactgcaaggcaaagttaatgttcccctcccacttctcaagaactcagaaatggaaatataactctgcactcagagagttaaaatagaaaacaagcaacagatccaagtggagacatgcagatcacacaagagatcggactctccaggatccagccttgccgctaaactcaccaagggtattaacatatctaaggaaaaggccgggcatggtggctcgtaatctttgggaggccgaggtgggtggatcacctgaggtcaggagtgcaagaccagcctagccaacatggtaaaaccctgtctctactaataatacaaaaattagctgggtgtggtggtgcacgcctgtaatcccagctattccagaggctgaggcaggaggttcccttgaacccaggaggcggaggttgcagtaaaccaagatggtgccattgcactccagcctgggcaacaagagcgaaactctgcctcaaaaaaaaaaaaaacatatctaaggaaaaaggtgggtcagtccaggatgccaagcaaagggagagttgagacccacaaactggaataacttgaataacgagtggatcagctgaggtcaggagttcaagactaacctggccaacatggtgaaaccccatttactgaaaatacaaaaaattagccaggcatggtggtgtgcatctgtagtcccagctactcgggaggctgaggcacgagaatcgcttgaacctgggaggtggaggttgcagtgaggcaagatcataccactacactccagcctgggcgacagaaattctgtcaaaaaaaaaaaagaagaagaagaaagaaaagaaaagaggagaatttcctgatgaagcataagtgtctggtccgaatgataacagcattctgactttcttgtttacacatctatcccttatgaatttgttcagtgtgtattgatcctgcggagtcctatcacttctgggtctacaaacagtaaacttcggagcgtataaaagcctacagaatatgctaacaaaactaaaatactgccaccatgtgggcctttccacaagcttaactgtcagtccccaaggcatttgtgtatccgatcaatatgtaaatgaacgagcagactctcttggatacaatgtggagaagactctaccaaaggtcactttccccaagccactgataacctttaaccagctcaaacccgtctgagctcaccacataaaacacccaaggatcctgcccactcccacaataccccatctccctcagcccaacaaaaacatcctcaggaaagttctctccaataaactcactgaaataaaactctagcagtatttgagcacctagggctgctctcctcgaaagatccctcccctaccaacacggagcctggtgtcagtccatctcagagtacctaacctcagttatcctttgcttctggccaaaatgcaagacccaaaaatcagatttttttgatgatgctcccttcttttggactctttctactcctttccatttcactctctccaaacttccttccttaaaatcaaatttttttttcttttttcttttttttttttttttttttttgagacggagtctcgctctgtcatccaggctgaagagcaatggcggtatctctgctcactgcaagctcctccccctgggttcaagtgattctcccgcctcagcctcccgagtagctgattacaggtgcgcaccaccatgccagctaattttttttttttttgagacagtctcactctgtcactcaggctagagtgcaatgacacaatctctgctcactgcaacctccacctcccaggttcaagcaattctcctgcctcagcctcccaagtagctagaagtacaggcatgcgccatcgcgcccagctaatttttgtatttttagtagagacagggtttcaccatgttggccaggatggtctcgatctcgacctcgtgatccgcctgcctcagcctcccgagtgctgagattacaggcatgagccacctcgcccggccaacagctaatttttgtatttttagtagagatggaatttcgccatgttgaccaggctggtttcaaactcctggcctcaagtgatccaccagccttagcctcccaaagtgctgggattataggcatgagccaatgcacctggcctcccctctctttttaacctctccacacttcttccttctgtgtgcaaaacaagtctctccatcctaaaaagaaacctgtggcccctgtggttccctccagctatctcgatgttctttttctcaaatcacactcagagcctttaatcagccaaacctggctccaattcatcacctgtatttcatttttctttctcttttcctttctttctttttttttttgtgtgtgtgtgttttttgagacaacatctaactctgtcacccaggctggagtgcagtggtgcgatcttggctcagtgcaatctctgcttcccaggttcaagtgttctcctgc

SEQ ID NO: 694 - DNA, 2382 bp, Homo Sapiens
ggatttacctactgtctgtaaccccccgggctgaagagaccaccccccgggagtcaattaacttactctctggagcgcgcgttcctccctgctcccaggagtcggtttcccaaaactttctgaggcccgcgcatgctcccctcgactccccgtgtttccactctccacagaaatccacgcattcacgcccctcccctcccccgagcctgcagaggactccgccctgctttccctacattcagggctgctccttttgtcgccaatacaaacctgttgacaggtcacgcctgggaagcgggtggggtgtcccggagcggtgctgaggcgctgcaggcccggcttctggctgcgggggagctgtaccctgaagcctcgccggaactcgcgtctggggccagcagggggcactagagtcaacagggactgtatgcaaaacccacttcctcccaggccctctagggggatggtcaggcttctgcagagatggggaggatcctttcctggtaaggggagagggacgggctaggagccaagcggaaggaccccgtgttcaaggcccttcaagggacgggacaggcgaggaatctctttgagtcttttgaattgttttatcagtcaggcctgggaagtactccgcctccacaaactctgttttcctgaaaggggtcgggggggggaccccaacatctcctgccacaggctatgatgggcatggtggctaagagcaacaggccgcgtggtgaggctggctttttgtggctctgccctgccattccccgaggcatccccatgccagtgaacagagctgcgggttcccagctgcacagatgaatgcacgaacaaaacataggtccatacaaaggaagtcattgcattgatccagattcgacctgggattgtcgcataaaacagggctgataaaaaccgtcgtgttttcaccctggaaacagagactcagcctccccctctttgcttgaggcattcagcaaaggtttgtccttgagtggctgtggatgctcaaggacttacgatttctgactttataaagtttagggtgaaaacaaaaaacaaaataaggagaccattgttttaaagtggccgttgtagctaattatctcaagaaagcaaacaggctggtactgaaagttacacaggcgggcggctccctgggagggttgcccagctctccttttctgagacctgagcagggagcagccagaggagcttgaagggatggtgttcagggcatgggaacaggctgcacacatcttcacggagtacggtgcttgtccagtttgagaagggaaagaaacgggagcagagggctgatgagaaggcagcagatggatagtgcgggattgaaaaggggatccatttgaagactggccaccattatttattttcatcatctgattgctgttgctccattgagatcgatgcgtggagaacaagttggggagtggaacaaatggcagggaggggagagaagtgagtgaacatgaccctggtccagcctcataggacagagcgtggtcatgaagtccacagaggaggacaggtagggaggaatcatggcatggccaggttgtagggcaagaggcagagaggagagaggattgtggaggatgcctgcggagtgccgactgtcagtcgaggctggtcctttatttatttattttttttttttgagacggagtctcgctcttgcccaggctggagtgcagtggcgcgatctcggctcactgcaagctccgcctcccgggttcatgccattctctcgcctcagcctcccaagtactgggactacaggtgcccgctaccatgcctggctaatttttttgtttttaatagagacagggtttcacgtgttagccaggatggtcttgatctcctgaactcatgatccgcccacctcggcctcccaaagtgctgggattgcaggcatcagccactgtgcctggccaaggctggtcctttcttttatggcgatgggtgtttgaaagttgcacataccaaaataaactcactatttgttgacccaaagtaaaaccctgagggtatgaaagggaagggctcatgcttacatggctgagataaaagctgtctcaggaagctgggtgtggtggctcacccctgtaatcccagcactttgggaggccaaggttggaggatcccctgaggccaggaattgaagactagcctgagtgatatagcaagaccccatctatatttttaaaaagggttggctgtctcgggacttttcgaaatagccctgcaagacattcctgttttggaatcacaacaatttagataagatgcttttgaaagaacacctgcctaggcacagcgtctccaccaatgaactgatgccaactgtggttt

SEQ ID NO: 695 - DNA, 2303 bp, Homo Sapiens
cataatctactctttgtggattgggagattcagtattataaagttgtcgattctccccaaattgttctacagatttaatgcaaatccagtaaaaaattcaacaagaggctgggcgcggtggctcaagcctgtaatcccagcactttgggaggctgaggcaggcagatcacaaggtcaggagatcgagaccatcctggctaacatggtgaaatcccgtctctactaaaaaaaaaaaaaaaaaaaaaaatgagccaggcgtggtggcgggtgcctgtagtcccagctactcaggaggctgaggcagggaatggtgtcaacccaggaggcagagcttgcagtgagccgagatcgagacactgcactccagcctgggcgacagagcgagactctgtctcaaaaaaaaaaaaaaattcagcaaggggtgtgtgtgtgtgcctgtgtgtgtgtgtgtgtgtgtgtgtatgcaagccatagacagaatactttttttttctttttgagacagagtctcactctgtcgcccaggctggagtgcagtggctcgatcttggctcactgcaacctccgcctcccaggttcaagtgattctcctgtccctgcctcctgtgtagctgggattacaggtgtgcaccaccacatctggctaatttttgtatttttagtagacacagggtctcaccatgttggccaggctagtctccaactcctggccgcaagtaatctgcccacttcagcctcccaaagtgttgggattataggcgtgagccaccgagcccagctagtacacagaataccattttttacttaagtatattaatctagaagagttttttttaaaatacagtataccatttttatctataacacttaaagacaatcaaagccaaattatgctgtttcaagataccatatacttagaaaaacatctataaaaagcaagagaaacatacaaatcaggcccatctggagagaagggagtgaagcattgcgctgatacggggataaatatgctggttgggtagacaggcagtccttatgcttttggctgacgtagatgttacgtactatttcatgtgttatcacactctccagtaaacacgtaacataagagaataattaaccactatcaagcgttctcatcttgagacaggaagatgtagaggaaagaccttgatgtgtgtgtcagttacaaggatgtacaccagtgactgacatgacttggtgcaaatcttgggtagagacctatacttaagctcctcacccccacctgccgaggcgtaagggctcagagggggttccatggggtgggcgggagtggtaagggtcgaggtgcagccacagcctggctctgtgcacaccccctccctccccctggtcccatgtgcacaccctctccctgccccctgccccttgtgcacaccctctgtaccccccttcccgccccagcctgtgtttgcagtgctacagggtggctgcagcctttgcctcccacagctcctcaaggtcagagggctgggaacccctgggatgtggctgggatgaggaccctgcccctcctcaggcatttccaggcaaggggcacagagacacagccagcccagcagctgagcccctcctatcaggccaggtgggaaactgaagcatgaacacaaccccagactggaaataaaaagccgtcatgtactgtgtgcctactgaatgccaagccctatgccctattctttaatgtcatctttaatgagatgtcttcactcagttcaccacatgatagtagacaggtatttatgatgcgcctactgcatgctgggcacttttctgggccatgaggactcagggaggtccctgctctggtagaagtcaaacccgacaggagacagagactaggggcccacacaccaggaggaagaacccagtgcagagagtgccagcaggaagccacaggggcagggaaggcgctcctgggagggtgggtggctgcgtcctgaggctgagcagggggagctggcctcgggacaggatgtgcgcaggcgtggagcaggaagttcctggaatgatgggcaagagggagcaggtcactgggggcaggtctaaatactgggggctgcattgggatagcagaggcctcggacaggcccgctcagcatgtagactcccctccctggccccttccctaggatgacagtggaggtccatccccaggtggtggtgagggcaatcctgacacagagaccccagcccagctggcaggggaaggggagcccccaaggacccctgtatgttggggcgtgtcccgccaggcggcc

SEQ ID NO: 696 - DNA, 2496 bp, Homo Sapiens
agttcactgtagcctcgacctcctgggctcaagcaatcctgggactacaggcatgccccactaggctgagctaatttttttttttttttttttggtagagatggggtctcactatgatgcccaggatggtctctagctcctggcctcaagggatcctcctatcttgacctcccaaagtgttgggattacaggcatgagcctccttgcccctcttctgttgtttttttcctatccttgttgacttacttttatttcttaaatgtaaaattgatttaaggtgcatccagagatgtgcacagattcttgtgatggagggaaccgcacagtcatggtgaggagtccatcataattttcaaacgcccctttaagaagtaggcattaacaccctgctccatccctttggaggcagccctgggctgagcactggactcctgggttccaccaacctcagtgtctccaggagaccaagcgcggccgggggtgagtccctgtccccgcgccccccaccacgctccaatacttaccccctgccccaccccccagcctcccgggccttggcttgtacctgtgaaccgaaggggtcatactaggcgtcatactagggtctctggatagctcccaggcctggacttcgttttccaggatatcacctttactggtcaacccattttgtttcgcgagtgcccagtgagtgtttggcacgtaatagagcctccataaatagttgtagaaattagcgtcattttacagtatggaaactgaggctccaagtgggagtggcttgccctcaaggtcccattggtgagagacgctgtggaagggctgccctggcctgggcacacagtaggcgctttgatgcgggctggagaaggtcctgcccggtgggattgcgccctggggcaccgcgcacgggtcggggaagcccggggcagggccgtatgcaaatagcgcgcgaggaggccgcggattggccagcccaggcgggggcggggcgcgccgagggcccagagctggcaggtgccctggcagggacaggtctggtgcccgcgcctgctcgctggaccgcccgccccgcgctctggcggctcctcccgggcgatgcctccgctctgggccctgctggccctcggctgcctgcggttcggctcgggtaggcggtgaagggcaggagggggctgagcccagaaagagcgggcagctctgccctggggcgcccgccgcctggaccctgattcctggcgctggggacccagatattactgttatgaataatagtgatagccaacgtttacgggcctcctctgttgggaatccgagggctcacagatggctgcagccctgcgatgtgtgttgcaagagaccaacatgcaggggggctgcggtaggacagagaagggactagccccagccccatggtgacgcctggacgggggcagatagagagatatttcggccgaggaagcagcatgggcaagttcatggaggggagacaatattgggctgtcctgggaactgccagtccatgggaccagctggagcctggggtgaggggagcctgtgggggaaggggtgaggctggagaccgaacaaagcaaagcccagaacttcaggacctcactgcctttccagagaggctggacttcgtcagggggcgctgggggaccatgggagggccatagccagagaatgaggcagtcagacttgcatgtggggggagggcccaggtgaggaaggtgggacggaggagggctgggccgatggcatggagagatgcttaggaggggcagtggagttcttggcaactgagtgtctgcagcagggagagaaggcagcagtttggcccgaccgctccatttctgagcaggatgactgggcagggggcagtgtctgagacagcttatgcggtggcccagggggagggtgaagcccagggcctggcacacaacacgtgctcagtaactgcaagcagagtgggtgtggacagttctgccggaggtcagttcccatcctcactgcctcctccagctgtgaacctgcagccccaactggccagtgtgactttcgccaccaacaaccccacacttaccactgtggccttggaaaagcctctctgcatgtttgacagcaaagaggccctcactggcacccacgaggtctacctgtatgtcctggtcgactcaggtaagggtcctgcttccctctggctactccaaaaggggctctgacctgtctgcagggaggagggaaggaggcagatagaggaaccctccatgcctgtagtcgtctcattaaacaggtactgcagccacagacctgtccttgccttgcagggacatccagttagtgagggaagtaataacaccaccagtcactgaacacctacaccataccaggcactttgcacaccatagagctagtatctacaaccagcttgtaaggtagctattaccaatccccattacagagcagggaagcaaggctcagagaggtggaata

SEQ ID NO: 697 - DNA, 2499 bp, Homo Sapiens
attgcacccagccttttctttaatttttttttttttttttttttttttttttgggacagtagggtcttgctctatcaccaaggctggaatgcagtggtgcgatctccgctcactgcagccttggcctcccaggctcaaatgatccacctacctcatcctcctgagtagctgggaatacaagtgtgcaacacccacacctggctattttttgtattttttttgtagagacagagtttcaccatgttggccaggctggtctggaactcctcacctcaggtgatctgcccacctcggcctctcaaagggctgggattacaggcatgacccaccacacctggcctcttttcttttttaaaactgcggcaatcatctctcctctgttgaactcaccaatgagaaaaagtcaatggggccaggcatggtggctcacacctgtaatcccagcactttgagaggctgaggcaggcaaattgttcgagcccaggagctctagaccagcctggacaatgtggcaaaaccccatctctacaaaaaattttaaaaattagccaggcttggtggtgcacgcctgtagtctcaactactcaggcagtcaaggttgcagtgaaccatgatcgcaccactgcactccagcctaggtggcagagtgagatgctgtctcaatttaaaaaaaaaaaaaaaaaaaaaaaggctgggcacagtggctcacacctgtaatcccaacactttgggaggccgaggccagtggatcacaaggtcaggagatcgagaccatcctggctaacacggtgaaaccttgtctctactaaaaaaaaaatacagaaaattagccgggcatggtggcaggtgcctgtagtcccagctactcgggaggctgaggcaggagaatggtgtgaacccgggaggcggagcttgcagtgagccgaggtcgtgccactgcactccagcctggcccacagagcaagactccatctcagaaaaaaaaaaaaaaatgcaatcaactgcaaggcttggggtgacagtttcctggtcattcttcccagtttttttgtgtctttatagctagagatgactaaagcccacctccaagaaaacagcaagtcacgtacaactgaagcccatgggggcaggatgctgttctctccaccggggcaatccaagcacctgagtgtctgacaccacccatcacccaggggatccgagctgaattctaaagactggaaccaaagatgacagagtgcgtggctggagagagggggaagtccacagagtttaggtaaatttctgaaccacatccccaccacgcccacaatgtactgcattgaagtacaccggaagctaaagaccaaaaaggaatcagattttcagctctgccacctaaagcagaaactgagggccttattcaccgcacagactttagcccaagtgccatgcctccagtttcacagtttcaccagcagctcaagcaaaatggcctggacactaaagatggcctctgggtcagagtatcactcatttcctctgtccacaaaccactttgattctctttgattctctctgtccctcatctccccatctagtctttttttttttttttttttttttgagacagagtcttgctctgtcacccaggctggagtgctggagtgcagtggtgtgatctcagctcactgcaacctcggcctcctgagcgcaggcaatcctcccacctcagcctccagagtagctgggaccacaggtacacaccaccacgcccagctaatttttgtactttttgtagagatggggtttagctatgttgcccagtctgctctcaaactactgggctcaagcaatctgcccacctcaacctcccaaagtgttggtattacaggcatgagccactgcgcccggcccatctggtcttattaaatacttcattctctgcaaatgcagacgttttctcagctctgattattttttctaaagtaatgaccccccacctggctagatgaatgcttctagcaaaggaaaagaccagaatgtgaaaattgtactgcaatagaacataaagcccgtccaaccccacctcccatcagacctggggtggtggcagcagcaggcgtcagggctctcaggcctgcccattagtcatccctaaggcccgttagcacacgggttaggaggagcacacactctggaatcagaaagcccaggattgaacccagccctgctttcagtcaaggctttgtcactcactatcactcccttgacctaggacctcacaaaaccttgtcatccgtaaaactggggatgataagttctaccttgaatgttgttgtgaggaataaatgaggtaatgtctatgcagcacctagcacagattcctgcagataaacactcaataaatgttaactatcatccactacctagtcatcagaaaagcacaatgatctggtatctttaagtccttccgcttccaaaaaaaaaaaagaaaagaaaaaagaaaaagatgtgtgg

SEQ ID NO: 698 - DNA, 2499 bp, Homo Sapiens
tcacatggacacaggaaggggaatatcacactctggggactgtggtggggtcgggggaggggggagggatagcattgggagatatacctaatgctagatgacacattagtgggtgcagcgcaccagcatggcacatgtatacatatgtaactaacctgcacaatgtgcacatgtaccctaaaacttagagtataataaaaaaaaaaaaaaaaaagaaaactggacacttgaatataataatgcagtaactctggagatgagactctcctcttcctcagggtttgctgttttggggttttgttatgttttacattgttgtaggttgtctccatgctgaggatcaacctgagttgtaagcttgaggtcttctcaggtctgaagctgctcctttccctgggcacacactcctctctccaaggatgtgtggtaactttaatttcctctgtgtatgccattgcttttgagtgtcctagtctttaatgtttggctcccaaaaaaggaaaagagaacaacgaaggggaagggaaatggggttctggccttttctatctcctagaagttgcttcagtctggtaagggcttgcagcagtggagtggggagttgtgagcaataatggctgccggcctctgtgtttgcccttccataatcaaaagtagcaatcaacaaccagaacgcagatgctaacacttggaggacagagtgcttatcgcccatgattgttcccacaagtcttagcccaagaagttagaagtggtgctcaagtttgtttgtctgacagaaactgtgaatccacactggcctgcttattttgaggttgtgttgccagagctttcctagcataataaagagaggtgcatacaaaggaataggaatagtaggaggtgggggtaaaaatatcaggtgtgatccacatgccaagccgacccgcactgtgtcccacaggaagcccagaagatgtttctgtaagaaattaaggattcgtttgttggggagggctgctggcatgcttgaaaagtactgtgacggctgaattttgtgggcttggggagattgcagattctctgatttcaaggggaatgatgtgatcctagagttgcaaagaacaagtgacagtggaggcgcttatgctttgtgactgcactagagacaaggaagacacaactagaataatggggagcaggaatggagcggccaacagaatatgtgactgttagggatctttgatgaaggctgattctcagggagtgaactagatcagtgaccaactatttgtctttatataactgggtaatgtggatggattctaataaagggactacttacagcacagcaggaaagtcacaaagaaaccagacagaagagtgtaagtagtaaggggccaagcagtcacctgactagagacagtgccagcttgccaagaaggcaccagacagaagctgtgatcttcagcaaagggacacagtctgcctgtgctgaccctgcaggggcagaggtgggggatacacacactcttctctcacctatcttctgccaccccctccattagctgaaccccaataaaagcatgagggtaagggagatctctgaagtatccaattcaggtgagcctcctaaggaacaaagcagaatgcagaaaaattaagagtgggtctagggaataaaatagagatatgcaccagagtatgatgatgtgtctgggaaagaatatacaaatacttttaaaattactagacaataaacctgagatgacactaatacaggtaaatctcatttaatggtaatatattccaagaaatgcatcattaggtgattttgtggctgtgcagacaccaaagagtgtactttatacaaacctagacagcgtagcctactacatacctaggctatatcgtacagcctattgctcctgggctacacacctgtgcagcatgtcactgtgctgaatacagtaggccaatggtccccaacacccaagccatggaccagcaccggttcgtgtcctgttaggaactgggcacaaagcaggagatgagtggctggccagccgagcattactgcctgagctccgcctcctgtcagatcagcagcagcattagaccttcacaggagcacaaaccctattgtgaactgcccatacaagggatctaggttatgttctccttatgagaatctaactaggctgggtgctgtggctcacgcctgtaatcccaacactctgggaggtcgaggcaggtggatcacaaggtcaagacaatcctggccaacatggaaaccccgtctctactaaaaatacaaaaattagctgggtgtggtggcgcatgcctgtagtcccagctactcgggggactgagacaggagaatcacttgaacccgggaggcagaggttgcagtgagccgagattgtgccactgcactccagcctggcaacagtgggagactcagtctaaaaaagaaaaaaaaaagaaaaaaaagaatctaactaatgcctgatgatctga

SEQ ID NO: 699 - DNA, 2279 bp, Homo Sapiens
taatcccagcactttgggaggccgaggcaggagggttgcttgaggccagagtttaagatcagcctggacaacatagcaagactttttctcaaaaaatgtttttaaaaattagctgggcaggccaggcacggtggctcacgcctgtaatcccagcactttgggaggccaaggtgggtggatcacaaggtcaggagatggagaccatcctggctaacatggtgaaactccgtctctactaaaaatacaaaaaaaaattagccaggcgtggtggcgcacgcctgtagtcccagctactccggaggctgaggcaggagaatggcgtgaacccggaaggtggagcttacagtgagccgaaatcgcgccactgcactccagcctggacgacagagcaagactctgtctcaaaaaaaaaaaaaaaaaaattagctgggcatagtggcatgcacctgtagtcccagctacttagaaggatcccttgagcccaggagttcacagctgcagtgagctgtgatcactccactgcacttcagcctgggtgacagaaagatcatgtcgctgaaaataaaatcacgggtggggggtggtgctttgtgtacttaggggagctcaggtgtgaaaaactgcgttttgaaaaagcaggttcctgtgtgctggttagaatggggggatgaggaaattgaggggcagtcctccccacaccatcatttgccttggagcagactggaagagtcagcagaatgaggggcaacaagtatggattggagtgatctgggtgagctgaggcaggggctgaagccctcatatggaacgtggcagggatgagcaggccatctggaatccagacttaaaagcatcagtcacccagacattgatttgagatctctgcagagggggaaacggctggggtttcagccacttggagtgtcctaattccccagcagagtctggccgtgagacctagtctctctgtctcacctggcggggtgatgtgtccacttcaaagtctcactggacacaggcaggcaaaccctcaccgggcacttgattcttgcaccaggttttagcgtggacgttgctaagccagcatgtggcttcgcacatgtggagtcttacagttactctgaagcaagccctgggaccccgaatctgaccccgaagttcttgctgggctgactccctactcggtgttgacttgaccttacacgggagtcagtgtagtcatgggctcggaaagcactcagataaaaggtgctccacccagtgatgaagaatgtgttgatgtcttaagatcgtcttcagataaacagcaaaaccgttggttaaaagctggtctaacccaccttattttgttgttgtttgttttgttttagacgtttcgcagcctgaagctgtggttttagtctctttctctagtgataagtggaaaagagggatgaggaaggggctttgctggcccgaccaaaaacaaaactaagaacccatgagtgtattctctcccttgggcacttggacacctctgctagaacatttagtagacgctgacaattccaagctaatgtaaaagccaagtctggagggtcatggggtgggagactagggtgaggaagttgttaaaggaggccaaggggatggcacggccttcatctaatagtgacagtagcattttagagctagagggtctttatccattgtctagttcacatgcatgattttaaaaaaggaagctgaggcaggaggattgcttgagcccaggagttggagactagcctaggcaccttagcgagtcaacgtctctgttaaaattaataaatgaagtcaagaaaggtgaggcatgggcggcctcagtgacctggactaactcacagagaggtagcaatggggagggccagagcctcgcttctgagggattacaccacagctcacttcccccacccaaaggccaaaggaactgagcgttaataaccaacatagcgatcttggtacctggagccccctcgatgtcccatggattaaggagaccagattcctccatacagcttgttgagggacttggtgggtgccccttgctcttggggtcttcctactttggctgctatgctcaacccagacccagcctcttcctggaattctcctttcaacacgcacagagacagaacccggcccggactttgcagccagtagttgtgtgcaatcacctgggacagtgctgcaggtcagcagccggcaatgctagacaccgggttggggtcgctcagcaggtctaagccctggctgccagc

SEQ ID NO: 700 - DNA, 2443 bp, Homo Sapiens
cgaattcctgaactcaaggaatccacctgcctcagcctcccaaagtgctgggattataggcgtgagccaccatgccctgccactttcagcttcctgacttgaaatgtctccccgcaaataagtattaattactccaccgcaggcctgaggagaaaaaggtgaatgagcctcttcccagtcctgaagctaatcagtctaatgaactggtaatgacaacatattcttatccttctgggccacttctattagcctcatatactgctgagagagtcgaaagtgctgagctaagtcagggaaggtaagagcaggcaggtgactgctaagacacttctgttctacctgtctgacacctgatatcctgcagggacgaaaggccatatttatggatggtgaaggcagtggaaactgtactgacctgggagtcagaaaccctaagtccaagtcctagttctgccactaatatgctgtgatcttaagaaagttactcttctctctgggcctcagtttcctcatctatgtaagtaagggctgagctggtcaatctattaagatcccttacaggccaggcatggtggctcatgcctgtaaacccagcacttcgggaggctgaggcaggtggatcgcctgaggtcaggagttcaagaccagcctggccaacatggtgaaactccatctctactaaaaatatgaaaaattagccaggtgtggtgatgggtgcaatctctgcctcccagctactcaggaggctgagacaggagaatcacttgaacccgggaggcagatgttgcagtgagttgagactgcgccactgcactccagcctgggtgacagagcgagactccgtctcaaaaaaaaaagatcccttacagtgcagtctatggtttttttaatctactcatgccatgtagctaatagtcacctcagtaaggtagcctgtgacctgctttcttacccccaggcctggcaacttccacatccaaaatgtcttaagacaacctttggcccagggtagctgaaatggacctttaatctggagtcagagtccccaccatctccacagtacccatgagggctaacgtttcacttctctagcatagaacatggactcctagccttcaaccacgagactgggttcagggcggtcaccctgaagctttccataacttcccctctatggccttgggcagggacttactcttggcttttttgaaaccacaatataaattaagtagggaacatcgaagctttcagataccagagattttaggttgactgacaggctccagaaagtgagggaaggagagaggactggagctgggatcccacctcagccccagccctacagacagcagccatgtagagggtgtctgcagagccacatcccgggtttgtggttgtggggtaagaaagacagatgtctggctgcctggttggggactacagccaaagggaggtgcttccactggggcctcactctgcccacaaataccagagatatgccctcatttttctcttcatttctcagacccttagaaggaaagaaagaaaactaacattttctgggccgctacttgtgacaagcgctgtgccaggcaccttcacgtatcatatactcatttaacccccagagtaatgttgggaagtgggtgttactgtcgccctttacagtgagtaaacaggctcagagattcaggatcttgcccaaggtcacaaagctagcaagtgtaattcctaagtttggccttttcctaatatatcacattgctctgcaccccaagatctggttgattgcctgataagcatgtagtaggaactctcatgccctagcattctcccacaaatctgagctcttccttccaaggtcccataaatgcaactgggaactcctttcctagatctcaagaccacacacctccctgggtcctaatcccaggtgactgctcctcaattcaaaacactccaggtccccactaagttctcacaagtgaatccctggggaactgtgacaaagcatcagtcagggtgagggttcagaatgaggggtgctctctctgagtcctggactaaacctagcctgctgtgagccagtagggagatactggaggagacagatccagtgggtgagagggaactccccttaggggaggggcctggatttctccaaggaagaaggaggcctggtgaataagaggctttagggctggggaaaatcccggaagtgacaggggttcttagacagttaaagcgcttccataagtcatgagagagtctggggtgaccttggacaatctcaattggtcagagaaagggagaaaggatattctctggagtagggtcatggcagggccccaggagctcctactggtgattgggatggaaagcacacatcaggagggagtcttgtcagttctgtgcacaacactggtctcacgtgacaggacag

SEQ ID NO: 701 - DNA, 2480 bp, Homo Sapiens
aggtgtgcagagttctgatctttggtcccggaaaaaaggtcagcacagcccggaatgggaccacttcagaaccatactcttttccttctttgtactactcattaccaggggcttcccaggcccatcgagaaacctggtcctgtagacctctgtgccacggccccaccattcctgctggacagcttaggctcaggggctgccataagatccagcccagctcctggggctacactggtggtgtcgtgcttggtgcggaaaaccccaaggctagggtttacaacccttgtcccttatgccctatcaggccccttccacaggccctgcccttctctccaccccatggggctggggaccctccctggccaaagtccagcagactggacagaccctccagaaagtaatggcaggagacgcacgggacgtttgacccatttgtctccctctacctacgtgtgcagtccttctggttttgggcaaggtcaaagccgggcctgcagtcgcaggccaccccacctttgggcgtctcccggcagatgtgggcacagccatggtctttgttcatgcagttcataccctctgggaagagagacagacaagagacgggttgaagaccaggcagagagggagagagaaaatttcaggctgaaaggggatagccaatgatatgtaacaatcaaatgggctgtcattgcatgtatcatgcacacacacgcacttgcgcacacacacatatgcgtgtgtgcagcagccatctacatggatatcccttagggagaaagcaagggcacggtgcctgggtctagattcaggctttgctctgtgagttgcactgtaaatggcacctcgtgacccacggagaccaagctcttgctctaggtcagattgtggggcatggtctgtagaactacttttgtgtcagggtgatttgctcccctctcccgagccacccatggttctagggtaccccccacccgcccagcagactggatctcccctctctgtctgcctggagtggctcatacccccttccgttgacctcagttgatgtttatcttcctggtgatttgtgaggcgtttctagaatttatgaggtcaggggtcaagtgagaggttgtaggtcacaagtccatcaagaggccaaggcagatgaaagggaagcgcctctgtctgccaacccaccagctctgtgacctgccttccacctccacccacaggaagctcaggcaggagtgaagccggctcggggagcggcagtgaaggctgcagacggcgaacacgcacagggcaacctccttcccccgggacacaccggcctcttgttccaagggaggactggctcaatcctgaccccgtccactttaaatacgggtatgcagcaacacagaatagatttaagaacacaaacaccctgctagttgtaataaagacaaaaacgtctaaagttaaaaatcaaacaaacaaatggaaatgaggaagcctgcattttgcccggcactgtaactcctggtttcacctgattttgcgactcatatttcctcaccttgattttctcactaatcaatcaaattgttggaatgacgcagagtctaactaagcaacgagttagcacggaaagcgctttcatgctgctgccctgcacagaagctgcaagttcacacggaaagaccctttccgctggctcgattccaaaacagcatcagcgcctgagtcacacagatagtggcgtgcggtcaacgcttaacagccggcaggggtggaggctgatttgcagtatttaccaatttacgtgggataaatacgccagccacggctaatttcaaggtaccagggagatgtcgccaagggtagagctgggaacaaatgtgcacagttggctctcacaagctgagacaagccagccatagcacgtccctttcttagaaaggtcgttgtaaagtcaggcagatgtaggtgtgaatctggcttccttcctggctgtggcctgggagacaactgcttcccttttctgagcctaatcttagaaggggcaggatcacctctgtctcacagaggagctgtgcaaattaaatccagttacagacaggaaatgccaggcaataagagacgaggtctgtctgtgggggcactggctcttgaggccggtgtctctcctgcaggtctggagacagcgtggctcctccctggggcctggctggaccgggtggccagaggcggctctcggtagagaaaccttcccaggctactgagacatattcagtccctcatcaggtcctctgggagcctcctgccctggtaagggtttggccagtgggtggtggccagcaagccatctccctgaccgttactgacagctgttgtcggcggtgggctgagtccagggtcgcccccttcatccctgttcatttggcttccatggctccctgctgttccagcttcttcacagctgtacacactccacggttcgccatcccacaatgcct

SEQ ID NO: 702 - DNA, 2487 bp, Homo Sapiens
ccaaaagagccctgcggaggctaggagtggttcttgatgctcacctgaagcccctagacgctgctaggagggggggccctcctgggcccccaatacccctccgcttgccgctgctagcgcacccctgcagtccagcgtgcatccaccccacgcacgccccgtgctgtgttcctgggccctgcccatggcctcaataaactctctgcttggtgtgacattggctgtttctagagggtgctaagacatggggccaggtgcccaggggctgcccattgtggtagggacagagtccccagtggcgggagtgttgtggcaatctcacccttttagctctttccgaaattgtgccgggggtccctgcggtgctgctctggggccttatctgaggtgccgtatctagaagcacccttgggaattctccctagatacactcgattggccacagaggaatccgaggctgtgcaatggggtgtcctttccacgtgcacggactgggggccagcacggctcaggtcagtgtgtagtgggggcatgaactccttgaagaacaatctggccgggcacggtggctcacgcttgtaatcccaacactttgggaggccgagccggggcgtatcacctgaggtcaggagtttgagaccagcttggccaacatggtgaaaccccatctccacaaaaaatacaaaaattagctaggtgtcctggcgcacacctgtaatcccagctactcaggaggctaaggcatgagaatcgcttgaacctgggaggcggaggttgcagtgagccaagattgcaccactgcactccagcctgggcgacagagggagactccgtctcagaaaaaggaaaagaaaaacaatctacttagatcttaaaatggatatttaaaaaattctccagagaaagccagaagaaaataggtgactttttcactatgtgcttaggtgactgcagatgcccggcaatgttccctcccaggccctcctgggtgagcccgcctcccaggcaggggtcagcatggccggggtccctctgtctgagcccaggattcgtgcaacaccaggaagacaacagttgaaggttccttagtgagctaagggaagtatacacaaacttactacataaacattagaaagtgctgtccgtaaaaaacacgtcttcacagagccaacaagcagagaaatagctgcccagtgttaggaagtgcatcatgatccagaggttcagcccgtgtgcagcgcacagacctgaggccccagagagaccgaggacgcagaccagtggcacgacggaaacgcagaacgtttatgagaaaactttcctactaattgagataaagctgtaaagaggcagatagccccactgggtgtgtacgtttgaaacttgtgccccctgggctagggcattcggggtgtggccctcagtcccctgtagctgctgcctggaaaccgctgccacccacccacctcctccctctgctcttccactcaggtgagaattctccaagccctgccctccggcgcccccgtcccgcccctgcccggcctggccccgcccctgcccggccccgccccccaacgtgtcttcaggtctctttccctccagccggcccttaggacggctgttggacgtgctcgtgagtccttcgcctgtctgccttccacctctctgcagctccttctccaatctcatggtcttcttgagcttggccgccctccacgccccatgctgggcttggtcggttctggggtctacctctctggcttcatccctcccacagtttcgagggtttccctgtgctcaggcccctggcagccgccccctgtgcagaccactgggcagatccagctgacctccaggggcacttcctcggctcatcactgggccggtgctctgcagaatgagctgtgagagccactgtggctggccagagggtgccactcacagtcacttcagactcacaggagccttcgtcccgacccctgcattcatctgtgttctgttttatgttttttcccagtcacctgagctgcaggccttggtcaccccagactcctccctcctgtcacccttatcctcaccccagcacctttacgtctgccccaggctccatttccccctcttctgcctggatcaaaccaccctgactttcctgggtcttcgtgcaacagcctgctccggccgctgcctcactgcacctgcaaatccacttgcacccacacccaggccagggtttttaaacagaagcctcagcagatccctctctctggccagctccctgttgaaccaggaagcaggtccctgttgaacctcagcatgacccgcccccacccctgcatcccacttctgctctgggagcctctgggttcctgggcgcacctgctgcccttccctgtttgtcactgggtgacctcccgtccttgtgggcgctcccgggccctggtctcgggccttctgaggacttgctctcctggtagcggctgctga

SEQ ID NO: 703 - DNA, 2429 bp, Homo Sapiens
aaaatacaaaaattagctgggtgtgatggcacgcacctctagtcccagctatttgagaggctgaggcaggagaatcgcttgaaccagggaggaggaggctgcagtgagctgagatcgcgccgctgcactccagcctaggtgacagatcgagactctgtctcaaaaaaaaaaaattagccgggtgtggtggtatgcagctgtaatcttagctacttgggaggctgaggtgggaggatggcttgagcccaggagttcgaggctgcagtgagctatgatcacacgactgcacctgggcgacagagtggaggtgatgtgcttcctcaaatagccatgagaacaacgcttcttttcttgtcctggctcaggaacctcaccaccatgccacgttgccctgctgcgctgtgctggtgtcgtaggtcggtggcaggacatttgcccacctcacaggctctgctttcagtcttgaagtatggctcctctcgactgctgcccacacggcctcctgttgtcagcctgggctacatatctgggctcttccatccctgtgggcctggtgaggcctggccatgtgcctgtgtcatgccagttgctttcaagatgatgtttctagtaggaccacatgtgaacacagtgaccaccatggccaggaggaagctggctgcccatcaccagcttgcccagggacctcttgcaccctggcggggatcagcagatcctgctatgagagagcagaaggcagcatgctgacttccaggagtgtccacagcgtggctgggcagagcagagctacaaatgaacagatccagtgccgaggccatcctgactctctcaggggctgccaggccgtgggtgcagggtccagcaggcccacttgatcccagcatcccacgtgtgcctgctcggggtggccagctcactgcttcttcacctctagcccaaccagcaggtgccccaccatgagcccctccaggctcaccttgcccatccctgccatgtgacctgggactcttgagatgagatcacagctgcagagcacacagcacagggaggagctcatcagcatcttcccacctgtggtgccctggcccagcctccttccggttggggttggacccgccctggcagccaggttttgcgtcacctgccccacccgccctgtaacctacttgcccaactgctatcccggtggccgtgaggccagttgacagaatggagaggggtaagcattttccgcctggagaggatgggcgtgtggccatctgactgcttctgcaagcctggtggttgtgtgcaggctgccctggtggtcttagccccttggggcaggcggggtcctgtgcaggatgcagagactgggcgtggcttcctgcagatgttcagatgcttctgggctgtggcctctgagacccagggcaaggctgctgactggaccccagaccctcctgcctgcctcttcctccagctgctctttgtggtctggttctggccgcctgggcctcagggccaaccctgcatggctttgaccactctggccttcttggactgccaaggacatgctgagagttggttgggcttggcccaagtgctgagcccagggcaggggtggggacaggcagggcggagcctcacctggaaagccaggcacgattctccctgggacaccaaccctcctgtagagttggccaattcgggcaaccttgagggcgagctctgtgtggcacaagagatgccctgaggagcccagcctcacctggtgtgatgggacctgtggaagttgtgggaagtggtcctggccacccgtgtgcccacatgccctgcgcccagatcaagatatggtgaccaaaaggacaaggactatatccatggctccctcccagagcctggcaagtcagcaggcatgagagggtgttggaatgctgtggtgggcctgtgtggggaccttgtaggacctagggaacctgcagggcttggcttagggagcacacaggggcccaggcaaaggcaaggtcacaggtcgggggaggtgaagctggcagggggagggggagacctgctggctagagctgggttgggggccggtgggcagtgggcctggctcgagcagggggcgagggattggagagaaaggcagttcctgatggtcccctccccaggggctggctttcctctggtccttccctcccaatgaccgcgtcttcgtcgaggccacagcccttggctctgcgcccacacctccagtgccaggctgtccggagatctgtttatggccttcccttggaccatggagccctccctgccactggtgcctggagggctggtctgctgcccctgcaccctggccagctaggatggtggggtcctgcagctgaactgggggtgcctttctgcctgtctgtcctacgtgtatcagtggccagaactgccctcat

SEQ ID NO: 704 - DNA, 2267 bp, Homo Sapiens
tcaagggcccccatctgcctccccagtcccagcctctctcctgaagaaagaggcaagatgtcagtggaaaataacttttattgagaccccaccaactgcaaaatctgttcctggcattaagctccttcttcctttgcaattcggtctttcttcagtggtccctgtggggagagaggcagtggtcagaggtagaagatgacaggtgacagcagatgcccactctagaggagaccaagactctgggccagtctccacagccacaagagaggcctaaggcatcaagaccacccctaccccggctggagccaaaggcaggcggctgcccaagccaccacacccagcgaggggggcaggcagaggtgctcaccatgaatgctttcttctcctccatggtctggaagcggccatggccaaacttggaggtggtgtcaatgaacttaaggtcaatcttctccagagcccgccgcttcgtctgcaccagcaaggactatgggccaagaggggaagggatttaggattacgaggagccaggctttcctcagcactgttcacagcgcccctgcatctgggaagccacacgatcaattcagcctcccccaccatccggcagatgaggacacactcaaagcagcaaacagcccagcaaggccagactgggaatttcctcatctcaggacttcaaagccagtgtgaaaggactgccaacaccctctccttcctttcctctcccaccacagggccaccagcgtctgtggccttggatcctccctctacaagagcccccccatgacaagtcaggacctgcctcaccttgcggagggtgagcacccgcttcttggttcccaccacacagcctttcagcatgacaaagtcattggtcacttcaccatagtggacaaagccaccctggaaaacgagcatcggatcagcacaggcccaggaggggattgtcgtgcagatgacccctccaggttcaggccctccctgaccacagggctgttctcagaaggaaggcaacaaggaacggttccgcagtctgtctcgggcgctgtgcccagcgcacattccaggcctcatcactgaacagctgagcctgagaccccacttctcaccagccaaccccgacgagtggactcagatgacaacatgccacttacaagggacacagctaggtgttgtgttggcttcagttaacgatcctgctagcagcccctaggaagcagcctatccccaaaagcacgaggcctgggatggcctcacagagcagaacacccattacttaccagagggttgatgctcttgtcagataggtcatagtcagtggaggcattgttcttgatcagcttgccgtccttgataaggtagccctggccaatcttataaatctgaatgaacaagaagggtgtaaggctggggcattagggacaaataacccagacatgccagtgtgctgacctgcaaagcacgctagaaggcagctgaggcctcagtcccagtcacagcgtatcccaaggtcagagcaaaaagctggctggccctccaggttcctttctgtaaggcggctgggctaaaactaaagatcctgctgtacaacacaggcctgtcacccccctggtggtggcatcagggaccaataagactagtatccccagccacaccagtcagccccaccacagccactctacaggatggcaccttacaaatcatcaagatgggccagaactgaccatgagaagcaagccactgatgtccacgtgatgcataagctacagtcagtgaagcagcactgacaggcacagaaaccccactccccatcacgggggcctcttcccacccccagggagccactctcagaacctcaccttcttgttgatctcagtgcggtgatggtagcctttctgcccagcgcgtgccacagagaaggctacacgagcaggatgccatgccccaatacaggccaccttgcgcaggcctcggtgggtcttgcggggcagcttcttggtgtgccaacgactggtgacccctggaatggatacacattacttcacctcagcgcccagcacctcccactgaccccttcctgctactcagcaattaccaaccatggctgggtcatctgagggagtgataagattatttcatgtgcattacccacaggtctcccctgtcaagctggataggctctgggggtgtcaccctgaactcaattctgaatgggtgctttttaaggcatccattagtttaagctcccccattcacagggactg

SEQ ID NO: 705 - DNA, 2426 bp, Homo Sapiens
gccctggccaatcttataaatctgaatgaacaagaagggtgtaaggctggggcattagggacaaataacccagacatgccagtgtgctgacctgcaaagcacgctagaaggcagctgaggcctcagtcccagtcacagcgtatcccaaggtcagagcaaaaagctggctggccctccaggttcctttctgtaaggcggctgggctaaaactaaagatcctgctgtacaacacaggcctgtcacccccctggtggtggcatcagggaccaataagactagtatccccagccacaccagtcagccccaccacagccactctacaggatggcaccttacaaatcatcaagatgggccagaactgaccatgagaagcaagccactgatgtccacgtgatgcataagctacagtcagtgaagcagcactgacaggcacagaaaccccactccccatcacgggggcctcttcccacccccagggagccactctcagaacctcaccttcttgttgatctcagtgcggtgatggtagcctttctgcccagcgcgtgccacagagaaggctacacgagcaggatgccatgccccaatacaggccaccttgcgcaggcctcggtgggtcttgcggggcagcttcttggtgtgccaacgactggtgacccctggaatggatacacattacttcacctcagcgcccagcacctcccactgaccccttcctgctactcagcaattaccaaccatggctgggtcatctgagggagtgataagattatttcatgtgcattacccacaggtctcccctgtcaagctggataggctctgggggtgtcaccctgaactcaattctgaatgggtgctttttaaggcatccattagtttaagctcccccattcacagggactgactaacataattccaagctcccctttgcagttatcagtaggctacaaagagcaaagggtccaggaacgtgttaagaagttgtcccctggccctccgctatcccagccacttctgaccacaaggctgttctcagaaggaaggcagtagagaatggttctacactgtccgattcgggcgctgtacccagcgctcactctgagcctcatcaacgaacagctgggcctgaaaccacttctcccccaggtttgcacagcaactcaagccaccgcaaagctcacctttgtagcctttgcccttggtcaccccgatgacgtcgatcatctcatcctgcccaaacacttggttcacaggtacctgctgctcaagcctctcgcgggcccagtccagcttctcggccacagtgcctccgttcacctggatctccatcaggtgggccttcttctggcgcagaggaagcaggcgcatctaggagaaggtagacacagctcagctccagctgccagcgctcctcccacagcagaggaactgcagctccatgcggcctgattgatgtcaagcacacggcaaaaagccagtaactctgaacaagtcactgaacctcaccaagaggaaggaactttcatttttgccaacagcaacaacttaactttggatactggtgcctgagttactgtcaggatgagcggacaagacccacaccacaggcaaacaaccagatcccagcccctaccagcccaatgttcctgtggctgtcctttgggtcagttccttttggggtactgcagtggttttacctcagccacctacacttgccctagtgacaagcctgcttttgagagagcacaagctctaagtaagaaaatgcatcaccgggagcggtggctcacacctgtaatcccagcactttgggaggccgaggcaggtggatcacctgaggtcaggagttcaaaaccagcctgaccaacatggagaaaccccgtctctactaaaaatacaaaattagtagggcgtggtggcgcatgcctgtaatcccagctactcaggaggctgaggcaggagaatagcttgaacctagaaagtggaggttgcagtgagctgagatagggctattgcactctagcctgggcaacaagaacgaaattctgtctctaaaaaaaaaaaaatgcatttaagcataaagctttcactcaaggacagcctggcaatgtcctgacaaaatttcaacggtggacatgcactctcatccgtggtggccctcaccacatggggttgcactcagcacttgagatcagccaggataaccagtaacaggacagcaagaggcacccactctaaccaagtcaataaaaagcctgctcagctcatcaactaggtttccaggagagcagccagtacctcacaaccgactttcaggcaggcatttcagtgttactggtgagtcaccagttgaattttaaaggggaatggttcccttgctaagggccagtaaggacacagtgccctctgctggcaagggagaagcc

SEQ ID NO: 706 - DNA, 2306 bp, Homo Sapiens
cagtggctcatgcctgtaatcccagcactttgggaggctgaggcgggcggatcacgaggtcaggagatcaacaccatcctggctaacacggtgaaaccccctgtctactaaaaatacaaaaaatcagccgggcgtagtggcgggcgcctgtagtcccagctactcgggaggctgaggcaggagaatggcgtgaacccaggaggcggagcttgcagtgagccgagatcgcgccactgcactccagcctgggggacagagtgagactccatctcaaaaaaaaaaaaaaaaaaaaaaaaaaaagcttggcagggagcaggacatttggacctcactctgctgcccccttggctgtgtgacatccaggtcacgttgcctctctgggcctcggtctcctcacctgtttaagaggggttgacagtcgtatctgccccctcagcttttccccaggaaggtggtagccacaattagcatttgttgaggctgaccctgcaccaggcccaggataggcggggcttagggaggcccgtctctcgccacgttcccctgctaggggagccccgaggccctctcagtgtcatcctcatgctacactctgtcccagccctgtgcgtcccaagctagggcactgagtgtgccagcacccgcagggacaggcactggaccctgggtggacctgagggtctgtgactacccccccagctgctctcccctagaggccacttccctcaaggaaggaaagaaccttcccgccacctcctgcagtgcggtcagctcaggccagcctgcacagcagggccagaaccagggcccctggggagggatgcctgcctgcccagtgggaggagacggcacgcccgtgaagccgctactcagccagcctgggggccacgagtgctgcttctggtggcgctgtgcggggagggagggggccgagcagggtgggcactcgcatgcctgtgtcttgctggccttcgacagatgacagccctcctcctagggtctccagtgcagagttccttggggacattatggccactcctgtccagatgagagggagccggctgcctgtgacagcgtcgcaaaatgccgccagggctttccctccctcctcctttctctcttcctcgtccctctctggttggtggtttcctgcaggctcccgtccctgctggtgctggccacaatgtccccactcccagggtttcggcgtcccagccccctgcgcccaccgcgcctgcccgccagaatccctgtgcccttggtgcgtgtggcctgccgagcctcgagcccctgttctcctcagccctctttcctcccgcgtccccaggaggtgcctctggaagccacggagtcccatcggcaccaagaccgactgccctttggggtgaggtagtaggttgtatagtttggggctctgccctgctatgggataactatacaatctactgtctttcctgaagtggctgtaatatctgcggtggacagagcgtctggaaccctggctgggagcgggcagggccaggtttgggggcagccttggcagcagtcgggggcaggggccgcctacactgagaagtctgacaggcctaggtgccacttgctgtgtgaccttggacaggcccctgatctctctgggtctcagtttcctcctctgtaaaatggaggcaaatgaggatggaaggagatgcagtgtggagcatcgagggcagaggagagctgagccgaccccaccctctgccccagccgcactgagagaggcgatccacgcagctgtttgtctgacctctgtctcccaacactccccaacactccccccgccatcaggcccaggctcatgggtggccctgagccgtaccctccactgagcaccaggagaaggcaccgtggggccaggggtggccgagacgtttggaggtcacagggctgcgagtattggcgttgcccatcaccccaggttcccagcacgtgccccagcctggccagctcagtggcagggcctctgcctgtggaggaagggaggccaaggcacctttcctgagcaggaagtgagaggaacagctctgcatacactgggtcccacatggcacaatctgaaggcagacagtggctcctctgtacctggggaaactgaggcccagagagccagggacttcccaagaccagccagcagcagctgccccttcctggggtgccatctcccctgtccctcctgccctgcgcctgcccagccctcctgctctggtgactgaggaccgccaggcaggggctggtgctgggcggggggcggcgggccctcccgcagtgca

SEQ ID NO: 707 - DNA, 2473 bp, Homo Sapiens
cagtttcgatgtctgagcaccctcaatgcctgaccggattcctcatcccctaccttcctctgggtgatgtcggtcaccctggcctgcctctagccagaatccagcctggtcagcttagacagagtgacccaccctcttagccatcttccatccaccaattccacctggagccttgcttctgaatccccacatttccttgtgtttgaaatggagcacaatctttctcccctgttgcaaaacctcattgcaggggcccctgtgagtagagactgctttaccgtctggaataagcctcagaagaattttattcttaacatgggaagtggaccagagggcagagcccccagggctcttctcctcagctggcagcccatagtcccactctcagctccagaggcacaggctccccactgccgggccaggaatgggaacagcaggggctccggagtgggcagggggccctcgggcaggaggtgcacagagggcatgggttggccaccccgggcctggcaatggccacctgctccctgcacatgatggcctcacagggcatcctcatgttcatcatgctataaacgatgccctaaggatctgaaccgggggtggaactgacatctctggacctccaagctcaggtgtatctcaaaactgtcgagacaggatggctgaggccctagaaccctaaggcgcaacactatctatccagcccaagctgtggccccaaactcctacttgaaaaccctggccctgttcatgtgggtcagaccatgttgggcaggaggacttggtttctgaggacccagctgtccagagtggcccagacccaaagccaaaaggatgcctctcccacctctcccttgggccctgcctcctccccaactctggagtgtgtggccagatgccagccagatgaggtcccgcatttctggacagtcctttgatccccttttccttccaccacgaggcggcctttgtcactgggtcccaggacaaagcctcggggcagcctggatggtgttctgaccccaatccccccagggggctcctagtcaagggtcttccctgcatggaacccccaaagccagtaagaaatagaagcttcctgaacattgctaacgtcctgaatatccagcatccacgaaacccaagcgaactagttaaaaataaaaacgtggtgatgatcatttgctgtgggtttaatccaatttgaggatttacttaaaataaaaccttggggaatgaaaacagaagtcagtagcacacctccagggctagtagggagcacatttgcccagcacctgagtccttgccaggtgccagaccctgttcctgacagctgtgctgggcgtgcgcacacaagccccgggcggaggccagggctgcacttagcgcatatgagatgctacgtgggactggaaatgcctcctgcgctcccttgagttacatgaaactactgagaagttcttgatctgggggccattagaggaacctggcccaccttgtctggaacacagagggaaggctggttacggggaaaatccagaggcggcaacttcgtgctctcaacagacagcatgagtcaccatgagaaggggaaaggggacttggcttccagacacacaccaaggacttcaatgtggacagtggcaaggtgctgtccctgaccctccacccgtcgcccactcaacctggcaccccagggctgtaccggccgagtcatcaccaaggcccacctctcgcctggtccaggactcccttggagatgagggcagacaagtggatggcaccctctgctccaaggctccggggcctcatgaagcagccgttcctattgaacagctccagcagctgcagtgttccttcctgtattcctcagaacctgttgtcctgaagctccgtctgtcaccactgtgtctattcccttcagtcagtcacacagaacaaatctattcccttgtcctcggaaaaggggtcaggtccttggatgtttgaaaatagctgccctgtcctctctgacccctcccccgccaccgccgcaacctaaggcgaggagctgccacttacaaggcacctactgtttgtcgagggttttatttaggtcaggacgcggttattcccatttagagatgaagaaactggggttcggcgaggttaactgcttgcccagggtcacacagggaacaggagacgctggatgtaaactcagccccgtctggttctgaaggctgccttctccccggccctgcagagcgccagcctctcttctataagctggatgcccccggcccaacaccccacagagaaaaggcctccaatgcctcccctgccatcagcgcttctctgcaaaagagcatcctgaatgcccacgccagccacagaggcgcccctcccaccctctggcaggtgggctcctctcaccttccttttctgtatcgattggtatgtattcaggtcaggtagcagaatgcctggc

SEQ ID NO: 708 - DNA, 2498 bp, Homo Sapiens
taaaacgcaagggagggcatgggtattccccactctctacaaataggattttgctccctacaatccctttaccgccccacctttatttgattaaaccctaaatgaacacttgaggcagacaatcacaagagatttcttccgaaagcaaaatcgagatgaaacctccggtcaaatgggtttgctcaccatagcgtggatttggagagagacgcaagcaagaagaaaagttctggctgggtgcagcatctcacgcctgtaatcctagcactttgggaggctgaggagggaggatcgtttgagaccaggagttcaagagcagcctgggcaacacagcaagaccccatctctatgaaaacataaaacattagccaggtgtggtggcacacacctgtagtcctagataccctggaggctgaggtgggaggatcgcgtgagcccaggagttggaggctgcagtgagctatgatggtgcccctgcactccagcctaagtgacagagctagaccttgtttctaaaaaaaaaaaaaaagagagagagaaaaaaaaaataaaagtccagcccagcactgtggctcatgcctgtaatcccagcactttggaaggccaaggtgggcagatcacttgaggtcaggagttcaagaccagcctggccaacatggtgaaaccgtgtctctactaaaaatacacacacacacacacacaaaatattagctgggcgtggtggcgcatgcctgtaatgctagctaccagggaggctgaggcaagagaaccgcttgaacccagaaggcggaggatgcaatgagccgagatcacgccactgcactccagcctgggccacacaagtgagactgcatctccaaaaaaaaaaaagaaagaaagaaaagaaaaattctacagggtacatcatttttatcctgagtcagtgacccaggctgatgacaaagcagtgggaacagctaccagggattcctacccaccaggcacagcttttaagggctacacatggtttgtctggtaactgcccgtggagaacccgtcaccatatatatgcagagtagaaggtgtgattaatgcgctcttaaatattattagcattgttgccgtgattttgaggagtttcccaacactaacgagggactgatttttccagccctacacaaacagggaatctaagaagtgggtatatggggccagggtatttaaaactctaaggagttccagaaaatgcacaatttttgtctcagattcattttctcactggttggcgttgtaacacatctagccgttgagggaatttctgccagctgccgcggccactttctctttcctgaacggcacccaagaccaccctcctaaattccgcaggcaaatctctcactgcccactggagaatgagccatcccacagggggacgcccactcctctccacttcatgcaacgtgtcatccccctcccctcacaggttcccgatgcttcctgtgcaggaggagaagcatctgtatttatgccaaggcttagtgacgtctgcaatgtgccagacgctgggcggagtgcttttcattatctgtcttaatcctcgccacgaccccgtttaacccaaaagacagatgaggaaactgaggcccggggcagtaaggagatcagtccagtggaaggccacaggcctggcttcctgcactgtcctcctccccgaggtctgggacgtaaaatctgactccaatgcctagccatcaggtgactaatggaggaaatgtgagcatcctcgtgtagcccaccacagtcaggtgggccctgatgtctgtaacaagcctcactcgggtaggacagtggctgaagcccagaccacagcggcccaggcaaatgcaacctacgaaagcagaagctggctaagaccagtgttctcaaggataagggaggaagaaatgaggtgggcggggctgggacaaggaattcccatacaggggcatcccttccttccctacccacccctgcagagatgggggtgaagatccctgaccccgaaccagccccatctgggtccatcccggtccctctgcaggaaatcctcatcacccctcctacacctcaggggccaaaggcagcagggtgccagggtgaccatgatgaatgctgtctctggatggggtcctcaccccctaggcctgggaccaggataggatgcactcctgcaacaaagcacctgtgctccctggcactcagcaggtaccagctataccggcaggcgcttcctcctcactggggtcctaggagatgccagaattgagccactggatagaatagctgactgaggatcagtgaggcagcacggccttgccccaatcacatcccggcccccaggctaggggttcgaaccactgtcccgtcacctgtggggaacaaatgggaagacctaaacagccaacggcatgacctggtgacggccatgaggaggcaagacacagagttggtttttatctccagcatctgttggtaggaaa

SEQ ID NO: 709 - DNA, 2460 bp, Homo Sapiens
acccttgaggcagcattcattggctttaccgacccctggtagcctagagtgagggtgaagagatgcctgggctcacgtcccaaccccaccaatcatacagcatccctgggcaagttattcatccacaagccccagtttcttactgtaaaatgtgatcataacagaacctgcctcaaggagtgagcctgatgactttttctctgtgtgaaatgctcagtgcctaatacagagcaagatgctcacaatgattgccgcctgctgtcccgcgcactgccttgacctgtgagtgctgctgattgtgggtgagcggctggtgaggttgggctctggatggttcctggatgctcccttcctccctcactctcaggcccgtggagttaccgcagcgcccccattatctgtggtttcactttccttagttgcagtttccagcagtcagccacagcctgaaaatattaaagagaaaatttcagaaataattcataatttgacattgcatgccattctgagcagggtgatgaaatcatgcagcgatgatcgtgactcattcctctgtccagcgtctccgcgctgcaggcgttcccgcccgtgagtcactttgtagccctcttggtgatcagagagaaaaagcctaatccacagagggttccgtactatccgcggtttcaggaatccacggggggtgtcggagggtaggggctactgtaatttcctgcctcccgtgaggtttgcatcaggcagtctcctgtcggtggcctggcccgggctcctgagactgctcctgaaagggaaagggactttgggctcctgggaactgcccaggaggcagggcagagggacccccagaagttgcagcaagtagctgcattatcagctacgaggttgagaaccaaggggaggaaggtgagctgccagctgcatggggctacatctgggtggggggacagagacagagcagcacagcccctgccagcaaggctgtcaacgaagatctaggcagagagcaatttggggtgagcccacaaggtggcggccagccactcacccctctacaccccgtggccatccccaggtgagctgagcgaagtccctggctccgtcacaccttttaaggcaaaggcagctcccgccaccacctccctgttcccacttgctcagaaattcccagcaggtattttttctttttttcaggaggaatggaatgggacttcttgttctgtcaccgcaggattccggcgaggcctgtctaggggttctggtgagagaaaagcgtgacaggaagcgcatgccagcaggcacttggagatgtacccttggtgacatgcacaggcacggcagccgccccacccaccacaggcctccgctcgggacagcggggcacacgcacaatacagacgaggcccagagatgcagagacccccaacaaaccttctccatgctagggagacaggagatccagctgggaatgagcccatatcatgaagcccctccctcaggagctcataccggagcccaggagccttgtcccaccccagggccttcgcactcaccattccctggcgggagtgagtgttccagcacagggctccacaggcaggacccttgatacctttcaaatctcagagaggcctccccgaccccacccacatgactccatcccagtgacctgttttatttcctcacagccgtcttcacttctaaactgccttttttcttgacaggatcttgctctgtcacccagcctggagtgcagtggtgcaatcatgcatggctcactgcagccttgacctcccaggctcaagcggatcctcccacctcagcctcccaagtagctgggactataggcacgcgccaccatacccagctaacttttaaatcttttgtagagacaggtctcactaggttgtctcaaactcctgggctcaagccatcctcccgtatcagtctcccaaagtgctgagattacagacgtgagccaccacacacggcaggcaaggaagggctgaggggctgtcaacagcaaaggctcagcccccagtcaagccaggctgcccgtgagaaaggctttctgtgcacttgggcacatgtggataggtacgggtgtgatgccagcctccacttgcagcctgcaggtgtgtctgtggtactgggtgcctatgtgtgtgtcctgagcctgggggaagacagacagactacccctaggggcctttgttctttgcgtcctgtcatcctggccatacccagaactcggtacagagccctggacaagcagccaggctcggccaggacatctcagaccagcaaaccctttcctttctgggctggtaggcagcggggctccaggcccagcctaagggatggggaagggaggggacaggctgggacccctgcccagtcagcatccccaccaggacgagatctaaccatggagactgacaagaggcagcacccaggagacca

SEQ ID NO: 710 - DNA, 2300 bp, Homo Sapiens
cccttgccatggggtcatggttggcagaggcagctcctctgaatccagggtctgtcaggctgatggaggaagtcactgcaggacaagggggtgatgcactaccatggggcagggccacatgactccaaagctgcatccagctctaccccagtggcccacaggtgggctgcagcaggacaatgtttaaccctgccaggccagggagggcaaaaccccatgcaggccaggccaggccaggaaggagaacagagccacatccaccaagggcaggaggacccaggggagcccacaaaggccagatgggtgcaggaggcacagccagtcatgttttgcagggtgagcagagcatggacaggtcagagggctatgaggccaggccctggaggccagcagaaggcatgctggggcttcttgcttcccatatgcatgcttgagtcacagtttccagagctacagcttcaaatagacggctctgttttcagtggtggtgatttgagtgtcaggatgccgctttgcccacctgtctgcactccaggctgcaagagtgcaggcaccgctgtgacacaggctcccgaggtcaccaggcaagcaccagggcccaggctgggcactaggtcagaggacaagactgggcttctggcctggcaacacctttccccactgcctcctctgcagttgatctttcagacccaaatatgaggctcttctctaggtttggcctcctctcatcaacttcagctggtcagggtcctgactttgtaaccgtctgtggttcttcagcctcccgctctgtcttgtcccccatctctgagagctgcaggcctctggtctaggaacaaacccacgatgcagctcctgcctcacttgctggtccatcagcaccacactgccagcaccacactgtcccatgctgggccctctgaccttctttatagccttcctgttctataaagattacaggatgggcacccaccatctcctaagcttcacctcctactagggtggagcccatgtgcagtgaaggctcagcctgcgtcagggacgctgggatggagtgaggcggcaagctcaggtgcttcccacgctctgaagcttcctgtctgagcccggaagtgaggtatgtggttggtgcctcctgcaggctttcctgactcctgccagacagggcccagccaagaaacaagaccaggaaaccaggcgtctacacagagattttgttattatttgaggcccatcatctcctcggtgcccactaaatattagtcagtgtggttcccatggtttgtctcaaggaatagaggaaaccaggaagcctgagcctgaaatgcctgcaaagcaaggggagtcctgggcacaagcaggggcctgagctgagggaagggcccacactcgggagatgtttgtctgtcctgatgaggctgccgcagtggcggaatcctgataagagtgtactgtgaggcaccgtgcccacctccagctgccttgtgagataagtacctgagtttccatgacctctaagtcaggaacaggaggctcaaagaggtgtccagggtccccaaggtccactgagaggcatcagcagggaagcagtttagacaccatggaaggggctcctagtgcattgggacagcttgactcaccccaggactcacgggggccacagtcaggagtgtttcatggcgttggacaagaagagtggctgccttggccttggagagagggggtccacgtggtctatcggcccctcccactgctgccagctgagctctccctacacacaggtgccctgcagaggaccagtctggtttagatctgaggcttcagatgaccagtacacgtgaactgtttccgcatcagtgaggtggccctcctgctcctcctcttacctaaattccactgcctgcccaggaggtgatgggctaagctgggtattaaaaccatctcaactgtcatccccaagtgacccatcagggctcagagaggcagacccaggcctagcacccactctgtgcttgtcccctcacccttgaacccccaggtccataccctgctggtggccagatcacgcccttcccaaccccggaggaagccccctaccccaaaaggaccctgccatccctgcctggctctattcctgcagccccaggactcccacctcaagctccatcacctggcatgagagctgatgtggactcagggcgcgctcagcaagtgtttgctcagtaaattaataatacgtgctaatggtcatatctgttatttaactgatgcaaaatttggggtcagaagcatagccccca

SEQ ID NO: 711 - DNA, 2300 bp, Homo Sapiens
ggtgtaaggctggggcattagggacaaataacccagacatgccagtgtgctgacctgcaaagcacgctagaaggcagctgaggcctcagtcccagtcacagcgtatcccaaggtcagagcaaaaagctggctggccctccaggttcctttctgtaaggcggctgggctaaaactaaagatcctgctgtacaacacaggcctgtcacccccctggtggtggcatcagggaccaataagactagtatccccagccacaccagtcagccccaccacagccactctacaggatggcaccttacaaatcatcaagatgggccagaactgaccatgagaagcaagccactgatgtccacgtgatgcataagctacagtcagtgaagcagcactgacaggcacagaaaccccactccccatcacgggggcctcttcccacccccagggagccactctcagaacctcaccttcttgttgatctcagtgcggtgatggtagcctttctgcccagcgcgtgccacagagaaggctacacgagcaggatgccatgccccaatacaggccaccttgcgcaggcctcggtgggtcttgcggggcagcttcttggtgtgccaacgactggtgacccctggaatggatacacattacttcacctcagcgcccagcacctcccactgaccccttcctgctactcagcaattaccaaccatggctgggtcatctgagggagtgataagattatttcatgtgcattacccacaggtctcccctgtcaagctggataggctctgggggtgtcaccctgaactcaattctgaatgggtgctttttaaggcatccattagtttaagctcccccattcacagggactgactaacataattccaagctcccctttgcagttatcagtaggctacaaagagcaaagggtccaggaacgtgttaagaagttgtcccctggccctccgctatcccagccacttctgaccacaaggctgttctcagaaggaaggcagtagagaatggttctacactgtccgattcgggcgctgtacccagcgctcactctgagcctcatcaacgaacagctgggcctgaaaccacttctcccccaggtttgcacagcaactcaagccaccgcaaagctcacctttgtagcctttgcccttggtcaccccgatgacgtcgatcatctcatcctgcccaaacacttggttcacaggtacctgctgctcaagcctctcgcgggcccagtccagcttctcggccacagtgcctccgttcacctggatctccatcaggtgggccttcttctggcgcagaggaagcaggcgcatctaggagaaggtagacacagctcagctccagctgccagcgctcctcccacagcagaggaactgcagctccatgcggcctgattgatgtcaagcacacggcaaaaagccagtaactctgaacaagtcactgaacctcaccaagaggaaggaactttcatttttgccaacagcaacaacttaactttggatactggtgcctgagttactgtcaggatgagcggacaagacccacaccacaggcaaacaaccagatcccagcccctaccagcccaatgttcctgtggctgtcctttgggtcagttccttttggggtactgcagtggttttacctcagccacctacacttgccctagtgacaagcctgcttttgagagagcacaagctctaagtaagaaaatgcatcaccgggagcggtggctcacacctgtaatcccagcactttgggaggccgaggcaggtggatcacctgaggtcaggagttcaaaaccagcctgaccaacatggagaaaccccgtctctactaaaaatacaaaattagtagggcgtggtggcgcatgcctgtaatcccagctactcaggaggctgaggcaggagaatagcttgaacctagaaagtggaggttgcagtgagctgagatagggctattgcactctagcctgggcaacaagaacgaaattctgtctctaaaaaaaaaaaaatgcatttaagcataaagctttcactcaaggacagcctggcaatgtcctgacaaaatttcaacggtggacatgcactctcatccgtggtggccctcaccacatggggttgcactcagcacttgagatcagccaggataaccagtaacaggacagcaagaggcacccactctaaccaagtcaataaaaagcctgctcagctcatcaactaggtttccaggagagcagccagtacctcacaaccgactttcaggcaggcatttcagtgttactg

SEQ ID NO: 712 - DNA, 2487 bp, Homo Sapiens
ataaaaataaaaataaatagaagatattgacaatagctgaccctattttttaccccaaaagtggtgattttatataatttaatctaatattaaggtattcttgtcatactgtaccagctcctaaacattatacttttcattttacttctatttctaagctatcattattacaacaaccaagagaaggtaaatacaggtcagagatttgactcctgttttttgtatgtatttatttttgtagattcacaaataacttatattttgcagttttaaggtttctaattatattagaccctgttttttattttatttagagtcattgtccttgctgcctgtccttcacatgtgacaagtcaattcttcatgccatttccttcacaatcttcatgcaaactcatcatctccatttccatctattcttcagagatgtatgattgcagaaaactccccttttttgaaatattgctcaatagagattaaatctaacacccagttttacctgtctatccttgaattacaggttactgagaagtcagaacagatagccatagaagtaccccactaaatccattcttctatctccttcaatatttgacaaatatttactaagcatctatcttgagcaagcattggagtaagtcctcccataaatatgaagttgtgtaaataaggatgcatgcattcatgtaaatacaagtttaatgctggatatatattgttttaagtgcctgatatgtattagtctatttattcctatctaaggggataagtgccattgttgtttccatcttaaagatgaggaaactgaggccagagagattatacgaactcctaaaaccctaactcttaaccacagcattcagaatctatctggttgtagtggaggacccaatgtcaaaaaagcaagtgcttttcccagaccatgaacacaatgtgtgacaaattagcagttcttccccttgccctaagatagtaaatatccacccaggccaacttgtgtctgtcagagaacaaagagtgggcttgtcacactgttttctcccaagagggtccatctgcctccgctcctttggtacacgctaggggacacacactgtccagcatattcttgcagagtcatatcttaccccacatcttatcacaaccctgctgaatgtcaggcactatcaagaaaatgttcactcatcttcttcccgttatgcccaatgtgtgaactgataacacatctaaattcaaagaaaatcaacagacatcacctcaatcaacctgaaaagtctggtgactcattcccacccttctcacggggctcctgctgggctgcctggttctccggaaccagcctccaggcctcctgcagccggggtgcagctcagtgttcgagccccctctctgctgcccatcagatgagtgttgactttctttggcacaggcatttgagttgcatttgaattgcagaacatgctgcccccattctgtgctgactgtgaccccacttcatgtgccccagaggcaggctaaacaagcttgccttggaaaaaataacagggaagaagatgctgactctccaacccccagagtaagttccgtcactctggaggtaaagtcataatatctaaatatggctcgattcatgtcaggtcttataaatacacacacacacgtggatgctgaaaccgtgcatgccctgacagccaaaaaaaaagtcaaaacgacttactgtctcattagcaggacaagacctgataggccagctcaccagaataaagaatacaaaaaatgggtatttaacttctctacacagacacacacacacacacacacacacacacacacacacacacacacacaatctgatgtaacgacctcaagagagctggttgccctggcaatgaagaatcgtttgtatattcaaggattttcttgtttaaatttaagctagccacttgaacttctcgagctttcttgagcttagcttcaggcctccatccccagacagaggtctgacatctatgtcagcctctagcaaggcaggaagcttagaagtcggaccaaaacctcacaagccagccagcctggatttgaatttcagctctatggtttctcagctgtgtgacctgggttagctgcttaaccaccttgaacctctatttcctcacctgtacaatgggaataataaaattaaaacaaacttgcatgggttcattatgaaaattagattgattgatgacataatacatagcaagcatttagagctgtgcctgattccgaatgtgagttatctgtaatagtgacttgaaatgggtttacactgcctggcaggaaaccattcaattcctttttgtttttgactttaatctttgaagcgctttcatctcatttcttcttattttgtgtttgtggagaaggaggatgtttagccatccttggagtacaatcttttattaaaaaccattattaagtctcttcaagtttctcttttgtagtaaa

SEQ ID NO: 713 - DNA, 2435 bp, Homo Sapiens
catgtaaaaacatgatgataaaacagcaaagcactgttgtgtgcttgagttgctggacagggatgactcagctaagaagacagcgagagaacctcttagaaatatgcttttattatctgcacacagagatatgactgcctccctctaaagcattactatttgggagagggagtcttggggggtgatgggaggtcctgagtcatagcttccacataccatatgggcaggaaggcgtaaggtgcatcttggtgtacagacacggtgactgggccgccaggctcccaagagaagagatgaacgagcctggggggcagatggaggcatcagttgagggccagaggctggatcctgggatccagaggggagggacagagctgaatgcctcacctggggtcatcctggacaaccgtgctctgggcaaagctaaggaaggcggcacagaagttcatgcacacagagggattccagccgtcacggtcattctggagcaggcagaggaggaggcagaagatgggcagtgggggtggtgggaggagagaaggcaggctgttgccctggatgctagacctgtggtcttggtgtttggggatacgggtgggagctgcaacatcgttcccttaccctgacatattcaaacatcttcatggtaggaaaggtcttgagggaagagacaaaaccgtctgggttacggaagccagcaacaacattcgggacccctgggaggaatgactgagcccaccatttcaggagcttgtgtctgacaggaaaagcaagggatcagtgggacccctcgtgcaccctccattctgccttcaccctcctccccaagtccctttcccagccttcaagcctaagctctcgccctgcccaccccgatcctgaacctgtagaaactcctccattggccagggctgtgcatctccttggaggtcttgagctccacatagcaggttgggggctgtgtggatggggcttgggggtctgtgcagtctacctcccctgagaagagcagagggtggcttcccaggcggctgcgtagcacagagcagaaggccacgttggtgttaacctccccagaggggtctggggagcttccaggtttgtctgcacaaggagagaagcagcagcaggcgtggcgggctctcaacctctgggaaggggaagggggctatgaagcaggggcaactcacctgcacacatgtactgctcaaatttgtatcccatgtacataagctcccggaggagcggtggccgagcaagcctctgggcccgagcgttcggtgtctccacttcactcaggtatagtgttccctggaaccgggaggctgccagctgccagccctcctgccgctcatacggtgtcgtcagcagttttgtcaggtgcccccgccacgtcactatggcctctgccagccagcctggacccctgagaggcaggagttacaggctgaaggtctgacacaagcattagtgagatgctcccctcgaagaatagtcttgtttcttctaaggactgattctcaccccggctttggctctcctaattttagagggtaggtacgggtctccagatatactgcctaccacgctttgctcacccctccaaccggcctcggtgttccaggagccagcacagcaggtggtccagcctttcctggacctcctcgtcccggggctggtatcgatccgggtatccgtctctgaggtcaaagttggggcctggaccgttagtggggggtgggctatagtagcgcagggctcgggcatctccatggtactggcgttgagcatccagggagaagcagcccagttccgaagggcgccggtagaaaggaaagggcccagagtagagggcagggtctgtgggcagagaaggtgctggacgaggtagtttgttccgaggctcagctacctctgtcttctcagctcctctcttggtccccctgggatccatgaggtcctaagacaagcaggggtacagagtttccattctacagaggaggcctggagaaggatgactggtttaggactaagcgagccacctgatcgccaggctctggccttgaaacattcaggcccctcagacgccaccgcggccaagctctcatcctgcctctttccttgcccttcacccaccctccctccaggtcctccaaatgcagtgaggttaggaaggacgtctgcgctcagatcaagaatccagttacctcaaagctccccaacttccacctccgcagagctatgacgtcatggcaggcacgccagaggccgaaggatgcaaaagtggttttctgctttcgatgatgcaatcattcagcgacagtggcgggcaaacccctcccggggcgggggaggtgtgagcttcacgaaggaggttgacaccaacgtggccaccggcgcccctccacgccgccaacgagtccccgggcgtgcgt

SEQ ID NO: 714 - DNA, 4136 bp, Homo Sapiens
ctccagagttctctccatggctcagcaaggcctgagggaagcccatccagacaccagcaggccatgactcttgggtccttccctgttaaagtgctggcccaaggcctggccccagctgaatgtggccacatgcagggctagaccctccccaagaccttgggaatccaggccgcctagatccccaggcagaaaagccagcgtcctgacatcttattcaaatctttcctgcggctgttctctcagcttctctctactatccccttagcttccatgcctgctgcccgcctcctctttctcgagtcctaacacatagtgggcacttgaagatcttcctcccaccctcccaccctcattaatctattttttacccgaatctgggatccctactcccgtccctttttacaacctaatctacctttttctgaaggaattattctggtcctgaccctcacccccatctctcaatagcctgccctcgccccctgtacgctagccggctctactctcccaccactgctcccctagatacccgaggcttcacccagttagcccgtgagctctaaggctgttctgatctcttcatctgtcccttcacctggcccctgtacccccttcccctttggaccccttgaaccctcccaggacccccgctcagccccttcccgcccccaaccgactcttcccgaacgtcccttaccaaccgcgagagccccctactgcgctttggccacaccccctacgcctcgctcccggccccgcctctgcccctgaccgcgcctgcgcaaggcgggcgccctaaagtcctatttcactctgttgggaggagggggaaaggtgtacgcaggcgcagtggcgtctaaatttgggcccactaaatgcgtcggagcatctccgcgcccaggcggctcctcctcactgcggcaacccgggaaaacttgtgaactaatcagaaaaagtggaaggcgggagatcttggggcgctgtccaatggcgcggaagagaacaaatgagctggccaatcgggaacggcacgggggcgggctcgctcggcgcgaagttcgggcccgggaattccgaaggaggggtaggcgctgcccgcgcgcagaggccgcgcccctcctggccccggcttcttggctgtcaaacagatgcagcaacgtcggctcctgccgaggagcccaaggggtcccgggatccgccgcacaggctggcactgcttgaagaggaggctactcggagactgcgccgcgcgggtagatccgaaacggggctggggcggagtgggaaaaggccgggtatgccttgcatgatcgcggggagctccttcctgtttttatcccacctagagaagccgggaagtaggggtttaggtccaatttgttggagtacttaaggactcgtttgcactttcttttgggggatgacagtggattcattgccctcggaggttcaaccagttatgagtgagggattggccagaagatcggggcgcaggcaagcaggagtgctctattaggataagcaagtttgacaggaagaagctgctcttctccgaattacacagaggtgatgtgttcgtattgcacgtagacgtgtgtataacaggacctccttccccgcgccccgccaccccgacacacacaggagctgcctaaagtatccttgccttgcagattggaggctccccaaatattttgtgatctgaggatccagctcaagtgaggtgccataggacgtgttcctgagtttgcattgcacggagaccttcctggaatttttcatttgcaagtcggcttaaccaattttgcattgagtcctaggctgcttgcactctgaatttgggctattcaggtagtgtgctcaaagttgaaaccgcatacagcacaactcaagtttgcatcagactgggaagcgaacttaagccagcggtgcgtggcccaggagtgggaaaggaaatggatgcctgaagtggaagaggtggtgcagagggggcaccgcccatgctgccctgcttccaactgctgcgcatagggggcggcaggggcggtgatctctacaccttccacccccccgccggggctggctgcacctatcgcttgggccacagggccgacctgtgtgatgtggccctgcggccccagcaggagcctggcctcatctctgggatccacgccgaactgcatgccgagccccggggtgatgactggagggtcagcctggaagaccacagcagccaaggtgagcattaagcagggcagctttgcccctgggtggttgaagcgccaggctggaatgagtaaggtctccacaagaccctgctgcctgcctcccatactcccatcagattggatggatagtcgtggtccagaccttcatcttcccaccagaagtgtgcacagtcagaagctctctgccagactgaccctttttggtcccgtttagctcatacaggacctgggatatcatcagaaagatatcacagtggggatgttctgaggccactagaggccaagtttagacttgattcagtttccagctttgctgaggcactctgttcctgggttagggcagttctatgttgaataatgtttttaataatctgggcatgtctttctccgtgacttgaggcagttagcctcagaaagcctagattcacatttgagttttgccactgcctcttggtaaagtcagctgtaggagtgttatggttattagactatagtagccaacattcatctagtgcttactgttatgagccaggccctattttaagtgtattgaatgtaggtggtactaatattatcctcatttacagtaaaggaaaatgaggcacaaagaggttaaggaacttgtccagggctgggcatggtggtttacacctataatccagcactttgggaggctaaggcagggtggatcacttgagctcaggagttcgagaccagcctgggcaacatggtgaaaacctgtctctaccaaaaaattaattaattttttaaaaaaagcctgggcgcggtggctcacgcctgtaatcccagcactttgggaggccgagatgggcagatcacgaggtcaggagttcgagaccatcctgaccaacatgttgaaaccccatctgtgctgaaaaaaaaatacaaaaattagccaggtgtggtggcgtgcacctgtaaccccagctactcaggaggctgaagcagcagaatcacttgaacccgggaggcggaggttgcagtgagctgagatcgcaccactgcactccagcttgggcgacagagcgagactccatctcaaacaaacaaacaaaccaaaagcttgcccagggtcacataactggtaagtggtagagctaggatctgaacgagctggagctgggggagagtgagcatgtttgaaaactggaccttagggcggggcacggtggctcacgcctgtaatcccagcactttgggaggctgaggcgggcagatcaggaggtcaggagtatgagaccagcctggccaacatggtaaaaccctgtctctgctaaaaataaaaaaattagccagacgtggtggcacatgcctgtaatcccagctactcaggaggctgaggcaggagaattgcttgaacctgggaggcggttcaagcttgggcaatagagcaaaactccatctcaaaaaaaaaaaaaagaaagaaaaaaaaagaagaaagaaagaaaattggaccttaggacagtgagggcagggatcctttgtaggaaagcacaagaaacacagacttgttcctagctgacaaggagtgtactgcctggtacctgtcacctgctgaggggcttaggatgtgagggagaatctgactacagtttcatattcttccccagaaatcatacagatttctccactcctgactctggtcatttctgtttttgtcctccatatttgcctggtgccccaccatcaacaggtactttggtcaataatgtccgactcccaagaggtcacaggctggaattgagtgatggagacctcctgacctttggccctgaagggcccccaggaaccagcccctcggagttctacttcatgttccaacaagtacgagtcaagcctcaggactttgctgccattaccatcccacggtctaggggagaagcccgg

SEQ ID NO: 715 - DNA, 2460 bp, Homo Sapiens
cgcgggaacctccggacccacagcggggcgcggccggggcaggtggggggcccaggcgaggaagccccctctgcgccctgggctgggcgaagggccctgcgatgcgacgggggcagccccagcgcgcgcccagtcctcacgtcgccaccgagcggcgcccccgccccagcccggagccccgcagggccgcccccacccctgcccaccctcccgcgggccggggcagccccccgccagccaccccgcgttcccaggaagagggaccggtcattactcattcatgtcctttcatttcatttcaatattttctgcaaagtcatcgcccgcgccgcatctgcgtggcggggggcggggtggggcggagccacgccgcggagtcgccgcaggtaaacagccccctccccgcggcgggagcggggccgccggccccaggcagggacagcagccgccgcccgcgctccgggccgggatcccgccgccgcccccgccggaggcacgcgccagggcgggggccgggctgcggcggaggcgggcggctccggtgccccccgccgccgccccggcccggcccgcccgccccctgaccccgggggcggcggcggagcgccccccaaaccccgctgcgggctccgcgcccggccagccccgcacccgccgcgcgcctccggctactcccatcccccggagccccccgctcggtcccggcgtcccctgccaccctctcccgcggcccgcggccccgtccccgtcccgcgcccccacgctccccgatccccgcccccgcgccgcgcgtcccctcccgcccgcgcccccctcgccgggccccgccccgcgccccccgccccgcccgcgccccccgccgggccgcgccccccgccccccatgcaccacctcctggagcagtcggcggacatggcgaccgcgctgctggcgggagagaagctgcgggagctgatcctgccgggcgcgcaggacgacaaggcgggcgcgctggccgcgctgcttctgcagctgaagctggagctgccgttcgaccgggtggtcaccatcggcaccgtgctggtgcccatcctgctggtcaccctggtcttcaccaagaacttcgcaggtgaggccggcggccggggcgcggggcgcgggcagagggggcgtccgcaggtgtccgggagctggcgcttcccgcgtccccggcggctccgtccagccgcgcccaccgtggcctggctgcgtccgcggcgtcccaggcaccttccacagccgcccccatcctagcaggtgtcgctggtcgcacagacccctcgtctctattttattgttgttcttccttccattcgtccgcccatggccgcgggtgggactaggcctgtctggacccaggggtcccaaatgtcatgagacacggggtctggtttggagaatgtcacaagcagcgcctgaggggatgcagggtggccaggtggggaccaggaaaggccgggatgggtgttgacagcagagagctgattacaggggctggtggagctgccgggcagggttcccaggctggacttgggtggaaggagggcagagagagtctctgagaggcccaggccctccacccctcaggcagggcgaggcctctccgggtgcactgggggcctccgaaggtttgaagcaggggggctagcatggggcagggccacgtgtcagagcagggagcctggagctcctgcagggagatgggggctggaccagggcagggacccgcgctggttagatcaggacctgtgggggcacttgaagccacccaggcgaggcaggaagatggacagagcagccagcctgcctgtgagcctctgcggggtggggtcctggtgcctctgccctccccaaggagtggggcgagacaggtggagccgagaacttcctcccctggggtctgggccaaggcaagggggatcagggtctcctggcctgtgtggcccagaggtactagtctgcagcggggaggggtgttgggaccctggggccctctcttctgcagcctccaaacctcagcagaccctgcctcagcactggcgcttcccaaatctcccagatgccttgccttaaggagtccccgtggcctggagacaccaggcctgagggtggacattggccaggctgtctgatcccacccaggggtggaggaggcctctgctggtctcctcttcgacactggaggccagaccccggggattagaggacccctggggtgggcacacagcacactctgcagagcagggagcccaggcgtgcggtggggccttggggcaggcccagcatgtccagacaccacgtgtgttctctgtgtttgtagcaaccaagtaccgcaaactaggcagtttcaaacagcagacatttatctctcatggttccggaggccaaaagtccaaaatcgaggtgtcggcagggccctgctccctcccacagctctaggaa

SEQ ID NO: 716 - DNA, 2474 bp, Homo Sapiens
catgggtcaggtgagcggggtctggccgagggcagccgggcagggggcagcagggtgcggcagcttgcccaccggaacctcccagggtgcacctcaggggggctgcctacctgaagggaagtgaggacgagggtgcccaaaggccgccccctccacccccacccccatccccatcccccgcctttcgggaccgtcacgccctggagtgagtgcagccggcttgttcctcaaagctccttgtctcggccgatcagctgggtgagccctggaactggaacctggactgcccagtgtgttgactttataactccgctggggtggactcccagcctggcacttagctgcctcttaattctgagcggcacccgtggatgcagccggctcctggctcagggatgtttacttacccttggtttgcctgaagaaagctgctgtttttaattttttttcctccaagcaagcccaaaacttccatgagcaaaagagtccaaagaggcaagaggacactggcgttttaattgctctctccctccctaacttccttcttccctctcctcctggctggccccatggattacctgggagataaactcacagtggcccagacccacatgacccagtggatgggcaccgtgaggaggtccttccaggaagccctcaatttggtgaccaccacggtgggccacgaacggacgagtgcagagtcggccagccggacccccttcaagcgtacttcctccttccgacacctggcttcccggagtcgggaatccttccgccgcttctctgctcgcagccaacagagattttcttcactgaggaaaaggcatacagattcggaaccgccagatattgtaagcttattatgttttaaaaaatattaaaacaacactgaaagctcctcccctccagtcctcccagggagggggtcccagacatcaaaccggggaagttacttcttccagaatagttgtcagtcaaagcccaggcacttcctgtcccctgtacctgggaaagaggcacgtagcaataattcctctctcctgaagtcagtcaggacatttttgctggagtcgacgtctgtgtggacagggccagcacgtgagttgggctgaatttgccagttgatttatgtttaagtgtgaacaccccaacccccgacacgaaagctcatccttctccctatttttagggtggattagtggcacctgcctcatctcctctcaccctcctaggaagcacaagtggcggtgtcatgtgcacgctgagttgtagcttttgtcgttccaccgagctttcattggattgccaaggaaagggtcttaggagaccgaggtgtggtgggcgagtttgcccgctggccgtgaaccttgggtttggtgtgagtgggccagggagggaggccttgatttcttactcaggcaggctcgggagggcttggattgggacagcagggtggaatgacagctaatgattaaaaccttggcctgtgtcctgctaggcgacagtgcagaaacaatcgtaaggtccttctgatgatttggagaggtgggactgggcccagaaagcgaaagtgcctactgtgggggaagcacagtgagtgagtggcagagccaggtcccgaaccccaggctctgacctccccattcacggctctttgcagtccagctcccagcagatgttctccccagaccctcccaattaattcagggctgcccaggtcactgaccagacctgagcctaaagagagggcctgccattttcacataggagacttctgccacctgactgtgttggcccagtttatgggagcacttgaggacaggcgaagggctaagccagcccctttttctgggttcctcctagccaggagtgctatagtcattaagggacccagcatttagggaggagccctgagctggccctccctacactcgaggtggcagggctcacagctgccctgccaggtgcaggggctcagtatcccctctgctgacccagaggtgtgactcaccccaggtcacgcagcagccagagcaggcagttgcaaatgcaaggcaggagccgagcacttgggcatgacacgtgtctcgttcacaggacgtctccttcacagtgggtctgtgcttctttgtggcccagaacaaattagtggggcttggatttatgagacagattccccaacctctggaaggtgtgacttgccacagggaaagaaggcccctcattcattctgtctccctctgtgtgtatctctgtctctgtgatgtgtctttctgccttgctctgtctctgtttgtttctctgtcactcctgttctctctcagggtatggggttggtgacaggcaggctctgttggcatccctctttccccaccctggggagtggtgtgaccatgggcattggcatgaatcccctaggcgtcttaccctgtgttacaggttggtgccactggcaggagtggcctctccag

SEQ ID NO: 717 - DNA, 2827 bp, Homo Sapiens
tcggggtcccgccccgcccaggtccgcacgcggggtccccgggaaccgccgcctttcttcctcgctcccgcgctcgcgcttcccctcccggggccccggcccacccacccctggtgcggccccgccggactcaggagccccggccgcccgggctgcggggagggggcgccccgggccggccctagaagttactttgcaaagaggcagggggcgcggggccgcgcggggcgagctcgggatccgcggggaagaagccctccgggaccgcgcctcggccgcccgagccccccgcgcccgccgccccccacctcggtcgggggcttacctgggagcccgctgcccccggccagccgcccgcgtgtgcccagggccagcagcacgcacaagtgccagcgcacggccgccgcgcccatgctcaatgcgggccccgctgggcgtgcgggcgtgcggggcgcggggacccgaccgaccggccgctcccgcaggcgctgctcgctgctcgccgctccgccaccgctcgggctcccgagccgcccagccagcccggctgatgagctgacagcgcgcgctcattggcccgtggcgtcggaggggcggggcgtcgcccagggccggccaatgggcgccggcctccggccctccgaggaagaggggggctcgggcgtcgtcggggggacccttcccctggggcgggcggcaggtggggggtgtgggcctggccggccggctcgctaggcgcggggtctaggccaggctggggctgcttggaggctgcgccctcccctgcccgcggcgccccggcccccgccgtcgagagtggacgcccctctggggtaacccctcccggcccagaggcagcctcgggggcggggatcctgcgaaccggggatcccgtgaggtcgcccgccatccgtgggcagtgaaacgcgccagcgcgcagagcagactcgcctgcgctgccgtttgctggacgtttcttgagcacctactggggaccgagtgcgggcgaggcagcagcgaaggaaccgggaggggaaacctcgtgaagatcacttgaaaattgacgttcaaaacaaacgaactttttagcactcgtcaaaggacagtggcccgtcagtgtgcttgtcacggggcggccgcaggacctgcgtctggaaccgggcgggcgcccgggacggacaatgccgcttggcggtcggtcccgcgggaggcccccgcacggggctaacctcggccggcgaagttcgctgcccggaatgcgaggccgaggcctccccctgtgacagaccgggcggggccaggaggaggggcagggcgggcatcccggtccgaagacccaggaactgctctggcctggcctggggtctacacctgacgcctggcgagggttggcttcgggtctggtcccaccgggcctgggagggacgggcggctggaaataaatggcccctctcagttccaggcaggacgctttaagggacgaaagttcagcaaaccccaaggcccatctccttgacaaccaccaataagagctccttttttcttctcctgctctccaggcccaactcaaagacaactcttttctctttttgtccactctgcctgcaccagtttgagcccctccacaccagctccctttcctgcccccaacacacacacgcacacacacacacacacacacacacacacacacacacacagtcacacatgcagacacatgctctcacgtgcaatcactcagacacagcctcacaccctcacaccctccagcacacacacgctcacacatgcttcttcacgccctcatccaacctaccgtagacgagctcctcagccctggaaggttaaatctgtgtccagccagctctcacaccccatctgacttcacatcagcttgtggcacgggcctggtggctgaggcaaggggtcccctacatggggatcgggggtgtggggggtccagagatgcccaaagaagaaggaagcgctgcctgttgtctccactgagcccccaccccattgctccagacatttcggtctgcacggctgctcctggctgctggtttaatttgggagatgctgttgacaggctttattttgtccccgtcaattgtgtagctttgagtttctgcagggggtggggagttccctcagaaccacatattatcttgtgcattgggcaacagggcaagcagtgtgaggtggtgggggaggttcttccagggggctctgacctacttgaaacaatgccctctaatgtgcctggtcattaggcacccccccgcccagccctagccaggtgcccctcaagcttgatggcagcaagagaagcttcttccaggctccatccccacaaatcaaggcaggaatggaggcaggttactctgtgacccctcagcccagaggtagctgtcccttgtaccaagttgtagtccccagcctgcccccaagcgattgctcaggtcaagtttgctggtgaattatcaccctctaaggtgtgcaggcagagagaaagtggttccttctaggcagctgttgtctatgtggaggactcagcgagcagaggaggagggaaatggagagaagacacacctgtaagcccctcacaggtgaaggaaaggaggcggcctgtggagcagagaaagaggaggtcacttctgccccagggcgccgtcagggaggcctcttaggacaggtgacctgggctagacacagaacataaagaggatatttgcctaatggatgagaagaacaaatagagaatctgccaaggtccatgagtgaaggcgaggactgaataagtgagccagagaatgttctggaagca

SEQ ID NO: 718 - DNA, 2265 bp, Homo Sapiens
gctagtgggccacccttgcccatcatgcagcatggcatccatctgctcagcaccctacacaacaccggaggtaggggagcccaccacagaacccctcaccaagaaggtcctcaccatggagaaactgaggcactggaggcggggcctctgcagtcacgctgggtcacgtgctccagtcagccaagctgcagcggccaccaagggtgcccagggtctggcctgttggtcacagtgttgacctcatggcctgaaatgggtcttccctgcccagacaggttccagcccaccatcatctatctgcctcagccctggtgggtagggagtggctgggagaccctgcccctcacaccctgggctttgcggtattcaacgagcccccaacacacattccagggcctctgctccagattaggccacagcctgtctaggcacacaaggggcacccacaccctggaggcaaagagacatgcctatgtgcccgcaggcacacatgatcacgcgcacagacacacgtgcagatgcataccaagttacacacacgcacacaagcccgaggcggggacccccaggacacggaggcaggcaggcagaggtggggcccaggatgtcttgcccctgtctgtgggcctggcctccccactcaacagacgagcatgtgggtgcgggagtggttattgcgaaaggggccccagcatgtgccacccgtggagaccacagcaggcatgccgcgtgcatgcatgtgtggccgtgggtgtgcaggcgggggcgaggacacagatatgcaccctcagagtccgtgtgtgcacccagtgtttgtgcatgtgcacactggggcggcgttggcttgcatgtgcaccagaggtgtgcaagtgtgcagtccgtgtagacaagtgcacgtgcaaggaaacgtgtgtgcagcctgcggcaccatggacatcagcagggcagcctgggtgggcacctggggagcaccctccaggcggggcatgcccaactcacatggagcccaccctcccttgcccgcaccgcgggacctcacagccggtggggcgggggagtcccacgagggctgctagggaggggttgctgattgccccaccgcccctgattcccccagccaagcctctcaatgtccctcgggctgcagatggtgggcgttgctgcctcctctcaccgcccgccctggaggcagcgctgggacaaccctgtcccccacgccctctactgccgccaacgcccccattcatcccactgtggactgacctcggagaaacgggaggttctgagcccagaccgtgaggctggggtggaggcggcccgacacccccacccaccctcggtacccacgtttctgcaaaaacccgctcgttaaccccttggtggccggggcgctccgaggccgggccccgcccttccagcccacggcccccgccctcgacttggcccagcatcggggaccctcggaccgccaccctcggccctgccgaagccgtcaactttcccgggaagcggcaacttttcctgccgcctccggctccgccctcccggggccggggcgccagcggccccagcctggcgcggcactgcggtggctttccctgccgcccggctacgcttccctcgcctcggcagcccgggacgggccctgcggctccggggagggggcgagccgcccccctccgcgccccgccgccggccgggctcgggtgcagcgcggacactcacctccagcggacgccctcttcatcgtaggggttgggcggggcgcgtcggggactgaaagtcgtttcggggcgggcgcccgtctccccgcggccgggtccgcatccaggcgccgccgctacggcccggccccggcccggccgcgggacgaggctcggcgcgctccgctccgcccggctctggctgggctcgggccgcgggtgcgcagggcgcgcagggcgcacagggcgagggcggcggcggcgcgggggttggggcgtgggcggcgcggcgggccggggcgcgcaggccgggccgcaggaggcgctcagcccgcccggtgcaccggcgccgcgcggtcccagacaaaggcggcgcattcctgaagaggcggcggcccctgcaggcggcggaggggatggcggcccgggccggagccggccggggacgcgggcccgagggtgtggcggcctaggctggcccggtccccaagcgggcaagggctttgtcccgaggcctaggaatggcctctgcctgacccactcccttcctggcctcacgaaa

SEQ ID NO: 719 - DNA, 2459 bp, Homo Sapiens
ggcacctcccaggcctaccaagaccagctctctgtgcactgtgtctcctgactacaccttgggcccctgcaacgtggccagcatctcctggcaccccctcacccactatgttcttggcaagcagctgaactgcaaggcctccagggccctggcccgtgacagggccggagcacccagctgccctgctggcatacccattgtctgcagtgaagatgaccagcgtctcttcaagcagccccaggtcccctatggctgtcatcagggtccccacagctgcatccagctccatcagggagtccccaaatggcccgcggcctgaacgctctgcaaagctctgcccactgaactgagggtagtgggtgtgctgggggcaaagactggagttagcactgggtaggggtcacgggcagccagggggttgggccaagatcacttacgtgagaggcatagtacaggaagaaggggcgatcctggcgctgggcgtcggccatgaggtcatgggcgaaagccatgtagcgggcctctagtccgggcagccaggggggctgcgcctccacggacaggttggccaacagtgggatggggaccaggccctggtcacagccaccgtcgcaaggagtggccggcgggaagcaggtcaggttctggcaggggccctgaggcgggcagctgccgtgagggctgggctggcaggtggggctgcgggagcatcaagggctgggggactttgggaggtgggagggtggctgagggcccgggtggttcctacctggtcgtgggagtacgggatgcctagaaatcgatggaagccctgatgggggggcaggaaggccccctcaggccccaccccaaggtgccacttgccggccattcctgtgaggtagcctcgggcagccaggacttcggccacggtcacctcctccaggggcaggcccccccgggagctgggcaccaggacgccagggtacatgcccatccgaaccgggagccggccggtcaggagggcggccctgcgggacaagtcacagagtccctgagacagacagaaatgtggccttccctagagagagagacagacgtttttcccgcccccctgcaatccattgggaggaaagggatggagggtcggggcggggaagaggcgcggccccctctttacctagagggtgtgcacagagacacaggcacgtagaagtctgtgaaccgcagccctcccgccgccagctggtccaggttgggagtggtagagctggggtgcccatagcagcccaggtccccatagccgaggtcgtcggcaaagatcagcacgatgttgggcggacgggcaacggccaggccagcagccagggccaggaggagggaccgcggtgcccccatggacatgggaccgaggggtctgtcccaagagagggagggctacttggctccagcaggctctttccgataccgcagacccaggcgccgcccttccctgagaccccggacccaaatactccccgaccctgacggccgcctcctgaagctccagagggccggggcccgacagtaccgggagaccgcgggctgggacggaactcctccaggaccagggcaccttcagattctcgagcggagatctgatcctcctcgcctagcggtccgggctcagggtcgggggcgtaagtcacttggcgctgaccagcggagtcgggccggggggaaggcgctagagggagcccaggaggagccggtaccgggctgcgggcgcttccgcctcggccccgccccgtgacctgtgacccttgcggggcggggccgggggcggggccgggggcggggccgggggcgggccggggcgaggggcgttgctgcgcgtgctcgctccgaggccgccgtgtgcgcctgaggctgttggctgcggtcttgaaacgggctctgggagcttcctctgcgcggtcggccctggctgaggcgtcccgggctgcgcgcggggctcggcgctgcgcagtgtccggtgtcctctcggtccggagcttctccagaggaggagcggctcgtgcgcccccagacctccggtactgggagactcgggccctcctgtaagagacctgagcgcggagcgttatgggcacccggtgaatgagcaaatggcagggaaaaccgtgcagccccatggactgcgggctcttccttcacgactagcaaaagctttgacaccctttctcctgcgtacgcgtgtctgtgtgcgtgtaagctgtggctgggtgcggggggctgtgtacgtgtctgtgtgtggtgtgtgtggagtgtttgaggcaggtgtgtggtgtttcaggtgtgtgtgcatgtgtggtgtttgaggtgtgtgtgtgtgtttttgtagtgtttgagggatatgtgtgtgtggtgtttgaggtgggtgtgtggtgtttgaggggtgtgtgtgtgtggttgaggggtgtgtttggtgtttgaggggt

SEQ ID NO: 720 - DNA, 2731 bp, Homo Sapiens; identical to SEQ ID NO: 429

SEQ ID NO: 721 - DNA, 2499 bp, Homo Sapiens
ggggcccggggccagtggggagagccaaggtcacatgggctccggatgcggtgaggggtgagggaaggagggcacctttcagtcaagatgaaatcaccatccttgagcgtcggcagtttccccaggctgttgatctgcaagaactccttgctcttgtgctgccctgaagaggaagaagtcagaaaaggtcttcagaataaaaacgctgcacctctacaccctccctcctcctccccaagcggagccccacagccctgagaaacagcaaggtctgggactagaggcctggatcagcctcactccctggctgggcctccctgccctgccacattccggggcagctggggggttttggtgggtggggccaggtgcagcaggtggataaagagaagttttctagccggactctggtgggccaggggaggggaggcaaactggggtggctcatctcttcccatctcttaattctcacaacagtatgtccttcttcccgaggtcttctgggctttgtgaatttatatgcgtgcattccacgcaagaactctgtcaactccattcagtattttctttccatccctacagagcagaaggtaacgttatcctccttttcagaaggcaagctaaggttcagagaggctgtgatcccttcaaggccactcagtccacagcattctctggtggcagacgctgcaggaggaggtgagggggctgtgcgggcggcgagacgctcagggcagagcagggcgggggcctgggggtgcactgggtttgtggacacgcggggaaacgggctgggcccacctttgaccaaatccacggtgcgcagctctaaggggatgccattcttcttggcgaagatgtagacggcgcggctgggctgggacaccaggtcaagaaacagctctaggcccatggcgggggcggcaaggacagcggggatggcagtgaaggcgctgagcgcggtgtgggcagcagctgtggcaggatcccggcgcgccgggaaataggggatcaggccccaccccctggggacagcacccaattggagcgcaccacccccggacccgcctcgccccttcggttcctgtccagtcctgccggccaagactccaccaccagatccgtgcgtccctacagggagggcggtcgctatgaacgcacagctgggagggtggagttggagctggggaccctcgactggcagggaggacgcggatgcagggggccgactgcaaggggaaggggaaccggctggacagggagaagcaggtctgcttttcgggatcccggtgccagggaccctgcccagttccaggcgtcgccctgacccagaaacgactgggcgccgccgtcctggaaaggccccagcgcacggacatctgagggttcgttcagagctctgtttctcggcgctgcatggtggcggaagggagggagcgaatgggatcccctaaaagggatcttagagtttcacccagtgggatgtgacacttgcaggtgtcccaaactggtgggaaccttgactggaaggctggggttaaggatgaactttctgccgtccagactgtcccctgcagagcagctgctgccagacagcgggagctgccagacagcgggagctcccacttcgtgcacaggatgggggcagggagcccgcagccgcgggaggcaggaatgactgtccgggaacctcctttcttctccctgaatcccagccctggcatctcaccagggggcacagtgatggtccagggctgggcccgggactctagctgaatctttcagagtatcccatccctctggccagtggcccaagcgagtgaaccagaatgcttccttgggagttttgaaactggaactggagagaggagctccctatggggaggtaaacgggagctggggccacctgtagtgacatttcctgagttcgaggagtagacgagactgagagagaaaagctgactcagagaaagggagtgataacagggcatgctggcccacacctgcaatcccagttactctcacgggatctgtttctctgatgtctgggtatgaaaggactttctaagcctcagaacagtgggagaactcaacaaagaaaaaaccaatacatatacaaggttactttgtggaggaaaaaatggattaaccttaagcaaaaaactgggaaggatctcggtaaaagatacgtcagaaggaagtaatgtcctttaagatgttcttagaaacccatcagacaggtggggtgtggtggttcacgcctgtaatccctgtactttgggaggcagagatgggcggatcagttgaggtcaggagtttgagaccagcctgggcaacacggtgaagccccgtctctactaaaaatacaaaaattagctgggtgcggtggcacactcgggaggctgagacaggagaatcacttgaaccttggaggcagaggtttcagtgagctgagatcataccactgcactccagccgggccactgagcgagactgtct

SEQ ID NO: 722 - DNA, 2299 bp, Homo Sapiens
ttttctccaaaaagtaccaaggtcattcatttaataaacaggaagaaatcccaaagtgaaaacacagaggggtcagggattccctcatcaagagttcaagactaggctgggctcagtggtgcatgcctgtaatcccagcactttgggaggccgaggcaggtggatcacaatggaaggggttcgagaccagcccctactaaaatacaaaaattaggtgtggtggtgcgcacctgtaatcccagctacttgggaggctgaggcaggagaattgcttgaaccctggaggtggaggttgcagtgagctgagattgcaccattgcactccagtctggatgacagagtgagattttgtctcaaaaaaaaaaaaaagagtttaacactaattttttgaaagttagaggaagcagaatgcaccgcaagtaataaggagaaacaagattgattccagcgccgcacaaagggaaaccaccaattctgaaagtaaatcatgtgaagggttttttgtgggttttttttatactttaagttctagggtacatgtgcacaatgtgcaggtttgatacataggtatacctgtgccatgttggtttgctgcacccatcaacacatcatttacattaggtatttctcctaatgctatccctcccccagccccgacccccccgacaggccctggtgtgtgatgttccccttgaagggtttttttaaagaccaggtcaaagctaaagatcaagcttttctttccaaacgctttagctaaaagtaggagctaattttcacatctccgaaggtggctccaggactccaagtcacaccttggcaagggtgtggcagctggcagaggactgcaggtccttgtcaggcagaacctgccgggttctggggagtggagactcagatcttgaggtggaagcagagacaagagctgggcacacttacctggatgtggggttgggagcggtgaatcagagcccagttagatcctggaggctggcagcaggctctgcagaggtgcaggggcacctcattcagaaggggccatttattggccctctgtggctaaaaccagctccaagcaggactttttatggctggagtcgcctccaaaggggcgtcggcctccactcaggtgtgactctgagcgttgcctagctgaaaaggcgtgatgatagggagcacacgtgaggccattcgggaagaatattttgccaagtgcagaggccgtaaaaacgtggaacatggctctgttttttatgctctattgaaaatgatcatcagaagcagaaactgggcttgtgttcagaacctgaaaatctgcagggcagaaaaacaggacaaaggcatcttttagtgactgcaaaactaaacctcaacagaaagatgcctgaagagacaggtggattatgacctcagaattggagacaggagaggttttcagaattaaagatcatctatggctacacaaacatttgagaggtattttcattaaaacatccctttcttcacaccaatatcatgaattatatgctatgcacaacctataacagagtatagcagagttaccagtggtttaaagtgctgcatatatgattgttatatgaggtaaataagattctctgacccagagttaagaaaatggaaataataattgctaaggcatattaagaattatatatgtatgtgtgtgtgtatatatatatatatatatatatatatatatatatatatatatatataacatttaatccctacagcaatacatacctataaatgagtatatacaaatatgtgtgtgtatgtgtgtgtgtgtatatatactcatttaatccttgcagcaatcttataaggtagggactattgcaatccccacttgagagaggcgtaccctgaagcacctggcagtaaggtaacttgcccaaggtcacacagctagtaacaagcatagcacggccttgcaggcccaggtgggttccaccacaccgctttccctggcagcaagaaaatggaaggtttttgaagtagtgggggagtcaccgggcacaaggaagcagatccctggaggaacacacaattagcaaaagtggagcccaggaatagacgttaccaggcataagtgatttttccagacactgggaacttgtgttttgaaacaccaaagtatttttaggaagcagaaaagttagctctttcattgaactgctatgtggttttgaagaaaatgtcctaatatccataaaactcaaagctttaatctgcaagaaggaaaaaatgtcatgtgcctcctactaagttttttttt

SEQ ID NO: 723 - DNA, 2270 bp, Homo Sapiens
gctatactctatgttctctgagagtgctaccaacggaattgagaaaataaccatccagacgggctatttgggggctgatctttaccctggaatcttcctggaaggtgaacggcctatgtcatgcagttgttatgcaagaggtatcatgggacctttccttctgggcgctcatggagccgcggcagagccctgggtgacccagcagcagctgcctgctgtgtggctgccttcactgtcctcccccacaactgctgttgatttctctgcattgaccctgcagatgtttccctggcctcgtggtgttcctttggacttttaagggacctctgtgcatctattttagtcccctttctgctagcaatgctcactcccctagtttccttaagcagttttataaaaaaccttcagtgaaaaatactagccaagaaggcgaaggcatctggaaaatccccagatttggctattgtgtgctgcaatcccagcccccttctacagccatgacatgcatatcaatgcaggtgcccttgagactcctgcaggttcgagaaagcatgacatgctcccagaatcctggatttggacttcattctggacagcatatgacaaggacgaggacccctattctagccagttaaagctggacagaatttttaaaagcaatgaagccagttccttggatatatccacgggctttgctttgagaaggaactgagtaggcagtgagaagagtcgagtgaagcctggcccgtgagtgcctcaacaactgagatgaacgtcgactcgcttgcaggcaagttgtcagtaagtatttattaaatacccaccgtgagccttgtactttgcctagttactaagaaaccaaaagggggaaaaatagcctcatctgctcagagttcataataaacctgtattgtgaatacagaatacagaaaaactggactctagtgaggtgctagaaagagtgtactgcttagctgagatagcagatgaaggaaaaatatttttggttcctccctgccatgcaatcgtaccgggagggtggagtgttggtgttctcagcccatttaatttggatggagctgcgggctcatcagtttggggactggcttcatcgcttgttctgtccagcagtcgcgtcttctcggactccttgttccagcttgaattcctcttttgccctggctccactctaagacgaagactgtgtaattcagaaaatgcagcgcaagtaattatgtccagtgtgatgctaaacatttcccaaaggcagcgtagatctgcagaaactgcagcttgggagaagtgatggtgttcctctccccaccacctcagcctgccctgatcattctcactcacatgatctattgtgatgttctcacaatgtagcctggccatcatctgggaacttgctggaaatgcagattttggcatcccgcctaagaccttaaactgaagaaggtcctagctctctcttgtaactagcaacagatgcaacctgcatggttctgatgcaaactgacctggaagaatggccctggcatttacattttggtccttagatgcaggtaatctgagctgaacatcttcaaacctgaggcatagcatagaaaaaagaatacaaacagtttatataaagtaaaaaaattttttagaaaggacttaagttggctggggcgcggtggctcacacctgtaatcccagcactttgggaggccaaggcgggcggatcacgaggtcaagagatggagaccatcctggctaatgtgaaaccccatctatactaaaaatacaaaaaattagccaggcgtggtagcaggtgtggtagtcccagctactcgggaggctgaggcaggaaactcacttgaacctgggagatggacgttgtagtgagccaagattgagccagtgcactccagcctgggggacagagcaagactctgtctccaaaaaaaaaaaaaaaaaaaaaaatcaggcctaggcaacataatgaggccccacctctacaaaaaaataattgttttaattagccaggttgatggtgtgcacctgtgatcccagctactcaggagggtgaggtgggtggatcgcttgagcccaggagccctcccttgggatgctcttatttctgcctgcagcctcatttgtcactctgtgcagactcattctgtttttgttttgttttgttttgttttgtttttgagacagtcttgctctgtcacccaggctggagtacagtggcacaatctcggttcactgtaaactccgccccc

SEQ ID NO: 724 - DNA, 2471 bp, Homo Sapiens
caggctgtgggggtggcctctgtgtggtgccaagaggaagccgggaagccaagctcccatgctccatgcatgttgtgtttcaggctctgatgctggtttacacacaggtggacatctctgagttatctaagataaagcccaaagaggaaatagcttcagtggctggggtaagatccagacggattccttccctgggtctcgtctcacctgccatatcacaaggccccaggcagacctgtggccaccctccctggcactcaggcacaacagctgcctggctgtgggacccccaggtttagcgagtcccctcctgtgtctgctggctcttctggccatgggcaggactcctgtggtgcagggagggatacgccagagccttcagcatctcaccctcaagagagggacagagaaccatccagaggggctggggacgccaaaggggcacatgaagatctcaacttccagtttttcagggctgcagtccagaggcagtctgtcccttctttaaaaccaaatctaaacttaactgcacttagaagcccctgcactgggaggcgtttgctcaggatgccccagcctggccctgctcccctagacagccagggattcaggccacaactggttaactcagcgggcgaattcgagcccgcagcagtgctggctgactgtcttcactcagcgctgtaatcggcacatctgcagacaggaaatcctcctcactgaagttcccagtctattatctgagacacctggtgtgggcgggtgattcagagacaaacaatgagcgggggccccctgcacagcaattaactgctttaactgctaatatgtttaatccaccacgtggagatcaaggctgcgtcgaggaaggggctctggtcctcctctgcttccagactgcagggcccacttcgcaatgccaatgtccatggtcctcgccagctgcggccaggcgccaggcacacgggcaacgggcagggccagcactcggccccacacgggagctctgtgcagcacctgggccccttctgtgtgtgtgtgcaccgggcacggaggcatccccccttcctgtcggagcccagcttgtgcggacgtagtgcacacccggtacaggaagcagagtcggagatgttggcattgccagctgtgccgcccctagggcgctttattttaacctcccagagtggatcatcctttattgcaagtagaaataaagcttggttaaaggcttatcgtacaaaccagcagaaaacgctcgcagttgctgacctgggaagtggctcctgaatgtttacaaaacctggctctgagcagcagcgaagtcagcacatgcccgagcggcccccagcaggcgcgcagaagccgcgccgccctcgggaagcagggtcagaggccaaggactgtgaaaagcttccacccccagcatcaatcatgccaggcagactgtctgggggatgctcattttgaaagtacaaaaaaataaaacagactcctagcaagggaggatgggcgtgcaggccacggcagctctgctgagtagggaggggcctcgcttgttgcctgccaggctgacgccccggctttccggggacacagcccccggcccattggtctgctacatccctatgggcttggtcgagggctgcccctcggttcaatggcaacagctcccttatgctgtgggtgaacggaggtgtcagcagacagaggaggagggctagggcgcggtgggagggagaaactcgccacctcccctttagagtggagtttatttgggaatgacagtaggaggataaattttgaaagaaaaataaagtggagtttaggatgagaaccatcagtacactccagagtccaaaatgttacctaatccttcgtagtgtttatcataataaacttacttaaaatctacttttacaacgtggctgagaacattgctcttgctgactgatcacctccgggccaagagccctgcgtgcgctcaggcatctcaggtcctccccggtcatcacctctgcgcttgtgtccactgcacaaaagtgaagcctcagccgctccaggctggtttcctttctgatttcccattccgagtgactgcttcagaagtgcatcaccctatgacacagcttgtgcctctgggagccctcccccaggagacactgacccctggccagccccacgcaagcccggttagctgatggaggtggaggcaggtgatctgagagggaccctggctctgatcttgggctctcgcaggggacaacggaccaggctcagcacagaaaggcctcggagaactaacaacactgactaggttgctcccgccttcaacatgcaagttgacagggtgattgggaaaactaggagcctaaactagacggccaggcaccgaggtgggtaggacatctgagcaggcatgctgtgtgtgccgccacccaccctgacgaggacccgcagccctccttgcggcg

SEQ ID NO: 725 - DNA, 2343 bp, Homo Sapiens
ttgtccgtacaagttcatgaggtgtgggtgggctcctgggagcgtgtcctcagggtcaagggtgggttttccatggcactgaccacccacccctacccacggcttctcactgccctcagaataaagctctctcgccgcagcccacctggcactgcatccttgattcctgccgcctgcgcgggcctcctcctctgctgatttcactcgctcctctgtgccccaggcgtacccagcctcatgtattcattcacttattcctgcaggttggggtataggggctgaagactggacaggggagtttgagccccagctctacccctgccgtgcactgaacttaaacttcggttttctccttcagtagattgtacacacctgactgcctggcctgggggttcttgcgaaggttaaaggagtgaatgctcatcagtgtgccccctgccacacacctccccagcaccgagccttactgctccagcctggaacccgtccactgctctccatccacaggctcccgtctgagccaggccactgaaggggttcaggacacgccaccccagaatacaccactctggcatattgatttctctgcactaaaggcacttcagaaacagcaggtgcagaaagggggctctgacctccccttttcttcctgaaagcaggagctaaaacgccttgtgaaagacgccctccctatgccaggaggaggaaagacattaccagataaggagagtcgaggccaaaagaaatctgtatgaacagatcttttaatccttatcttcctagttacacaattgccattctatgttcaacctggtacaaaagcctttatgcctagtcacttctttgggtcttggtcatttgggcgggaggcgggggggctcccttgtacatgtaaatgaaatctgtatgtttttctcctgctgatctgccttatgtcagtttaattcttcagcccagccagagaccctaagacagtaaagaagggtttttcctcctccaccccaccatcaccttgtactcccctgcttccaccctcgccccctactcagcagagagagtgagtccattacaaacataagtcatcccagctgcctccttgagaacctcctatggccacctgttcttcgtcaaataaaatccacagtcccgaccgcggcctagggaccccatgtaacgagcctcagcctgcgcttccgccactcggccctcttctcgttctaaagcaccagggcctccatctgaaactcaccggtgccgcgagtccctagcaggccactccgggtccccctcttcaccttcagcctggttaggcatcccctgctctggcagccttctccagagccctccccttctccaacactccctccttcaggattccttatctgtaatgcaatgattttttaatttgcttttattttatcaaagtactgtttgcaagtaaatttagaaaccagtagaatagtccccgctttatgccccttatgcctcggtgcatacatcccaataccctgagtggatgcctgaatccgtggattatagtgaacctgtatatatatgctattattttttcctgtatgatgttttacatacccatggtaattttttttttaaaagaaacagggtctccctatgttggccaagctagcctcaaactccaggcctcaagcaatcctcccacctcagcttctcaaagtactgggattataggcatgagccacctcgcccagcctgataatttttttcttttttttgagacggagtctcgcgctgttgcccggactggaatgcagtggtgcgatcttggctcactgcaacctccacctcccaggttcaagcgattctcctgcctcagcctcccgagtagcagggattacaggctgataacttttttttaaataaaagatctcacctatgtattactgaacccagcctactagtgcagagcatatgaacaaagagaaaaagtaccttcccaatcaaacatgtccagctgtccagatagtggtgacattttcagcttgctatggtaatatgatcacaaccttgatacaacatgaatatgtgtagcatctcatgctcaattccttatagacccagcttggttctttccaatatctccttttggagctgtacctgatgttattaccagttttcatacagatccactggggaatgggacaattttgcttttgtttcttgtgcaggaatcacttgatcctgaaagtcttgtgagaagctgtggcgagaaacggagtcaaccacacaccacgatggtggagaaagataatgtttaacttataaattaggcacagttaagagacgaacagcaataattaataatac

SEQ ID NO: 726 - DNA, 2399 bp, Homo Sapiens
ccgcaggacacacaggcggtcaggctgagctcccaggaggtgaaatggccctgcttacactggccatggcctccctccttcctgccttgccagcccctcgccggcctggggtccccacacatgtctgctggcacagccctgtcccctctgaactccctttttcttcctttctgttgactcagtgcccccttccgcctgggccgtgcaaggaccctgggctctgtcctctcacctcctcccggtctgtctctagctcccatggtgatgtctttgttgggtggaagccagccttctggggtgaacctaggtccttgctgccccagtgtctggttactctttgctggacacatccacctacattttcctgggacatccttccccccacttctggtccctgaagctggggaaacacctttcctggcaggtgaggcctgagtgatttagacccgagcagctctggacattacactcctccagccacacagagatggacgtgaggactgggtacacagaggggacacacggaaatgttggccagggccctggctttccctctgaacttgtcactgagaggacagaaagtctctggctcctgctaccatcttgtcagtagagggcacccagacaccctacactggaagctggaaagacagcgtgtgtgcctccatcaagccatacctgaagcctggtctgcacttggacttgtcacttctgtgggttgacaaaggcccttttgcctcagtgagttctcaattgcacctgtacgagtatcagttagtataggccacctaaaccacagacttgcaggctgggaaggaggcttacctcctccacctgccttccagaagtacctccccagctgaggcacagctccagggaagggccggtggggatagaccatgggtcaggactgccttgggtcaggacctgggatcttgctgcagctctgctgacctgtagagaaatgcctggcctgtgcaggctcccagcaaccatgctgcagaagtgggtctggcccatcttgaagactctcttctgctgtggcatttcctggtgctggaggaatgagtgtcagctggtgctctctgtctggtctgaaaggttgatatgaattgtgcacttgattttggcagttgactgtgctgattctccagccctaattataatgagcatgagcatgaatgtcttgaaatatagacgcatacgagctgccaaatacggtgagtcatcatattcccaactttcaggcaagcttaggtgccaggggaagcgacctatacatcaaagagatgaagtcctggtttctgcgggcgggggcggggagagggctggggagctgttggctctggggtgggagcgcatattcctgtctgtcagatcagaggatgcctgagaggtgacagagatggggctttttagtcctgtgaaattcgagataggcctgacaaatcatcttaataaaaagttctctgaagagaataattgggggaattgggtggagtcctggcagctcccacaggttggcaggtgccgagggacaggcgacactaccaccccacggggagtgcaggcacgtgtgcgtgagcgtgaacacgtgtgtaaatgtgtgtgtagttagtgtgtgcatgtgagtgtgcatgttgtgaggatgtgtgtgtgaagggtgtttgtatgtgaacgtgtgtgtgttagtgtgtgcatgtgagcttgtgtgttgggtgtgtgtggagggtatataagtgtgtgttagtgtaagcatgcatgttgtgggggtgtgtgtgtgggtggagggtgtacaagcctgcatgaatgtgtatgtgaacatgttagtgtgtgcatgtgtgtgtgttgtggcggtgtatgagtgtgtgtggagggtgtataagtgtgcatgagtgcatgtgtgtgttttgtggggtatatgtgtgtggagggtgtataaatgtgcatgagtgtgtatatgaacatgtgttaatgtgtgcatgtgagtgtgtgttggggtgtgtgagttgtgttgagggtttataagcgtgcatgagtgtgtgtatggacatgtgtgttagtgtgcatgtgagcgtgtgtgtggacggtgtgtaagtgtgcatgtgtgtgcaaacatgtgtgttagtgtgtgcatgtgtgcattgtgggagtgtgtgtggagggtgtgtgtgaacgtgtgtgtagtgtgtgcatgtaagcgtgcatgtttgtgagtgtgtgaagggtgtataagtgcatgagtgtgtgtatgcgaacatgtgtgtgttagtgtgtgcatgtgagcgtgtgtgttgtggggggtatgtgtgtggagggtgtgtgtatgtgaacgtgtgtgtagtgtgtgcatgtaagcgttggtgttgggtgtgtgtgaagggtgtgtaagtgtgcgt

SEQ ID NO: 727 - DNA, 2431 bp, Homo Sapiens; identical to SEQ ID NO: 422

SEQ ID NO: 728 - DNA, 2497 bp, Homo Sapiens
ggcagcccttctgttcacagcatgggttaccaggtcaaaccctgccaccaccgtggggaacttgattcggagccccatggccattcggatggattctgcgatgacagccacatctttggatctgtgagacagacagagaagccaggagacagtgcccagcaccgacagagcacaaaccccagagcacaccctccgtgcagggctgggccagccccaagtgtgcaggtcccgtttcccaaacctgaggcacccctgccctcctgaccccaccctgaccaggccattgtgatccctgagagatatgtagcccaaatccattcttatcaaagacccttgctggctctgggggcacctgtagtctctgaaaagtagatggggtcagaggacccacgggaacagttttatttgtctgcgtttagaggaggccaggtggccttgttcccagctctccctgcatctctgtcgggggtgtagacatggatgcagctcaggggcagctctctgtccactgcacacctgcaaagggccacaggtcacccaagtccctgatgggtcggctggacccagtaaccatatggcctcttgctgattaagtcagcaagatcctgggtactgcagaaccctacaggggcaaggcaggcagcatgacaacaaaagccccaaaacacagggtctggcgcaagcccacgacaggctcaaggtctttgccctgccactggctctcctgctccaatcctcggctctgtggggataaagccttcctggcctgccccacccatggcctctccccagagcctaggcaaacctgggggcactgatgcactcagctcagccctcacaccctcctgccactggccctgggaaggggcacctggcaccagggagcctctgagcagaacgtgggcccatcctgcaagctccctcctagggggaccggcacaaagccagagcttagctcctccaggccccaggccccatggaagggaaggggactcaggaagactgggcatgggaggaggctcctggggagtcagtgccctccagagcccaggctcgtgggtgagctgagcagagggagccgctgccggatcccttcggtgcccgccccgtgcctgactccgagggaccccactggctgctgcccttgcagctgcgaccatggacaggtcccagccttagactggctgctctttaaagtgaggggaggggtcttgtctggtaaagtcagaaggacaattaagctgcaaagctttctgtgcttccctgggaaaaagagtgggtctttcacccacgtgccaggccacgcacatggtactactggaggtccccacacgcagacttgagccagtgccactcagggtgtctccgtgatcaaggactcacacacaaccacacacagaacccagaggcaaattgaaaccaaaaacgggccaattatccaaacattcaggcaaaaccattatgctcataaatgagtcaccaggccaatgtggggtcacagccgagaattatctgggaaattcacacattcttcatttcagtttgggggtgaagacctgaactagaagtggcttcaggcagcaattcattgttgggtcaccgcacttacctaggactgtgctctcacacaggcacagcacagctccttggcaccagtgctgggcctctcccggcctcccagccccgcttctcacccctcccctcccagcctagtagctctgcctgcatcccagcctcccaacccgagcttttcagcaatattctctctcacctgtgatccgaataaatgattttgattccaataaactcagggtgagtttccacaaacttctgagctacttcctggtaagtcttcactgaccactcttcgtcatggtgctctccactgagctcatacacctgggaagaaagcacaaccaggagccgtcaggtgagcagtgagagacgccacccccttcccagccacccctgcccagccacccctggccagccacccctgcccaaccacccccttcccagccaccccttcccagccacccttgcccagccacccctgcccagccacccttgcccagccacctccttcccagtcaactccttcccagccatcaacgagctctgggaaaagtagatggggtcaggggacccacaaaacagttttatttgtgtttggattaggccaagtggccttgttcccaaaagtccagccaggctggacttgtgcttcccttgttcaggtcctctacggccttgggcattgtctctgctgctgcatggggaattcctagctggctctgggataaccctgatgctgatgcccacctgtctccttcattgctgggtcactgcacttaaaacagcacatggcacacgcgagggtaggtgcccattaagcatctgcataatggttgaagagcaggtcacggggggagaggatgaaagctagaaagagtgatctgagaatgacgtcattccccactacctgctcacctcccca

SEQ ID NO: 729 - DNA, 2272 bp, Homo Sapiens
ttgaggtcaaacatttgagatcagccagagcaacatagtgataccataatctcgacaaaaaaaaaaaaaaaaaaaaaaaacgtgaaaaaattagccacgcatgatgccttatgcttgtagatccaactggttgggagattaaggcaaaaggatggcttggactcaagagttcagggctgtggtgaattatgatcaaaccacggcacttctgcctcgataacaaagaccatatctcaaaaaaacacaaaataatcctataaataaggattctaatgccacaagcctttccataggctgtaaatgttttatgctaatttgaattgcattttaaaaagtaatgattcttggggtaaaggccatagaatacagtcccaagaaataaatccacatatttaccttacaagaaataaatccacattcttgtgttacaagagctcctgaaggagacactaaacgtagaaaggaaaaaccagtaccagccactacaaaaacatatcgaattgtaaagaccattgacactataaagaaactgcaaactaatgggaaaaataaaaagctagcaacatcatgacaggataaatttcacatgtaacaatactaaacttaaatgtaaatgggctaaatgccccagttaaaagacacagactggcaagttggataaagagtaaagacccattgttgtcctgtattcaggagacccatctcatgtgcaaagacacacataggcttaaaataaagggatggaggtatatttaccaagcaaatggaaagcaaaaaagagcagggtttgcaatcctagtctctgataaaacagacattaactgaaaaagatcaagagagacaaagaacagcactacaaagcagtgccatctgcttttcctcaggcctctgctccatcagccatcaggtggcagccactcaggatgttggaacctggccatccctgcttctttcagtgggtgaggttggtggctgctccacctgttccaggcacacccttaacagaggtggctgcttgctctttaagccagcttggccttgcctggcatgcacaggccccggggaccgacatgctgctctgactgagaccgtcctgactttgtcaaattctacgtctggcctgggccacagaagcacaagtcccctgggtggtaccactggctgctttctggactggaacataaagtcctcctcaagatgacctgtggtctgcctcttggcaaccaacaagcccgcagtgtcatacgacccatgagacatggactgaaggcccaaagggagtgcacaccatgctccagagccagctgctcctttcctctatatggccccatttgcagcacagttgttgcactgaggcttgtgcatgctgggcaagggcaagctggctcaaagggcaaccagctatctttgcacggatgtgccagcagcaggcagaccagccatcaacctcacacgctgccagtcaggctaaatcagctcttctaccataaaggtagggccacagtgccatctggttttcctaaggcctctgtttcttcagccattaggtggcacccactcaggctttgggaacctggctaccccggcttcctggagtgggtgagctggtggctgctccacctgctctaggtgcacccttgcagaggtggctggttgctctttgagccagcttggccttgcctggcatgcacagaccccagctacggacacgctactccaagtgagcttgtcctgtctacggccaaattctaagtttggccagggccacagaaggcagagtcccgagggtggtaatcctggctgctttctgcacttgaacataaagtccttctcaagatggcctatggtctgcctcttggcaaccaagaagcccacagtgacataagacccttgaggcaaggactggagcccccaaaggcagcatacaccttgctcctgagatggctgctcgtttcccctatatggctccatttgtagcacagtagtagcactgaggcttgtgcatgctgggcaaggctaagagggctcaaagagcaaccagtcacctctgcgagggtgtgccaggagctgggggcacagccaccaacctcactcgctgcaggacatggaacatcagttcttctaacaaaaaggtagggccaagggccatctgcttttcctaaggcctttgctatatcagccatcaggtggcagccactcaggctgtgggaacatggccatccacttccttgactgggtaaggttggtggctggtccacctcctccagacgca

SEQ ID NO: 730 - DNA, 2313 bp, Homo Sapiens
caggcaggggctccaggcccaggggctcctgagcagggaagaccctagcaggaggcagggagggtgctctctctcacgcacagcactgcaggggtgcggtggggagggggctctctctcacgcacagcacccccggggtgagtctgaggggagtcagtatcaaaggtcactgggacccagggtcctggcagaggaagcgaggtctggggcagaggggatctggcctgggcgggggaggggctgcgaccaagtccagggcaccaggtggaggagggcagagcccggagatggccaccaccacccgggagccgcctctgtccccagctccgaggcagacgcctgtcttggtggggcatgctcaggccacgggaggtgggcaggaccactgtgggtgctgcaggggctgccggcggaggccagggcacagggaggggagaaatcacagcctggatctcattctcagcccaagctacacggaaccgggggtccctgcatagaggcctgtcctgcagcatggctctgagcagctgcacacactcaggcccaagtggctcctccaatcatctctgtgcccacgactgtgcagggaatggccaggaccccagggaaatccctcggacatctggcgctgcccgtccaccccagacctgttcctttgttccccagctccctcccagccggcccctgaggccctccctaggaggaggaggtccctgaggttctctctgtgagggccgacctgaaggcctgagacgcctcctcccacctttgcaggtgacccctcagaggaccctgggcccccagagccgagggtcatggagactcctggggcccattcatggccctgggactgtccctaccctggtgggactaagccacaacctggagcagctcaaggctggcacaacagacacccataaattaataaaaataattgtgaaaacacaagcaaaacaagctcgtcggcatccaagagttctgcagcagcagggttagtctgagagttgctctctctgtcccacctggggctccagggcgctgcagtccgtcaccagagggaccagatgctcgtggccctccaagggcttagtgtggagctactcacccccatcagcacagagaagacccacgtcttgtggctgaagcaggggggcagtctcttcgacagctgcaggtcgctcggcttcgcgtctggggcatagctggcggggtcttgccggccccgctccagcgtgggcatccggtcataggccagctcctctctgaatggctcctgggtcatggcacttggggacaccacagctgtgctgaatgtacagccacgtgtcaccagttctttatctggaataaaattatcatcggctttggccactctgaggaaacttcaataagttgtttccaagaaatattttttaacaaaagaaatattgttcatactgaagtgctctaaatttgaagaagaaaatgagcacttgaatctaaaagtgaaaaagaaataactttcctagaaaaacggacctgaatagtctgggttcagggtgagattctacactttaaatgcctcattgatccatctgggccctccaggtgcaacacctgacaacatccatcggcaacttcgtccatgaacacatcacgccggggactcaagcacgttaaactgctccaattggtagctaaacgagagattgcaaaacatgcctctactcaacggcttaatgtctgagcacttacctcccccgctgctctgccgttgggagcactggtctctgggtgagggacttccagcaagaagtattcacaaatgaaacaaaagctcagcaaacttgagctgaaggcaggggaaggagagctgcttcctgaatatcaatgaggggaggaatcgggtggatcgtagaaatgtttcgtgttggttgtgtaaaccactgcctcggagctgtcagaacccaactaggaaaggaaggggccctgcctgtgccactcgccacagagctcgggtctctcagaagaaagaagcgtccctaagaatagaatcccaccaagtacacattctgagcaggctctgtttctgaaacgtaactgtttactcgaaggtcttctacatctttccaagtagcctttttccatcccccacagccacacggtgggaacctccttcacacggtcacataagcattcacgcactcggcttagctgtgtggccttgggcggctccggattcggccctgtggtttgcgtgggcagcccggatggctggtgggcccggtcctgctgccccctttatctctgctcaccaagcagagaaaaaccaca

SEQ ID NO: 731 - DNA, 2492 bp, Homo Sapiens
ctcatctatcaagcagggtggtcattttccacctcacaggtgggtggtgtgaggcctccaggtgaaagggtcctgcacacaggaggcgctcaataaatgtctgtggcggctgcaacaaccccccgggggtgaagtaggaagtctgaggggctcagaaatgagagagacagagacagggagagacagagagagagagagagacagagagagagagagacagagagagagagagacagagagagggagagagagagggagagagagagagagagagagagagagagggagagacagagagagagagggagggtctttctttattcccaggccgggcagccaggcccttctcatccagactcaactctccccaccctgggccttgggctccctcctgccttgtccagcatctgggagttgggggttcccgctgtatggctgagtgctctcggggatccttacccccgtacccacccctggcccagcctggctccaggcttccctttccaggacatctgtagccccggctggccctccgtcctccagagcgggcctgatttctgtgccctgggaggaggggctcaggcctggcttggccacccatgtgctcaccttgtagatggccatggtggacctgtaaaactggtccatctcgggggccatggaggggctgtcccgggtctgagcaggaggctgggagctggtggcgatggcacagccgggagcagtggtaggtagtccctcaggtgcccacgactcagctggcagcgaggaagcctcggagagggacctggagatggaggcctgcctcagaggagtggcagcttaattattcaccaactcgggatgtcagaatgtgatctggggcgtaaccagatccggcagggaaggcatcctgtgccgggcaggctcgtgtgacctgcccttcaattattcaccccttggagctgtgggctgatacaagtgcccatgtggatgagccccctcctgggtcaccccctcctcaaggaccccaaccctggggggccccgccctcccacctgcctataccaggcattgcccaccttactgggcgggcgctgcccgatgccctcccccaggactctctctgccagacccagcagcagcagcccctggaggggaacgccgctttacttctcactgtcctcaggcctgcggctcacagtggggccacgccctctgagcttggctcccacagccgctctggcccgcccagctcctccacttgccggagcaggagcagcacaaacgctggagttgcccagccctgggcagacctcggccctgcacacgcgctgcctgtccacgcggagtccccggcctctctgggtgacaaatggggctctccctggtcctccaagatgaagttgaagattgtggccctccttgggcctgccgggggtatgtgggcctggcagctgcctctgcataccctaagggccggtttaggggaggcctagaggaaagaggaggtgtccctgcccagggatcctggaaaacagagtgtccgggtacaaaggaaaagtccggtcaaggccaagggtcaaggccgaggggagccgggggtcaggggaacaggtggatctcacaccactgcacacacaacacaggtgaacttgaatccaaatgatttatttcagttttggctcttaagccacttccattgggaagaagaaactcccaggagtgacctttgagagctgagggttctcggggtggggcagtgtgaggggctgggccagtgtgaggggcaaagtccaacgggcatcccactcctgcggcctgggctttcccagctgatggggtgggggacacccatttctttagtcccagcccccagggaacggagcagagggcagagggagtgggctgcacccaccaggaagcctgggagtgcccttgctgggggctggggcagaggcagcccggcaggccctcagggaggctggggctgggggcaggggtacggttgtgcccgggtacccttaatgtttgagctgatgggggagtcagttgtccttgacagtcagggaaaggggccaaagggggctctagactttcccagcctggaatgacagaaagtgctggaaggcggggttagtgggagacaggccttcaggaccagcctcgggcaggcagcttggcattctcccaggcctggtctatggactcagaggtgcctgggcccagatctgcccgggagggcagtggctgggcttggcctggcaggggctgaatggacgaggtcagctggggccggtgagaggctggggaccctcagggtgagagcagcagctggatgagcttctggaactcctcgcggtgctcatagatgtagacctcggtctcccagagggcgttgaccagcactgtgtcactgacctcatccagcatgatgtccgtccccagctgggggttcaatctgttcgggccagggaggagggggtcaccctaggatgctcaggctgggcagg

SEQ ID NO: 732 - DNA, 2410 bp, Homo Sapiens
ccataaaagcaacacgaaaacattaatgctgccggcctccatttcctgggaccaactaagagcaacagaacaatttggatagattagaatcacatatttaaagagatctggctttctaagaaatgtcatctatagaaataaaatcaccttaccatatttcagttgccttaaattttattttcgctagcttagtaaggggaagaaatatgtattttctctttcctttttctctctctctctttttttttgtttttgttttaatatttctagtcacctgtctttctctgccttagtcacatatgggcaaattgctgtttgtttagatgtgggctcaatgcaggcagctttgagccattatctctagtatttgtgatgtcactttggtttgtgatgtgggtgtgggtgggtgttacatcatcagattttatagttaaattatgtgggaagaagttctatacggttttgcttctagcctcagaaacttctgaagtcctcatttcccccaaaatggcttggatgaattttgaagatcttcatgttcttaagaagtatgttttgcaggaaatgtagtcaaatatgcagaccagatttggggatatgggtagtgagatgcatccctacatgtgcaaaagtgccctccttcatgtacataaaggaggcactgttaagttctcagaacagctgccaaggttagggaccaggaatgaaagaacacgttcctgcagacctgggcacctttccctgcatgtctctcccgggaagactacatggtttctggaatgtgggtttcttttacatcccatggcaaatgcagtaattagagctgttagcagtgtcaagggcttgaaaggagaacaaagccgcctcttcctgggaactcttgggcaatgcctcactgcttatcaggtgctcgtcctgttggtgggtttgattcttttatttgtaaaatgcctcaggagcctccctcctgagggggaggccagtgaaatgatggaaaaacagagtatgaatctggcaggggctcctggaatcgcatgtgttgcctgcttgcgtttttaagtgttgtccctggagtgaatcagagcctgcaggcggaccgcaccacaggctgtggtggaaccacctccaggcctatggcagctggacccacagacagttgagaggacaattgctccctttcagtggcgagccctggcctcacctcctaagagctgggtcgattttagagcagggctttggaaagggtttgtctttgggaagagtttgcgaatgtctggagactgggcaggcaagagtcttttcaaagctggtcagtcttggaaaaatggcaccgggctcctgggctacctggaaattaccatctgtctttactctgcaaagcagggacaggagggaaatgtcaagcaaaaaaaggcataataggagtaggtcatctgtttctcttttctccttctccatcttgagtttggctttcctgcacctcatctttccacacactcatccgttagatttactctgctaggtcttttactcaatgactctgcttggtcttttactcactctgtcccccaggctggagtgcagtggtgcgatctcggctcactgcaacctccgcttcctggggttcaagcaattctcgtgcatcagccacccaagacgctgggattacaggcgcggaccaccaagcccagctaatttttgtatttttagtagagatgagttttcaccatgttggcccagctggtctcaaactcctggcctcaagtgatccacccaccttggcctcccaaagtgctgggattacaggcgtgagcctgtgctcagcctcaatctccttcttccagcagagagctgttcacatgggcagcacttgatacatactcttcaagttctatcaaattctgccttctctgccttcattgtaactcacttcaattgactatgccacaacaggtaaccctcagccttccttagaactaacccagggtactttgttctaagctatttctcctatgtcaataaaactaatatttattgaatgcttcctgaaggccaggcactgttctagccactttattagcatcatgtcatgaaatgctaccaaccatcctatgagtttgagcactgttccctgttttacagataaagaaactgaggcacaagttgctcaagtatcatgcctcaagtaaccaacaaaggctgaacccaaccaaagtctatactgcccttgtttttgtttttgtttttgagacggagtttcactcttgtcacccaggctggagtgcagtggcacgatcttggctcactgcaacccccacctcccaggttcaagggattctcctgcctcagcctcccaagtagctgggattataggcacgcactatcatgccgggctaatttttgtattttt

SEQ ID NO: 733 - DNA, 2327 bp, Homo Sapiens
caggccgggcgcagtggctcatgcctgtaatcccagcactttgggaggctgaggcgggcggatcacgaggtcaggagatcaacaccatcctggctaacacggtgaaaccccctgtctactaaaaatacaaaaaatcagccgggcgtagtggcgggcgcctgtagtcccagctactcgggaggctgaggcaggagaatggcgtgaacccaggaggcggagcttgcagtgagccgagatcgcgccactgcactccagcctgggggacagagtgagactccatctcaaaaaaaaaaaaaaaaaaaaaaaaaaaagcttggcagggagcaggacatttggacctcactctgctgcccccttggctgtgtgacatccaggtcacgttgcctctctgggcctcggtctcctcacctgtttaagaggggttgacagtcgtatctgccccctcagcttttccccaggaaggtggtagccacaattagcatttgttgaggctgaccctgcaccaggcccaggataggcggggcttagggaggcccgtctctcgccacgttcccctgctaggggagccccgaggccctctcagtgtcatcctcatgctacactctgtcccagccctgtgcgtcccaagctagggcactgagtgtgccagcacccgcagggacaggcactggaccctgggtggacctgagggtctgtgactacccccccagctgctctcccctagaggccacttccctcaaggaaggaaagaaccttcccgccacctcctgcagtgcggtcagctcaggccagcctgcacagcagggccagaaccagggcccctggggagggatgcctgcctgcccagtgggaggagacggcacgcccgtgaagccgctactcagccagcctgggggccacgagtgctgcttctggtggcgctgtgcggggagggagggggccgagcagggtgggcactcgcatgcctgtgtcttgctggccttcgacagatgacagccctcctcctagggtctccagtgcagagttccttggggacattatggccactcctgtccagatgagagggagccggctgcctgtgacagcgtcgcaaaatgccgccagggctttccctccctcctcctttctctcttcctcgtccctctctggttggtggtttcctgcaggctcccgtccctgctggtgctggccacaatgtccccactcccagggtttcggcgtcccagccccctgcgcccaccgcgcctgcccgccagaatccctgtgcccttggtgcgtgtggcctgccgagcctcgagcccctgttctcctcagccctctttcctcccgcgtccccaggaggtgcctctggaagccacggagtcccatcggcaccaagaccgactgccctttggggtgaggtagtaggttgtatagtttggggctctgccctgctatgggataactatacaatctactgtctttcctgaagtggctgtaatatctgcggtggacagagcgtctggaaccctggctgggagcgggcagggccaggtttgggggcagccttggcagcagtcgggggcaggggccgcctacactgagaagtctgacaggcctaggtgccacttgctgtgtgaccttggacaggcccctgatctctctgggtctcagtttcctcctctgtaaaatggaggcaaatgaggatggaaggagatgcagtgtggagcatcgagggcagaggagagctgagccgaccccaccctctgccccagccgcactgagagaggcgatccacgcagctgtttgtctgacctctgtctcccaacactccccaacactccccccgccatcaggcccaggctcatgggtggccctgagccgtaccctccactgagcaccaggagaaggcaccgtggggccaggggtggccgagacgtttggaggtcacagggctgcgagtattggcgttgcccatcaccccaggttcccagcacgtgccccagcctggccagctcagtggcagggcctctgcctgtggaggaagggaggccaaggcacctttcctgagcaggaagtgagaggaacagctctgcatacactgggtcccacatggcacaatctgaaggcagacagtggctcctctgtacctggggaaactgaggcccagagagccagggacttcccaagaccagccagcagcagctgccccttcctggggtgccatctcccctgtccctcctgccctgcgcctgcccagccctcctgctctggtgactgaggaccgccaggcaggggctggtgctgggcggggggcggcgggccctcccgcagtgcaaggccgggcc

SEQ ID NO: 734 - DNA, 2426 bp, Homo Sapiens
taaccttcccggggctgccagatcgccgacatacacgcacacacacacagagtgcacacacatgcacacacgtgcagccgcatttcctggtgcgcttgctgtgagggcacaggggtgggtaggctggcaggcacgtgaagttgccatcagccccgagggaccgtgagcgagttgggacttgggggagaaaaaaatgggggcggacgtcagctccctgggcggccgccgccaccgcctccgcctccccgaggcccctcctgcattcctgggcagcgaagcccctcgctaagacgggggctgatgtcatcccgggctgctcagccaggggacccgggggccctggtggctgcctccggaagtgagctagccgcctgccggccgacaggtttggaatctccagccagaggacagaaaacctgcatgggtcaggtgagcggggtctggccgagggcagccgggcagggggcagcagggtgcggcagcttgcccaccggaacctcccagggtgcacctcaggggggctgcctacctgaagggaagtgaggacgagggtgcccaaaggccgccccctccacccccacccccatccccatcccccgcctttcgggaccgtcacgccctggagtgagtgcagccggcttgttcctcaaagctccttgtctcggccgatcagctgggtgagccctggaactggaacctggactgcccagtgtgttgactttataactccgctggggtggactcccagcctggcacttagctgcctcttaattctgagcggcacccgtggatgcagccggctcctggctcagggatgtttacttacccttggtttgcctgaagaaagctgctgtttttaattttttttcctccaagcaagcccaaaacttccatgagcaaaagagtccaaagaggcaagaggacactggcgttttaattgctctctccctccctaacttccttcttccctctcctcctggctggccccatggattacctgggagataaactcacagtggcccagacccacatgacccagtggatgggcaccgtgaggaggtccttccaggaagccctcaatttggtgaccaccacggtgggccacgaacggacgagtgcagagtcggccagccggacccccttcaagcgtacttcctccttccgacacctggcttcccggagtcgggaatccttccgccgcttctctgctcgcagccaacagagattttcttcactgaggaaaaggcatacagattcggaaccgccagatattgtaagcttattatgttttaaaaaatattaaaacaacactgaaagctcctcccctccagtcctcccagggagggggtcccagacatcaaaccggggaagttacttcttccagaatagttgtcagtcaaagcccaggcacttcctgtcccctgtacctgggaaagaggcacgtagcaataattcctctctcctgaagtcagtcaggacatttttgctggagtcgacgtctgtgtggacagggccagcacgtgagttgggctgaatttgccagttgatttatgtttaagtgtgaacaccccaacccccgacacgaaagctcatccttctccctatttttagggtggattagtggcacctgcctcatctcctctcaccctcctaggaagcacaagtggcggtgtcatgtgcacgctgagttgtagcttttgtcgttccaccgagctttcattggattgccaaggaaagggtcttaggagaccgaggtgtggtgggcgagtttgcccgctggccgtgaaccttgggtttggtgtgagtgggccagggagggaggccttgatttcttactcaggcaggctcgggagggcttggattgggacagcagggtggaatgacagctaatgattaaaaccttggcctgtgtcctgctaggcgacagtgcagaaacaatcgtaaggtccttctgatgatttggagaggtgggactgggcccagaaagcgaaagtgcctactgtgggggaagcacagtgagtgagtggcagagccaggtcccgaaccccaggctctgacctccccattcacggctctttgcagtccagctcccagcagatgttctccccagaccctcccaattaattcagggctgcccaggtcactgaccagacctgagcctaaagagagggcctgccattttcacataggagacttctgccacctgactgtgttggcccagtttatgggagcacttgaggacaggcgaagggctaagccagcccctttttctgggttcctcctagccaggagtgctatagtcattaagggacccagcatttagggaggagccctgagctggccctccctacactcgaggtggcagggctcacagctgccctgccaggtgcaggggctcagtatcccctctgctgacccagaggtgt

SEQ ID NO: 735 - DNA, 2397 bp, Homo Sapiens
aacatcctgaggataattgatcagagggaggaggggctgcaccgcttcctagcaggttgagttaattatcagcctgcattagcacttgacctgtggcatgtgtcaactcattactgctaattgcagggactcagtgacctctccgaacttctgtcacccctgtcacggcccctgccctgtggaggcctgtggaatgggaagtggggaggggaaggagaagggggcggagtcagccggagcctcctggccaggcctggagtcaccctgtcctgccacagctctcatgggtttagagtgggccctggggcagagggtttgcaaggataggggtgggtggctctgccgagggcggtgttctgagtaggtctcattccccagtctgcccagcctggccccaccccagctctgctgccctgttactttgtccccctgtgttcaccctccacttcctgccggggacactccaaggcctgccaaggttggagcaggggtgggactcagccattcaacaaacgcttccttggttatgcagggctgggcattggggtggggggctgacctggaccctccaagacatcagattgtccaactgctcagttttcattggggcaagtgcctcgctgagggtgaagggggctgtgagtgcccatcagggagcctggacaggtcccgcctctcacagctgtcccactctctggagctgccttggtggcagatggcactgtcctagaaaggtgaggctggagctgtctcttccaccaggggtggccaaggacgcttccagggtcttccatgcaggcctccagggtcaccctgggcgtggctgagggcatgcagaccacgctgtgctcccccccaccccccatgcccgtcgcttgcctgacatgctcctcagctgtcttgccccgcagaagctgtgtggtctcccctgtgagtagagtcgggctccatgatcctccggagcagcgccagggactctccccaggcacaattttaaagggggccctaggacctgccaggtccacggaagtggtccttgtaactctctccctggtggcagcctctggtgcattccggcaggggcagcccctcctcatcacagggaccctgtgtgccaggccccagctgcgttgccgctgaattatggatttaatagcagagaagccttgcaggccgcctgtgctggctcgggaaaccggggcccagccggggcctgtcacggtcctggtgccgccctgcttcctgtcggcgccacggagcaagcggagagatttatcttcccggctttaagaggtactaacggaggaggctgagaggcaggagctgaataattgatggccttctctggctcaggatctgctgaaaatgacacggtgcaaggcagaggggctgagagtgctgaccacaaaatgctgagaagccactccagggcggtcacggccagaaggaggacccccactcaggacggggtcacaggcatttggggcgggtgtcagaggctcctgccctgggtcattccagggggccaggatacccagaagctgggcctagaggcccacagggctggctcacccccacttccctctcacacgcctgccatcaccggtgcttcagcccagcaaccccatggctcgttggccccgtccacagcccccactgcctcctgtgtgctgggcgtgggcctctgagctctactctcagcctccttagccccaggagaggagtggaggacaggggtttaacgtggggtgtggtgcggagcggggagggctgtggcgccccctcagcccctcctttcctaacagcctcagcctcccccctggagaatcccctacctgctgggcacatctggcctctccccaccattctgtctccagccgggagatctctacccagtgaaacagtgaaacaggaagggttccctggttaccccgcgcagggcgcagggcatgcagcgggggagtggctcgcttcttcagtgccccaccgctcacacctctaggggagcatacagacgggcaggctgtggggctctgaccccatggcagtgtctgggggtgaatgtttacagctcttgaaaccccagtgggagtgcgttaccgggtggtcttttagtctagcggtctgtaggtggctggtgagagtgagctcaattagacccctgccttataacaaggacagaggaatttctgtatcccagggtttcttgccttggtgtaccaaaaaattggatcacacgtgggcttggagaatgagtgcaaggttttattgagtggaagtagctctcagcagatgggggagccagaggggagatggttttcccctggagtcaggcaacattctcgggatgtccagcagcttgtcttcttccaccagtgtgttcctctccccacacag

SEQ ID NO: 736 - DNA, 2354 bp, Homo Sapiens
agacactttgcacaggtgtgcgtctctatcctggctgctgtgtgagctgaggacaaaatcctggctgctgtgggagctgagcctgtgggcaggctgagccaggggtgggagtgagagggaggggtgagaggggcctgagcacctactcagcgcatgcttcacagaactagcctgctccaggaagttccggtgcccagtgccacaatgcacactccagccctgtgcctgcacaccagaccccgggcccgctccacatgggtgccttgagctgattccctctgctggagttgctgaagggttctgcaggcctcaatctacagtcagcccccaaccctgtcatcagcaggggccccagcttacagcaacgcagctgttttcactgcaggctaactctgccacagcgttgccaacctgaaacatccagcccagagtgagtttttggggaggcgggaggctgtccaagcatcttacctgctgtgtgggcaagaagcggcctgcatctcatcagagtttggggatccaggacccagatctgctgctccgcagttgtgtgaccttgggaaggtcaggtcccaccctgggtgtgctcttctttcctgaagattcaatccggcctgtgtgctaggagtggagggcctgctggagtctgaggaagatggcagctgggtcggtagcagggtgagcagggtctgagtggggccaggcttcccacactggacaatgatgtccactgtaaagcccatgtcctggatttttgacaaacatcttagcaatcgacctgacactccactatgtccaagttgatttgtttccatgctggacatgtgtctaccaggacgtgctcttggctgccactggcagggcctggaatgaggacacttgttgtgcaccttgctttggagccccagacaggcaaaaaaatatccatgtggcttcacccaggtcatctctttgcttgtatgaacctcaggccacccttagaaagggtctcatagccccggtgtctcactctctgacctttgccaagtcgtcttcagcagcagctggaactctttgaagtggctgccacagatgttggcaaagcccggcctgggatgcctccaccctgcaccaggcacggggctgcctctgctgcatattcacctggaaatcatccacatgccaagcaccgcagaggcaaggggagtctgccattggactgcgttcaacacggctgcagggatacagacaagcacattccctggcagaggcacgggcccggctggctggagctgcagcagctgtgtgtggtcacagagcttccaaatgagggagatggatggcctcgcttcacagtgtgcccagagcatgtccacggtgcctgggaagaccagggactcaccatgcccggctctggtttccctcacagtgaagcctccttgctggtaggatccatggccaagcatgggggcaggggctgggggagctctgtcagtgacttctcgcaggcagcaaggcctctgggagctggccaggaaaacagaaactccatcctggagcaggtgcgcaaaccaacagctcagaaattaacaaggttcccaccaaggaccatgagccacctgtgctgtcctgtttgttctggtacttgcgcaggacacggggtggggggcgggggaagcacatgtcaacagggagctggtggccgctctgagagccagctcctttctcataacttgcttgaaatccttctctttgcagaagatggaacccagcacatctcgagagcccactgcacaggtcaggtgcatttatgtttactgtttctatcagcaaaagagcaaaaccaaaatcaaacaaacgaagactctggcaagattgcttgatcctgccttgaggtgagcacacagcagcatcgggaaagtgcgtaactcataaagatggtgcagcctgcaggtcaggaggggctggggtctgtcgagggcagctggggctttgcagcctgatccacaacactgcactcagagcggggaggtgctgtctccaggcccacctgtgactcctgaggtacaggcagagggtcgggcgtgtatgacactgcataggagtcctctccgcagtgtggaacccacccacgtcgcctgctccctcagtccccaaatgcatctggggtctgagatcagaaacagcagaagctctggtggttagtggaatagttacctaagtggaccctcatctcctgggcattctttgagcacctccctgctaggcactgtttcaggggctggtgacgggaagcccaccttgcccatgaggctctttcggcacagaggtggacactgagggaccgctggctcacacgcatgttgaaatatgtg

SEQ ID NO: 737 - DNA, 2382 bp, Homo Sapiens
tcttagcttcataattaaccaaaacaaagaataagcaaatacaggttttttttaaaaaaggtttaaatgtaaacacattatatgacactaagtccaaattctgatataaaatatctggaacaactatttagaaaactacaaactttaaaaaataaacctcacttcataaaataaaaagtgtgtatacactattaactagtgtattaggcctaccaagaccatgactattagtaaatcacatctaagccctatcaaaactctaagagcattgtgtgctgttagaggtaaagcattgtgtgaaatgtttgctgagaattgccatcttttaagaaggccaccaaccttatctcctgggaattttccattcaatgccattccctgaacagcccctacacatgtttgaaaccatcaactgtaacagtgtctgtgatgctgaccagatggcacacgtgggtcattcaactttttccagaatatactctgggggtacaaacaccttaaaaagttacattcacagcagtttgtaccacatagaaaccaagactccttttgggagtgagaaactacaataataaagtacaacatatcaggatcacagaaggtaggattcggatgatggatgtgtgaacagagatgatggatggtgaactacagagacaggctgggctctcaggtctctgggccacggaaggagtgtgtcctgtaaccagcacaggacacagctcagtaagaaccatatactccaaggagctcggggcttggagctgggccctgtgctcactgatggggactcagcagctgtgtcctttctggcctggcagagtcccctgagcagggacctgtgtatggtctcagcaggtgcttcctcccagggccctcccaaggcgggaagtaaaccttcctcctcctcaggctgcagtgtgagctgagctccagctccagggctcagggaggggctgggcagtcccctgatggaaacacacttgcatgagcagcccctcctctgcagagggtggggaagaaaaggatgcctggggcagtccagccccacggtgtggtggggtcaggggctgtgtccaccatggacttgactcctcccctccttgtgatcctgtctcactgtacgtgtcgggacgggcctcaaagaccagcctacatcagaaactttgactgaggcccctgagaaatgttaccctgaactctgccttagtatctggatgtgtcttttcacctgatagagttataaagattttcccagttaaaaacaaaagcaaagctctgccagactcgtgttcgtggctccaaatctgcttcagccactgagcaggagctgagagggaagagagagagaagaacacaagatccatatggggaaggatttctatgagggtgtggcagtgagagcgggtggcaagttgccaaagaggcctaagccacagaagtgggtttcatgtgggactttcggaatgagcaggagggcgatgggtggagggtgagggtcagaagattctaatcagaggtgagaacccaaagatgagttattggtcattcaagtcaaacagtgaaattaccttggcctgtgcctccagtcagtggagcagggaaggggccaggatgtgcttcctgcaggtgttactggaaaggggtcctgattcagatcccaagagagggttcttggatctcatgcaagaaataatttgggaggagtctataaagtggaaacaagtttattaagacagtaaatgaataaaggaatggctactccatagacagggcagcaccaaacactgctggtcggctatttgtatagatagtccttgatcatatgctaaataaggagtggattatttattagcttttcaggaattctttttaaaaatatagaccacataaggtaacttgtggatgttgccatagcatttctaactgtgaggacaaccagaggtcactttcctcaccgtcttggtttcagtaggttttggccggcttctttagcgtatcctgtcttatcagcagggtctttatgacctgtatcttgtgatcccagtctggttgacttcctagctcatcctgtgactaagaatgcctaacctcctggaaatgcaggccagcatgcctaagcctcatttaatcaagcccctattcaacatggagtcactctggttctaacacctctgacttagggtggctgcagagctggaggtgcagattggggcagatcagcctcctgagaaaagcacacagagccactgcggggctgtgaggtgggagagatgaactcacattggcatttgatcagtgactctccagctgtaatgagaatagaatggagaggcctgggacaggaagacaggatgtggttgctcatgccatcctggtggg

SEQ ID NO: 738 - DNA, 2369 bp, Homo Sapiens
gcctggggctgaggctggcctctacttaccggctaggtcttgagcaaacgaactggcttccctgggcctccttttccctgtccttaaaatggtgcaggtgaggacaataggagccccaaggggtgctgtgagggtggccagtacgtgccctgctaagggctccataaagcctaatttgtggtcatgagagggggtgcagcaggacagggtgggggcagctcttgaaagccccataaactaagagaatagaaaggaaggcaccctgtctccacagtggaggccacccctttggccagagggagggttggctgctgcccggccaaggaggggcagagagaatctggcagaattcactgagccctcgtgctggcagccctggaatgggaccctcctgggccgtccctggcctgatgaactggccctgaggctacctaccccacagcttggctcggatcccggccacccagcttccaagaaagcctggaaccaggaaaggagcgccgctggcgtggaaagacacacttgcatcctaaaacacttggcctctggttgtgtttcaggaactgggaggtgagaccctttctggtgactgacagttttgtgcctctgggcgcagagccctgtggctggccctggtatccccccctcccccctctccccgctctccctggccaatgccagcaacaacccagagggtagccccaccacttgccaggttcaacgcagtgtcccccgcagcagccacgtgaggttcctcggatggggagctgtccctcccccctgccccgcccctggccccagccacacagcgcccaccctccttgtttaagggccaggaggccagactgctggggcaaagctgtcacagcagcgagggagagagcgctgtccccctccccttcaaaagccaccttggcaaggcattagctaaacatcttctcggtcccagaaggcttcccctgtgaagtctgcagcgttcaaacgacaaccagcaaatccccagagacaggtccctgggaattagctgcgccgggcgggatgaaagccgctctgatgttctggagcgagagagtagagagaaggaggaagacagacactacctgccagtcgcagggtcccgggcagcagcagcacgccaaggaggagccagggggctgcggggagcccaggagggcgtgggaggcctggcagggcccgccacctcacaggctggttctccatctgggggcctgcttgtctgcggcgactctttagttcacaggaggggacggccggcgctgacagcttcccctttgctttccccacgaagctcctccctggcagcccctgaccttccgctcagaagcaaagctggaacagcccagcagggtggccgccagatgaggaacctggcactgagactggtccaggccacacaaccagaagaagagctggagacgggacccaagcctccccactccaacccctggtgggcttcaccctgtctcggcccctttccagcaggggccccgtccaggagacactggtaactgtgcagagggatcatgggatttccatgagtgacttcgggccttggtttagcctctcacttctgaaacacttttaaaacgaccacaagcatgttcacacaaacttctctaaaatattctgagaatcccttaataatgtgtttaccaaaggtaggttttttggtgaggggtggtagggaggctggggtgaagggcaggagcctcatgttcccagccctagagagggccaaacacccagggcaggtgaaaggcaggctgcccatcattcacccagcgagaacctctgtgggtcccctgcagaggcccaggagacgcctcctctctggtccatctctaacgtcagctcctccctgtggctgccctaaagcttagctcactcggcctcccaactgtgagaccctcgaactgcttccccattggctgcaggtcacagcccctgctctcacttctagcagcatcagccggggacaggaattgtttgctgccgggacccccttccccagcagactgggagcccctcacccttggcacccacacatctgcctgcgtgtctggagtggcagaggaaaggggctggggtgtggtgatggctggtggagctggaggcacctggtacatggaagacgcaggcgggaaggtggctgagtttcagcgcatgctgagcgcttacctcccttctctgcaggtgtcccttcactcaccagataaatgtgatgatcccagttgtacaaaagagaagacctcggccccaggaggcaaaacaacatgcctaggatcagggcaggtctgtggggcgggcatttgaactgccagtggtatgatgtccgagccttctcccac

SEQ ID NO: 739 - DNA, 2425 bp, Homo Sapiens
tgcactctagggcaatcagcctctgcatgggaggagaggggcaccctctgcaccaccccatggtgttaccaaaagttgaaccatgggttggttcaactttgcagagaagagaccacctaacccatctgtggaaattcactccttagcgatactgatgctccctaagaaattcaatcctgggcctgagtgatggttggtgcaaaaaacaaattcaagatcccagtgtcctccagaagcctggatttccagggatcctgctgtgagtcacaggacgtcaccggtccccttctctttgtgggttgagtgtgggggccatgtggactccctcatgagcagatgccaccagggccactggccccagcttcctccttcacagctgcagtgggggctggggctggggcatcccagggagggtttttgtatgagcctgtgtcacagtgtgtggtattcggcggagggaccaagctgaccgtcctaggtgagtctcttctcccctctccttccccgctcttgggacaatttctgctgtttttgtttgtttctgtatcttgtctcaacttgtggtcagcctttctccctgcatcccaggcctgagcaaggacctctgccctccctgttcagacccttgcttgcctcagcaggtcactacaaccacttcacctctgaccacaggggcaggggactagatagaatgacctactgagcctcgtctgtctgtctgtctgtctgtctctctgtttgtctctctgtctctctgtttgtctctctgactgtctgacaggcgcaggctgggtctctaagccttgttctgttctggcctcctcagtctgggttcttgtcggaacagctttgtccttgggttacctgggttccatctcctggggaattgggaacaaggggtctgagggaggcacctcctgggagactttagaaggacccagtgccctcggggctgatgctcgggaatcacagagctgggacccagagccaggatccagacccagaatgaggtaggaggtggaggggctgccctgggcgtctgggggctgccagggactgagccctgagccagcctgagactcaggaaaccccgtcaggagggagaagggagaagcagactctggacaccagaaagccaggggaagggtcacaaaaggagtggatgtgacggaagggcgggctcctgggtctcttcagaacatatcccctgtgcccagggggatcagaggggcagagtccactgcgtgaaagccccactgctatgaccaggtagccgggacgtggggtggatgccagaaaagactccacggaataagagagagcccaggacagcaggcaggctctccgatccccccaggcccttgccccatacacgggctccagaacacacatttggctggaacagcctgagggaccaaaaggccccagtatcccacagagctgaggagccaggccagaaaagtaaccccagagttcgctgtgcaggggagacacagagctctctttatctgtcaggatggcaggaggggacagggtcagggcgctgagggtcagatgtcggtgttgggggccaaggccccgagagatctcaggacaggtggtcaggtgtctaaggtaaaacagctccccgtgcagatcagggcatagtggaaaacaccctgacccctctgcctggcatagaccttcagacacagagcccctgaacaagggcaccccaacacctcatcatatactgaggtcaggggctccccaggtggacaccaggactctgaccccctgcccctcatccaccccgcaggtcagcccaaggctgccccctcggtcactctgttcccgccctcctctgaggagcttcaagccaacaaggccacactggtgtgtctcataagtgacttctacccgggagccgtgacagtggcctggaaggcagatagcagccccgtcaaggcgggagtggagaccaccacaccctccaaacaaagcaacaacaagtacgcggccagcagctatctgagcctgacgcctgagcagtggaagtcccacagaagctacagctgccaggtcacgcatgaagggagcaccgtggagaagacagtggcccctacagaatgttcataggttctcaaccctcaccccccaccacgggagactagagctgcaggatcccaggggaggggtctctcctcccaccccaaggcatcaagcccttctccctgcactcaataaaccctcaataaatattctcattgtcaatcagaaatcttgttttatctcattttttcttttctcacatataattcctagcctttcctgggttctcaatttgtggtggaaagaaccctgaacccagtgggaaagttgcctatgtgaaggggttctcagttccctgggcatctctgcaggtaaggccttcctcacccagaca

SEQ ID NO: 740 - DNA, 2425 bp, Homo Sapiens
ggttcccagaacactgcactctagggcaatcagcctctgcatgggaggagaggagcaccctctgcaccaccccatggtgttaccaaaagttgaaccatgggttggttcaactttgcagagaagagaccacctatcccatctgtggaaattcactccttagcgacactaatgccctctaataaattcaatcctgggcctgagtgatggttggtgcaaaaaacaaattcaagatcccagtgtcctccagaagcctggatttccagggatcctgctgtgggtcacaggatgtcaccggtcccctctctctgtgggttaagtgtgggggccatgtggactccctcatgagcagatgccaccaggaccactggccccagcttcctccttcacagctgcagtgggggctggggctaggggcatcccagggagggtttttgtatgagcctgtgtcacagtgttgggtgttcggcggagggaccaagctgaccgtcctaggtgagtctcttctcccctctccttccccgctcttgggacaatttctgctgtttttgtttgtttctgtatcttgtctcaacttgtggtcagcctttctccctgcatcccaggcctgagcaaggacctctgccctccctgttcagacccttgcttgcctcagcaggtcactacaaccacttcacctctgaccgcaggggcaggggactagatagaatgacctactgagcctcgtctgtctgtctgtctgtctgtctctctctctctgtttgtctctctgtctgtctgacaggcgcaggctgggtctctaagccttgttctgttctggcctcctcagtctgggttcttgtcggaacagctttgcccttgggttacctgggttccatctcctggggaattgggaacaaggggtctgagggaggcacctcctgggagactttagaaggacccagtgccctcggggctgatgctcgggaatcacagagctgggacccagagccaggatccagacccagaatgaggtaggaggtggaggggctgccctgggcgtctgggggctgccagggactgagccctgagccagcctgagactcaggaaaccccgtcaggagggagaagggagaagcagactctggacaccagaaagccaggggaagggtcacaaaaggagtggatgtgacggaagggcgggctcctgggtctcttcagaacatatcccctgtgcccagggggatcagaggggcagagtccactgcgtgaaagccccactgctatgaccaggtagccgggacgtggggtggatgccagaaaagactccacggaataagagagagcccaggacagcaggcaggctctccgatccccccaggcccttgccccatacacgggctccagaacacacatttggctggaacagcctgagggaccaaaaggccccagcatcccacagagctgaggagccaggccagaaaagtaaccccagagttcgctgtgcaggggagacacagagctctctttatctgtcaggatggcaggaggggacagggtcagggcgctgagggtcagatgtcggtgttgggggccaaggccccgagagatctcaggacaggtggtcaggtgtctaaggtaaaacagctccccgtgcagatcaggacatagtggaaaacaccctgacccctctgcctggcatagaccttcagacacagagcccctgaacaagggcaccccaacacctcatcatatactgaggtcaggggctccccaggtggacaccaggactctgaccccctgcccctcatccaccccgcaggtcagcccaaggctgccccctcggtcactctgttcccgccctcctctgaggagcttcaagccaacaaggccacactggtgtgtctcataagtgacttctacccgggagccgtgacagtggcctggaaggcagatagcagccccgtcaaggcgggagtggagaccaccacaccctccaaacaaagcaacaacaagtacgcggccagcagctacctgagcctgacgcctgagcagtggaagtcccacagaagctacagctgccaggtcacgcatgaagggagcaccgtggagaagacagtggcccctacagaatgttcataggttctcaaccctcaccccccaccacgggagactagagctgcaggatcccaggggaggggtctctcctcccaccccaaggcatcaagcccttctccctgcactcaataaaccctcaataaatattctcattgtcaatcagaaatcttgttttatctcattttttcttttctcacatataattcctagccttccctgggttctcaatttatggtggagggaattctgcacccagtgggaaagtcacccaagggaggaggcttacagcctccccgagtcatctctctggaaggtccttcctcttccagtc

SEQ ID NO: 741 - DNA, 2473 bp, Homo Sapiens
aaagcattaattaatgacagaacaaggaaaatggcacaactggttcaaaggagaatttaagcaccacacatagacatgcaggcaaacacaaatgctggcattcatttacaagtagatacgaaatcggtcaataacttgaggataataatcaattgcattccactggacacaattcatttgcatttctatggcaccaagcatttgtattactattggtttttttcttaagcttcgagagttaggaaatagctcaaagatgatgaaaggcatagatatcctggagagttatgctagacagaacattcagcaatctttatagattttttggcccatatcaacatcttttataattttttctgacagtacagtgcagccaccaccatcccagagaagaagtgaggggctatgttgtgtttcctggacctctgtttcttaatctgcaaaatgggcatgataagagcctttgacaatccagagacatgaggtcctgctgggacaagtaccgtgggaaacgtgaagtgctaagggacagtgtcccaaacctcagtgtggccctccttcctgatttagttcacatccttgttctaccttggaagatttattttttttcctttataccaactttgatttgataatacccttgaaatcagagaatgaggtgctgattctgtatgttttttttttctaatacatatgaatatagacaaaaagccattgagataagaaaggtaagttcattcttgtaccaactaatccagtgctctgtgggaagtacaggattaggaagaaattaaatgatagcctacaaacacacacacacacacacacacacacacacacacactccactaaccaccaccaccaccaccgccgccaccaccaatgtattctgcaaattcatatacaatttgcaaacctcctcctgaaataagagagagagggcaattgaaactatctaaggcagcacttggaacacgcaggccaaagactgagccagggagggattgttatcacatgggctgtggggaggcagagctcccctgtgtccccgagagcacccctccccggggccccaccagcccccaactcgcctctcgaattcccacctctccccttgctctgcgcctttggaaacccagacagcggccccactcccgtgattcatccagcaggaatgtgggagttctcgaattgctccagctaaagccttttaattccccttcggtgatgaatgggtgaggccctcaaatgaaatgtggaggctcccagtcccagcccgcggccctccccctcctcggcgtaattatttctgtgcagaacatgtcaagtgccctgcttcccgggaacttgtttcgcatgcaaacatttggtgattaagcgaggcttacttaattaagcactttgtaatgactcttaaaccaaagaacagtggattaggagtccagttcgtgctggtgatgggaaaggcagcttcatatcacaaggaggcagacagtgatctggtgtggggaggcggccgggccaagcggggcagagtaggcgctctgggaactctgctagaatcactcattcattcattcaatcaatttatttttggagcacttcttggagccagagtagctggtgaacaataataataataataatagggccaggcactgtgctaataagtctgctgaataacaagagtgaggaggagccagagatagttattgagagctgactctactaggcatgaactgctagtagtagtgacggcaataataagcattttcattgcagcagcaaatccttgaataggattttgctgtggccctgcgtgccctgaaactgctgggtttctgccatggacttggcctttggaaacagcccccatctttgttgctgtcttactgactcactggcttctcacccaccagtggctcacttcccacatctgtgtaatgggtagttggatctagatcttctctaagatgcttttgggtcttaggagcctagggtgtctcctctgcttctgggggccacaggaatggtggcgccactttgggggcctcagctgcaatattgcagaaggcttcagagcccagccctacacagctccaggacagagcaagggtgactctcagctcagaccttcataaattgtgggaccttcaccaggtagcttgtcctctctgacggacaagtccttcacctctcaattgaaataacccttccatctgcttccagggctcctgtaagggaatcacacagactcatggacatagatgccctttgaaaaccatctacctggtggcagaagccatcatgtctcaaacttggacccacgaacacaccccaatgtattcacttgtctacttgctttggttttctcatttctaccataacccggaaaagggttctaattgccttctaacctgggagatcatcttagaacaaagggcttccatgtgacttcagtgcctgagttgat

SEQ ID NO: 742 - DNA, 2439 bp, Homo Sapiens
aggaggcggaggttgcagtgcgccgagattgcaccactgcactccagcctggacatcaagagcaaaactcagtttcaaaaaggaaaaaaaaaaaaaaagaaaaaaggaaacagacaaagatggtgactcccttggggaggtgacacatggttaagcaccaaggatgagcaggtcagatggaggagacagtggtggctccagacctctgcaagcaccatgggaataagcatctagggttcacctgcatcttctctccccggcacccagctaggttcccagcacgcagcaggcacatgggaaaatggctcactctgacccattcactcaacagccagcaggatgctttacaagtatatcagccacgtcattctcagctcagaccctgaatgacatgaggccctgatccactgggccccatgtgtccccctgacctcacgttctgcttctctccccgccacctgtgccccagccacacctggccgcctgtttttcaggcctcaaacggctgctagggccttggcacctgctgttcttctgcttggagggttcttctctcagatgcccactcaaaagtccccttcccaccaggtcctccctgggccccctgaaattccaactccccccatcacctcagagccccctcgtttcctcatccttgcatttattctaacacacggtacatcctacttatttgctttggttgtctgtctagaacataaccccatgaggataggtatgttttgtgttttgttcagctctgaaatggtagaacggtgtccagctcttagtatgtggtcaataaataggcagtgattccatgagttaaccaatgagtgaattaatgaatgatcagtaaatgaatgaatgagtgaacgagtgagtgaccagtaagagtgaaccaatgagtgtgtagatcgctgtgtgaccaagtgggccagtgcgaaaggtggggggcagaggccgggtgagctccctgggatgcgggtagcaaggacagggctgtggtgtgaaccaagacatggtgccccctgcccctgtctttcttctgcagggagaggggctattttggtcctgagtacttttaaccccatgtgaaccacgcggacgggtggacagttggagggccagtagcagcagcaggagcctctgcccacttgggggccccgagtgctggcatgatctgactccatggtgtgggcggggtccgggcccacttggaggagcaggatatgtcgtcggaccacagttgggggtgccagactcaggccacgccatatttggtgtcagagcccaagacccaggaatagaaactgtgtatggggccaagttggccgcagcccaatatccaggtgacctcaggcccaaagcatgctcctggcccccgagacgggcctcgcagttgcagcctatgtcctggaccttgtcagctgggcttggcacacccctgctgcctgcccctgcctccaggctcactacttcccgccctgtcaccagggagctactcccagttagcctgttactgtggccactcccctgctctaagcccttccatggctcccatcgccaggattccccatgactcatcttaggcaggaagtgaggagagaggagaggtgcagggcatggccgggcgcggtggctcacgcctgtaatcccggcactttgggaggctgaggtgggcggatcatgaagtcaggagattaagaccatcctggccaacacggtgaaaccccatctctactgaaaatacaaaaattagctggcatgatggtgcacgcctgtagtctcagctactcaggaggctgaggcagaagaatcgcttgaactcgggaggcagaggttgcagtgagctgagatcgtgccactgcactctagcctggcaatagagcgagactccgtctcaaaaaaaaaaaaaaaaaatcgagaggtgcagggcaatggagacagaaggccaaaggctgggtcagacccctaccagccaggttcttggcaccagctctgcagaccccaactaggggcatcagcatcaggggctaggcccaagggcctagaaaaggccctccaagctggtgcttttcatccctacacaaattgcacccccacctgtccctacagtaagggcgctacccctccagccctgtgtccagcccagctcagcctagcactggccaaccatgacccaacaaaacggagtccgcactgagccctccatccaggctgagtgctgacagagaggctcccagagcaccagggttatgcccttggagattccgatgtcctgacgggaacacagaggccccgagaggcaaaggtgtcagaggcgtgtgagccagaccaacaccatcttaaataggagctgagtaaaatgaggctgacacctactgggctgcattcccagacgggtaaggcattctaagtcacagggtgagataggagttc

SEQ ID NO: 743 - DNA, 2188 bp, Homo Sapiens
ctgtgaaaacgcttttgagagaggggaaggagctgggaggctctgacgtaaagatactgaagagcagccttggaagcccacagaaaacgcgagcttttagaaaacaagaaggaaggctggtgcagagggtgggtccggggcaccgcagcgggattggcctctggtcggagggaacttgcggtagggaaggcaggggaggggaagatgtgagtgggtttgtacatgcactgctgtgagatgagagggtttgcattagtcagggttctgcagagaaacagagccaataggatacacgtacataggaagagattcgtaaggagacacttcgtgcaattctggaggctgagaagtcccacgatctgctgtccgcaagccggacacccaggaatgctggcagtgcaagttccaagacctgagggccgggatccaatggagtggacgccagtcagagtctgaatccctgagaaccaggagtaccaacggccagagggaacggatgtctgccttgggtcaggcagagagaatccaaacgccctccacctttttgtcctgttccggcttccacagattggacgaggcccacccaccttggggaggggccagctgctgtgttcagtccgccattgcaaacacgaagctcttccagaaacgccctcacagacaccccggaagtcacgtacccactctgtaggtgccccggggcacaggcaagcggacgagccagttatccctcagagctcctgctgcctcgcccgctttctctcggaaacgtgaagtgtggcctcagctgaaagtgaggtgagcgtgagtgtggacatgtgtcagtgtgcgtgtgcatgggaggagtgtgtgtgcgcttgatgacgatgatggagcccagtgagccaccgtccgtggagtgtcagagcctcctaggatggccacgccgaaggtgcggaaggaggcggctggcccagcgtcagacgtttccagcatccgcgggagtgaaacggaggctggtgggtggttgtgatgtgtttctttaagaatggatcctgcaggttcttcttcctcccggtctccggtgccggaaggaggacaccgcgagtgttgcttgtttgcttacagagagtgtgcagcagcagcagcagcagcccggggccagctttgggaggactaaggatatttcagggttttaagccaggggatgacacagtgggcttaaattcaggaaaaaaaaaaaaatgcttctggtggcaaggacagggagagactgaataagtttggggtaagtggcaaaatcagagaaagaaaaccttccaggaggtctgagcccaggaaagcaaccttaaggatccgagctgacaaagtcatcctggaggtggaggcatcaggcccagctggagagattgtgagggcgaagaacctacaggaccttttgtgaaagaaaagaaacaagctcagttttgagtattttgcattcttcacttggggggaaaaaggagctataaaaattgcaggcaggtgtgcatcatgtcttggtaatttccaaaggattgcttttaatatgataggcacataaaagattttaaaagcaactgctttacgtgtacattatcgactgctcctggagccttatggcaccaaggcagagctttgccattaaccacagctccatggcagcagagttacgccggcaggtagctgagggaacgtgaggacatcagaactggggttcacaggaggcaaaaacctgcagctgcttgtaggaggcctcaggcttcctgcacccgcctctgttatcctgtggattggggcagccagtacagcaaagagccggcccccggagcccacagcctgcagggagacagacaggaaaacagatgatgagacgccctctcatcatagcaggcactattttaccacggcacggcaggaaaagcacttagatttgctggggcatctgttgaaatgaggtagagaagtttccttctgcacagtctcctgagttctttccaggggaagtgacgaaggggtgacgttgttgttgctcagaaatttcttgacagcctgcttggggcagaatgtggggatctgaagggtgcaagcgtgagcacaattcttcatggattgttgtgtgagatgatgagaaaggaactcacccatctttctggagggaggaggagacatgggggcagggggggagcca

SEQ ID NO: 744 - DNA, 2449 bp, Homo Sapiens
gccttttctgtcctctgagtaggggctgagggtgcgttgggagaggagggctggggccagggagggagtgggcacgcagaccccagaagcctgggagccagcggctgggccctggatcctgttacagcatcgtggaggtctgagagggctaggccagctcctgagcctcttggcctggaaagggccttcatgtgggtgggccaggaggtagagatggatatcatgtctaggcctggccccacccacttctaatgccaggaggaccgggggaggtcactgagcttctcagagctttagggacctccccgtgccctttcacatctcggtccccaagggacccagaaagggaggtacagtttatgagtcccattttattttattttatttattttttgagagggagtctcgctctgtcgcccaggctggagtgcaatggcacaatctcggctcagtgcaacctccacttcctgggttcaagcgattctcccacctcagcctcccaagtagctggaattacaggtgccagccaccatgcctggctaatttttgtacttttagtagagccagggtttcgccatgttggccaggttggtgtcaaactcctgactcaggtgatccgcccgcctcagactcccaaagtgctgggattacaggcgtgagccactgtgcccagccatgagtcccgttttacagattcgagagctgaggttctgagaagcaaggcctggccaggcctcctggcctagggaggcttagggccaggctgcccccaaggccaggccacaggattgtctggggcacagggcctgctgctgggctaatacccctcttcctgcccgccagcatcgagggggagtacgtgccagtggagggcgacgaggtgacctacaagatgtgccctatccctcccaagaaccagaagttccaggccgtggaggtggtgctcactcagctggccccccacactccccacgagacgtggtctggccaggtcgtgggctcctaggctgagtggttcacaggccagctggccgggggttggggagccacacagggtgaacgggcagcagccggctccatgccccactgccctggctgatgagtccttcggtggcctcagtgtgcacgtctgtctgtccgtctgtgcttgtggctatgagcgtgtgcctccacccaccccacgacccgtgactactgtgcaagctggccaggaggtaggtggagggcaaggccaccagacctggcttcgcgctgtccactgcctctctcctcccctccctgccgcagacacgcaggacccgctcgccctcctgcttacccgtccccacggtgactgagctgcgagagcctgcgctgggctcactccctggcctccgcccctgagctgtcccgtgtcagtccctggcccggagccaggctctctgtgctacttacatctccctcccttggctgaggtcccccgccacagcctggacccttccctcagaagcctggccgatgggtgcttttggggagcctctcagcctctggcaggggaggaggactgacacggaggcacacaggcctctcactgccgaggccagccttccttcctgctctgctctctcagtgccatggagaggcaggaagaggggcctgagggcggaaggggtttggggctcccatttcgccggccagtccctcctcctcagcctggcagtggcgctgggctccttcccctgggctgtactgagccgagcccaggggtttgcagagggtgggggtccatctctccagcttggctgcagacctcctttaccctgactcacaagccccactgatgctctgggccatgcccggctgacggctgctgtggatgccgcgagggacggacacacgtccggggcacccacgaggagggcccccagcctgggagactggccctgcggcctccacgtcaaactctcttcccaaagccctaacagaccagtggccgaggtgtggctcttattgcatccatccctgaagatgtgtggctgttgctgtcacctggagtccttttggggccaagatgtgtgtgcacccggggtcgtggccattcactcccaggcaggggtgagggtggcctggcccaggaggccaggaaggagggccctgtctgcctccacctctgggtgcaccccctgcctaccaccctcccttctagagagcacatcgcctgaccggggagaagtggggccgtggttcgagggagggctggccaggggtgggacccttatgagactcagtctgtgagtaaaactgggggctcaaatgcccaggatgaggggatcagtgactgtctaggaggatcccttgccttgtaggtgccccaagaccgcagggtagaaatcagccgggatgcctgcatcccacccccggccccagggcccaccacataaaatctgggagcccagagctgctgaggtgt

SEQ ID NO: 745 - DNA, 2488 bp, Homo Sapiens
aattccagggaggcggggcggagacggcggcgaggaggaggccgcggcgcgggacgcatagagctgcggctcgggcggcgcctccctgcggcggcccggcccggctccggcccccgctggggcaatgctccccggggccgcgggatgagccaggtgagcgcggagacccccagcactccctgcctggtgcgcatggacgggggtggggaggcggggcgggaagcggcgtcctcggcctctgttccccggggctgtgtgaccttgggcggccccgcaccctctctgggcccagagccccagcaccggcagggcctgcggaggccgctctgagtcctggccccgcaggcaccggcctggagcgctggggaggcttcttggaggaggcggggcctggccctggccccggatcgccgagaccggccacgctgcgccgcctggacgccgggctcctccacccacagctctgcgaccttcacgagctcgaccctttctgcgcctcagtttcctcatctataaaatggagataatgcctccgcgcgctgagcccgagcgcggtcgtgctgttacactattgctgctgctatgtcgttaatgacggcacagcccttatggaaggggggccaaggaaggcacggggaccttcccgcaggacatggggtgggcaccagccctaagccatgcacataacccactctgaggtcaggacctgggttcctttcgtgtccactgggggccttagccgttgtcttcacttctctaggtcccagcccttcacaatgggcgcgcctccctgcctgagagggaggccccagccaagccccagtttccaccgcaaaaagccacacagcaaacacttaatggaccctaaatttataaaaattatcccatagagtcctatgaggcagggaatgttactgtacccatttcgcagatgaggaaacttggggcaccgacatttcccagagccaacatgtaaaccaggcatttggcctgagtgacagactggtgcaggtggccagcagcttaatttgtactgagcgcttactgggtccccacagcgatcctgaactgtgttcctgcccacagtgactcggccggtccgggcatggcagacccagtggcgggcatcgcgggctcggcggccaagagcgtgcggccatttcgctccagtgaggcctacgtggaggccatgaaggaggacctggccgagtggctcaatgccttgtacggcctgggtctcccgggtggtggcgatggcttcctgacagggctggccacgggcacgaccctgtgccaacatgccaacgccgtgaccgaggctgcccgtgcattggcagccgcccgcccggcccgaggtgtggccttccaggcgcacagtgtagtgcctggctccttcatggcgcgcgacaacgtggccaccttcatcggctggtgccgcgtggagctgggtgtgccggaggtgctcatgtttgagactgaggacctggtgctgcgcaagaacgagaagagcgtggtgctgtgcctgctggaggtggcgcggcgtggggcacgcctgggcctgctggccccacgcctcgtgcagtttgagcaggagattgagcgggagctgcgtgctgcacccccagcccccaacgcccctgccgctggggaggacaccactgaaaccgcccccgcaccagggactcctgcccgcggcccccgcatgacacccagcgacctgcgcaacctcgacgagctggtgagtcccccagcaccaggtgccagggacccgacagcacagccagtgcctgcaatctgtccctgaacctcccagggtccaccctgctatctgcagaacagtctgccccacaaaaagagtgcacatgttgagcaccaaaccgaggaatgtatacctgaccccaaggaaatgggtagcccacagagagggaggtgccggggagatgacgcagcccagccgggcctgggacaggatgcgggctcctggcacgatcttccctcactttgtgtgctaactgtgcctcaactgagcttgtgcattccttcttctggggggccgcatgatcggggcgcctcctctgtgccctccctgcagtcagtcttaggcagatgtacccacaacctcatggaggctcgaggttgagcgggtgctgtgatgctcggttgagacgaggcatggaaaaacctgggcaaggtgcctggcacacagtaggtgccccagggggctctgcaggtctccccactccccaggcacccctgggaagcctagctgggttgctgctgttgctgggagcagggatcctgtttggaattacaggattcgttctactctaagcataggcgttgctgggccctgcccccaagtctctcctctcccaggatctgggtggcccctgccacccctgagggctggaccaagagtttccttcttatcagaaggtcaggactacaatgtgcctgcctgggaggcagatagcggatggcagtgggc

SEQ ID NO: 746 - DNA, 2379 bp, Homo Sapiens
ggtcacccgcccagctatggaccttcgcgcctaactatgagtccctccatacatcacctatcccccactcacctgtctatactccatcccccgtgtagccacgaatccatccagcaccccctcaccactcacacctctccaatcacccatcagtgtctgtccaccacatctgcgcatcctcccatgtccctaaccacccagtcagtgaccccccccccgccatttaaggccatccacttgcacacacagacctccacctacccagacgcacatcccctggtccacccattcgcctgtccaccatccattaagcacaggaccactcatccatccgtgggctggtgtgggcagccaccacccgctctgcccatgcacgcattcatcctgcgctgcttctctcctgcagcaggagtgggcaccgtacactaccctgcccatgaagccccgagggggcactgcctggctccagccagccccatctgccccgttttcccctgcaggacagtggtgcctgtccattccctctgctagctgccagccctgctgtcctccgcactttctggcaacctcactgtatgaaactccccaaatcctcctccacgtcaagtgtcaaaacagcccagtttaagtgctttcaggatttccacggagcctgaccgcaaagaggtgagcacatttaagcccctactcccagcccagccccctgcatcagagttccagggctgactctgcagaggggaagcagcctcctcccagaggcaggcacacagtaggtgctcaagcaataggatttctgccatttccacacttttggaagaacctgcccatcccccatcctctgcccgctctcaaggaccgtcatcctgaacttggtaaggcggctcttcctactcccactgaatgaatgaggaaactgaggcagggtgcgggggtcgggaggagaggagcattgtccgaggcccccgggggaggccagggaaacctcagtccggcaggtccccgggttcccggcccccagggccttcttctcaacccacccccggcccctccaaggctcccactcacgcggacgagccctccagcttgccgtagagccagccgttctgggcctcgggcaccaacacctccaccacgtccccagcggagaagcgcagcagcgtgtggttggcgccctccgagtgggagaccagggcgcggactctcctggcgcccccgccgccgcccgggcgctcgccaaaggagttggagcgcgagctttgggcgctgccgctgtagagcgaggctgtgggcgggagagcgcggcggcacgtgggcaggaagttcttcctggcgtctgccctcgatccctcctgctgcagccccacccccgcgcctctcccggccctcctgccgccccggggcgggggcactcacaggccgacggcgtgcggggcagggagcgacggtctggctctagctgggacgcgggcctcgcgtcgggctcggtgccgtaggagccggagccgtgccggctgcggggggagctgaactctcccaggggcctcgggggctgcgggggagatgggcaggggagggtggggcgggggggggggggggcggggccgcgccctagtccagcccccacccccagtcccaggcgtcggcgtaggggttctgggggcggagaccgggccaccacgggggcgcggagaacgcgccggggcggaagggcaggccgggggatgcagcgtagagcgggagcctggggggcaggaggctccaggctgggggcctgaggccccgggcccccgcggggggcggcgggggcgcgaacggcggcgggggcgcccagggcctcaccatgtccaggcaggtgggcgtcaggcggcccgaggggtagggcggccccagcgcggggcccagcaggccgggggagtgggcgcgcgacgggctgcggctggcctcagactgctccttccacagcagcacgcggttctggagcatcccccgggcctggccgggcggggacacgggggtcagccaggtccgggcggctccctgaatcctggggacccaaaatgacaccctcgacctgagagctcaggccctaccagctcgggacgaccggattttctagctggaaggagccagaagccagctcaccgtccaacccgcaccctctacttttggcaaaggcacctccattttccacgaagagcttcctctgaccccccgcttcccgcgtcaatgtgtgtgctttgagcggggctgtcctcaccgcccagcttcaggggtaggggtggcacccaggcctggccactcaatcaccccatcctccttcctgcagcgataggctcaggaatggcgcttagatagaaactacgaccaaagaacccagtc

SEQ ID NO: 747 - DNA, 2385 bp, Homo Sapiens
tagggaagatcctccgggacctaacggcccaggtagctgcgtctttactccccgcctgggcagggaaggactcactccagtcacaagcagcctggagatggatggtttggcagagaaggggaaaccccagcaccaacccagccccaggccccaccttgcagccaggtctgccctgcccagagtcctcgaggggctcagcctgaccctgacaggtagaagagaccccactccaggcccagaagtgagggagtagagcaaagggtccctggcctactgtgtgaccactacctgccgccctgcccagtgggacagggatgccccgcacccagcctcctcaccatccaggtggcctgggggcacccaaggcttcgggcagcccctgagctgggcccaggtctcatggcggtctcagggcaggcagggtgagagctgacagggaacagatgagggaagagcaccccacacacccgggggttccaccataagacttcctcagcgtttctctttccttccaggtcttccacccttggccacctccccaggtgatgcctgaagctcaagggactgtgtccaccctcaggtcagtacagtttgtgaatgttgatgaaaattggggctccccacatccctcccttctggctccaccctctgccgggcgtgcctgaaactggacacacacacacacacagcacacacgtgtatatgcaccagccccagagctctgggggccaaggagccaggcaggtgcttgctgcccattggcacgggctcagctggatctagcccggcctcctgctccttgcccctaccagcctctttctgcggccaccagcctctttctttctgcaactgagggaccagggctccaagcagctgggtttggtccaggtctggccctgttttttgggctcccttctgcctgagttgggtgacactcctgtttgcaaggatccagctgtctcaagggccctgggaggggaggccaggggcagcctaggggaccagtgactacagggcaatttgcagtacctgctgggggctcagcaggtaagatgtcccctgcctgctgctgtctgtcatggctgtctggtggccatggccgggggcgggcttgtcatgctgggaactgctcagaggctgcggccagcctgaggcccctcgccctggcgagccagcccccgagtgcagactgtcgccgatgattcttgcctcctggggcatccgtgcggccatgtgggttgggcaggactggcattctcccctccccaccgttgccatggccaggggcgggcccacctcccgaggctgtgcggagaggaccccaggctgctgcatgtgagcagagcagccggtgtctggcccggacccctctgccatctggggcccggcgtgtttacaggtcggccttgcccgccagactctgcagacgctgccccggggcctttgtgtctgcacgcagggctgagccaccagccgagcggagagtggggagggacacaggtggggagtagggggaggcccctgggggaatcagggaggaggggcaggacagaagagaaaggggatgaagggtaacagaggaaggagaacagcgtggggacaggagaggggcagggactggggaagaggagacacaaggcaggacagggcagggcagcccttggaactgtggggctgtcacagggataccagcctgggggagcagctaaccccaggcatctgacagggacctagtgggtcttggccaaggcgatctggtcaacggaactggggttttcctggcacccaccataagcccaggcctgcccgtgggacctcatcccacctgtacccagccctccctgtatacacagctggccaccacctaatgtaatccctctgacatcccacaggcagcagtgttggtctctagggtccaaatgaaacagaccccacaggcgtgtccctcacacaggactgagcatggaatgtgcccctccctgagtctctgactcccaagcctggactgacatgtccagggaggctgcaagggtgtgtcccctggatcatgggcagggggcaccgtgtgcagctgctgaggctcaggatgtgtgggaaagggcctggagtggaggagaagaggcctgcaggggagtggacagtccagggctgggaccagcaccccaatatgcatgatccgtggaagatgaggctggtcgcacacagaaggtgcttactcagtgctcgtcagatgccagatgctggcgtaatcaccacaggggtcacacaccctccgttaggaccaccagcaaggcagggccaccgtcccacactgttcttgcagagacggagactggggatcaggagcctggccctactctggcctgcagccttgggggctgctgg

SEQ ID NO: 748 - DNA, 2452 bp, Homo Sapiens
gagtggagctgggtgtcccaggaggatgtcagcccccatcaggtcctcacaactgcactgagaggccagccctgcccagtttacagatagggacactgaggctcaggcaggggaggctcggggcaggcaggttgtgcggcactggcggggccaggtgggtgtgtctgactgggagccactgcctgtgccccggatttgagacagcaacaataatgaccatcacaaccatgagagcggcacctcccaggacccaggccacagcctcagtgatgatgacagcacagcatgtggcaggaacgtggcaacatcctcgggcctggcttaaccctgggggcacagcagcttccctcggtgccccctccactgcttgctcctttagcctgaggtgggccctggctgtacagaggtgagacctgggctgtcagggtgaggggaccagggcccgccacctgaggggagagaaggctcagcccagaccctgtcccagacccctagtgctgatgctcctgctgcatcccttacacgggatttgctgagcagctactatgtgctggggccctgagtcgggctgaggttctggtcgggggagctgcacaccactgcacaactgacaagggtagggagtccagcaggaggacggaggtccagatagtgaggtcaggtcggggattggtgggagggcctggctgggctgaatactggtggaagtgtgtgtgtgtgagtgtgtatgtgtgtgtgtttgtgtctgtgtgtgtagggggtagtgctgcctcctgccgcgctgtgaactgagtgtgcaactgtgcaaggagggccaaggtgcttagagaggctctctacgcctgggaggaaaacccaggacctccacagtgcgaaggagacaccgttaggtgacgaaggcactttgtcgcaggtgcggtgtccctggggtgcctgctgggtcacactgggctctgggccctcaggggttgtcctgactactttcaggaggaaatgacgggtggagtcttggggtcaccagagaagacacagtccagagaatctgagcaagaaacttcacagtctgagttcagtagctactaagcggagggaaagccccgcttctccgtgaaattaaacgaaggcagctgagcattgtgaccattgcaccactcctgacgcccctgctggctcctaactcagttataaatcccacgggcgggggacggcacaacgccccacctgcctggccacgcgattcggcagcacttggattttgcccagccagctggcaggaaaatcacatttcttatgattgatggagtgcgtgtctgtggggaccaagaggcgggggctgtgtggggctgagccactgccgccagggccttcaatactgctgttcagcggtggcctgggggctgcctcggggccctcacccaccaaacccaaggggtttctgagaggggaggctgtgccggcctccgctggggagccgaaggccttgaggctgggcccagcagtcgcccagcttactcctctgccccagctctgggatctgctccccgcccaccgtgggccctcccgctgcagcagccagggtgggagccaggggcagggaactcctgggcactgaggcagtcctggcccccagcacagctgccccttgcctccacctcccctggcatcacctgactgccctgtcctggcagtgccttggcctcctgtctctgtcccccctgcggtggtccttgacccactgcttgggtcccactaagcctccccagaagtggctggcctcattaggagactccaggagctcaggggatgtgggtgtgtctgcagctgtcttcctcctgctgcccctgcacagggagccctgaggagctggagaagctggattcattcgcaggagaaagagctggggtgggcaggggagaaaggcagagaagccacagaggctgggctcataggagacttctggaggtgaaagcagaagtgaagagagattttgaagagcagcggcactcagcaggaggctcctgagagggctgtgaggggaacagaagcctttccaggggctgatgagtgttcaagaacctccctggtccacactccttgcctggacattctccagtgtgcccgaggagggccgcagagggcgtttgtaatggctgtttgggtgccaagtggtgtttcattgactgggacaccacatggaggctgggccacccggggaccagggacctagtcgggttacagtcagagctataatgctggagatgtcctgggtcacacagctgggaggaccttggagtggcaggaaaggaggctcctccctgatctccaaatgaaatcccctctcacgttggttcctcaactggcaaaactgaagcccaaaaaggaagctcctcacccagagtcacgctgcgtgtcaaagagcacagcgggagtgggacggtgcccgtgaatccag

SEQ ID NO: 749 - DNA, 2482 bp, Homo Sapiens; identical to SEQ ID NO: 512

SEQ ID NO: 750 - DNA, 2499 bp, Homo Sapiens
gggaggggcaaagtgagagttaaggatcctgctctccttgggatctcattttattctcaaccacaccacaggagaggtggatgctcagggaggccagtgagttgcttaggggctcacatctctgagtggctgcaatagcattgaacacttacagaggcctacctaccacactgagctgcctggtggcactgccacttcccagtatctgcaaaccatgtcccaggtcacacagcacctttataccttagccccatgagaaaggagggtacccccatgtaacagaggctgttggggctggcagaaagcaggaacaggatcagaatccaggatgagaaccaaaggggtccagagactctgaatcagagagaccttgttcaagttctagttccgcccatcacgtcctctgaaatcttaggcaagttactgccagaggtctcagtttcctcacctttagtggaattggtaaggcccctccctgctcttgtgaagtttaaaatggcacacaggaaaggatcaacagagatgaattattattattactattattatgctagtcatcatttttattatcggatagtgcccagaagctgaactcccctgtaacttgagggtacaatgaggcttctcagagaactactcgtgggtgggggagggggaggcggaaacctgttgaaaaccttgctgtcatttgagactcagtgtactcctctaaaatgcgtgtgatgaggacgcctccctccctggcaggcgtttgtggcagtggagatactagtgtgctacaagaccccccctcctcctcgcgagtggtggtccaggctggggagcagccctgctctccctgcctaacatgcgcctccccaacccctagcatcttcgaccgcgaggaccaggccagcccacgggccggcagcctggcggcgctcgagaaacggcaggccgagaagaagaaagagctgatgaaggcgcagagtctgcccaagacctcagcctcccaggcgcgcaaggccatgattgagaagctggagaaggagggcgcggccgggtgagctgcagaagtgggctgggcagtggggggcggggcgtgataggcagtggggggcggggcttgatagttggcccggcagaggcgggaagaccgcgcggctagatctgtggtgcaaaggcccgaaggtcatggaaggcggggcctgggatccactgggtgggcccaccgaggcatgccccttatagtcgtgtgacctggtcctgacaccgcccctacagcagccctggcggaccccgcgcagccgtgcagcgatccaccagcttcggggtccccaacgccaacagcatcaagcagatgctgctggactggtgtcgagccaagactcgcggctacgaggtgagccccgggaggccagggggcctggaggcctccccagaccccagctcaacacctccttcttagcagagctcctattacccagtacacttcctgccactgtgtggcctcacagggaacatggaaaggctcttggggtgaggaaactgaggctcaaagaggacacaaggcaagccctagattccagaatcagtgatgaagtaacagggcctcttgggtggtgggcagggttcaaggccggatcccactcttggagtcccctccttgttgctctgtaggaggccctgagtcaatttctctaaatgagggaaggagtgatgaggcatgaccatagccttagctgggtggcgctgggcctctcagtagctctgtcccttgaaattgcaaatatgggagttgacaggctgacttggaggaggctcatgttccaactattcactcattgtgcaagctacggggcctctttgtgcccagtgccctaggtctggaataacagaatgctgaggggtagacagcaggggggagttgcccccaggttcctgaccagtcctcctacggcttatagcacgtcgacatccagaacttctcctccagctggagtgatgggatggccttctgtgccctggtgcacaacttcttccctgaggccttcgactatgggcagcttagccctcagaaccgacgccagaacttcgaggtggccttctcatctgcggagtaagtgtgggccctggccctgctaatgttgctgcacatctggggctggacatcgggaccaggcccagttgccctgagaacccctggagcgggccagccacattgtcagtcagcggctgagacccccttccccagagagtccccgtccttctccatccccacccccccgctgctgagcgtgccaggtgcccgccggaacgaaggagccgcaggccggcctaccagcccgggccaaagcccaccaggtggccctgtccatatcccctccatcctccctctgcccccttctccctctctctccctttctctgtcctgctctcctcccactatcaccagagcttcctgctcccacgggatcccggctggagattccaaaaggaggctcctggcccgggcaccgt

SEQ ID NO: 751 - DNA, 2397 bp, Homo Sapiens
gggaggcagaggcggaggcggagtcaagagcgcaccgccgcgcccgccgtgccgggcctgagctggagccgggcgtgagtcgcagcaggagccgcagccggagtcacagccgcagccagagccgcagccaaagcctcagagagcaggagttggagcgcaggccctgctggatccgcgcctagctcgccgccaggcaccggccggaggacgggccgtggtgtcagctcactgcccgggcgctgtgggaggcagcgagcccgcgaccccccgggccgggcaccgccaggcgcggagcccagatcgcccccctgccaggcctggtcacggccagagcacgcaggagttcccagggtctggatctgcgcgcaccctaatgacctggggactgaagagaaaaaaggaacgaggatttcatctaaaagcataacgtgggcactaggcgaggaggaaagtggagaccacctggcacggggcagaggtgcctggagcccacgcttgagcatcggagaccctggcatcctagcagccgcgaccttggctctgccctgtctgagctggaaacacagcttagcttctagacatcgctggcacaggcctggcacaagtaagcagtgtcctcacctgtctgaaacgggacacggggtcggaggaaccaggatctagcctggccccaagcggaactctctggtggcccagaggtcgtcactggggagcccgcctcctgccctagcctcactggtgcggatgtgccgctgcccgccggagcaccatgatggcaggatgacctcagccgaagtaggagcagcagctggtggtgctcaggcggctgggccccccgagtggccccctggcagccctcaggccctccggcagcctggccgggcccgagtggccatggcagcactggtgtggctgctggcgggagccagcatgtcaagcctcaacaagtggatcttcacagtgcacggctttgggcggcccctgctgctgtcggccctgcacatgctggtggcagccctggcatgccaccggggggcacggcgccccatgccaggcggcactcgctgccgagtcctactgctcagtctcacctttggcacgtccatggcctgcggcaacgtgggcctaagggctgtgcccctggacctggcacaactggttactaccaccacacctctgttcaccctggccctgtcggcgctgctgctgggccgccgccaccacccacttcagttggccgccatgggtccgctctgcctgggggccgcctgcagcctggctggagagttccggacaccccctaccggctgtggcttcctgctcgcagccacctgcctccgcggactcaagtcggttcagcaaagtaagtgcctgggtggccaattgagaaggtgggggtccgggtgggtgcatggcctggatggccctgtgaggggtatggctgttgtcccattttacaaatgaggaaactgaggttcatggctgtggaggaagcagaactgaggctcagagagggccaacagttcagtgagttccaggccccagactcaggctctggaggcccaactcgtgtttatttgtttatttacttatttagacagggtctggctctgtcacccaggctgcattggtgagatctcagctcaatacagcctccgcatcctgggttcaagtgattcttctgcctcagcctcccaagtaagtgggactacaggtgcacaccaccacgctaagctaatttttgtatttttagtagagacagcattttaccatgttggccaggctgatcttgaactcctgacctcccaaggtgctaggatttcaagcgtgagccaccccacctggtcagctaattttttttttttatagacacagagtcttgctatgttgccaaggtaggtcttgaactcctgtcctcagcgatcttcccccctcagcttcctgaagttctggaattacaaaccagtatttagtgatagccagtgatctgtgtttgactagccttttatctcactgtattgttcccatttgatagatgaagaggcttgccctgggccacgtggccagtgagcagcagaggcaagatctaaacccagatagtcagactccatgcttccaagagatgtggcctgaggctttggacacaaaggaaagccagaaagcatgggccagggagagaaaaggagggtctgggatgagctgggatttggaaggtcaggggtcaggtctaagtctggggagggctgttgtttactgggagctacagtgtgacaggcttggtgctgagtgttgaccttgagttgtcatggcaaccaccaactttatccccattttacagatgatgggactaagacccagagaagttcatgatttgacaggctgggcatggtatctcat

SEQ ID NO: 752 - DNA, 2353 bp, Homo Sapiens
agcaggtgcttggggtgagtgacatgacaacacacggcactggcagacaaagcagctgtgccagtctccgagttcctgggactctgccagatgggctgaggctgcagttccacattccaaccccagcagccccaagcctgggccagggcatcctgagcgggcccggctggggtggggatggggtccgagggcctaggcgcaccaggctcctgctgtcagctgtccaagtagacaaagaggatgtcctcatctgtgccatagctggttctggcctcctcaaagttactgatgctggtgctgcacattcctgctgggggtggggaaggcagaacggggtcagtgggttgtgagagagcacctacaccaccgacacagtgcccaggggagctgagtgaggtctgtttcccatccacatggccattcctctcaactcaagtcctccacccccaggaagccctccttgcccatcctggtcttcatgaggtttctctgactcctccccagtaaagcagttggagaaaggcccagagaggggcagaaacgtgctccaggccacatagacggggtaagtctatgtggtcagggcgtccaggggctgtctatgtgaatccagtctatgagagtcagggcagcccttccctgtgcccggagggcagtaggcaggccaggatgggtctagagcaggggctgggtctggccgggcttttctttctgaggaatgtgccggccatcctggtggttgggggaggggtgcagcctgggcagcatgaaagggtaaggcagggacctgggcagtggcgtggggcctgtggtgtgagagggaggggtggccagggtgtagaggaggctggcacagtttgcggcaggtttgcctgcatggcctgaggggtggccacagtgacaagagcccaggaggagcaggggctttggggaaaaggtagggagggaggccctggccacactagattgaatgggtgggaactgtgggcactgggcatacagaacagtgaatgtggaccactctgcctcacccaccccacccagcactcacggtcggcataggctgggttgttgtagaagatgcagccagtggcccggttgtagccacgcagcacgatgaagtggccctggtagtcaggagtgcggcagaagcagtggtggccactgggggtgaagcagcagtacttgacagggctggagcacaggtcacagtgcagcacccccgagttcaccagcacgatggccacatggccctgagccaggtgcgcctggatgtccttcacactcactgtgctgtgggcgggaggggggtcagctggtgctgctgggcccccattccccatccctcaaatggatccctgcttgtgcctgtttctctgttacaaagcttggggatcggctccttttccctttgccctgaactccctgctctgtcactgtggcccaggctcagcctagagccaagcaggagaccggtggggggggtgtgtgtgtgtgtctgaatgtgcacaaagatgagctggctctgtcaggcccttcacggggagagcattcagctccaggtgggtccagtcaagggccactagagcagcacacagaaaccatcctcctactgcaccccagcctggttagtgaattctttttgcccagccctgtctctcctctaccctaaatcatgtgtggtttacattgaaaactgccagccaagcatggctcagacactttcaaaaccaaatgcttctctgaaagagctattttactttttttctaaggctcctggtggcagaaggggctgcccaggaagggctgggccacattgcttccaggggagctccagttcagcaatgacatctacctggagcctccctcactggcagaaggcactgccccatcctgtgccttccactaggcagcaaatccaaatgaaaacctagagcagggctgggcacagtggctcacacctgtaatcccagtgctttgggaggccaaagcggaaggatcgcttgagactaggaattagagaccagcctgggcaacacagcagtaccctgtctttacaaaaacatttaaaaatttaccaggcgtggggcgtggtggtatgagattgtggttccagctactcgggagactgaggcaagaagatcacttaagcctggggctgtagcagtgagctgtattgcaatattgcgccacagcactacagcctgtatgacagattaagaccctgtctcttaaaaaaaaaaaaaagaaaagaaaagaaaacacccagagggacagagggcagatggggctgtgggcagggggagctctaggccaggggctcctgcatctttgctggaggggctgctcaccc

SEQ ID NO: 753 - DNA, 2483 bp, Homo Sapiens
taggcctttcatgtggttgctggtcagaagcacatttgataaggtgtcccggctgtcctggccgtccctacatgaagtctgtctagccaaggcatttccaggggtctaatgagaagggaactgtggttgggtgatttcgaaggtgatgggaaagacgttgtttttcatttataaagctgccagggccagttggggaaaagcagaggaaagggaaactacaagaaagtagatccaaagaaacagaacctgaaagagctccccaggctgctgcctagaacatctggaactaagctaatgggcatggagggagagcagctgccaagccatctcttggcacgagctctgagagccgcctgagggagctggagcagacgccgtgggacttttcccctgagttattgcagcttcctcctggagccggcccggggtggcggctcaaacatggaaatgtggtctgaatcctcttcccagcaaccgctgctgggcctcagtttctctctgtgaggcgggcagttgagcgaaatgaaattataatatttaattataatattgcgagtgtcagacactgcgctgagttctgcatgtggatcctcttaatccttaaaacaactccagaggtggcaatgattgcacccactttacagatagaataactggtcagagagggtgtgtgtgtgttacctaaggtcacggagccagcaagggcaccgggtgagaatttgaacccagagccactggcttcctaaccacagcgctctcctgctgagcagggacaagtactcatcttcccagctctccctgcagtcagggagccagaacaccctgggaccggaaactgctgcctggatgacctcagccagctacctcgtttcgcagacggggaaagtgagaaccagagaaggccggtgactggcccaaggtcacgttgtgtcccatatcctcctctcattcccggacgtccagctccccaacagccccagcacagagctggggaaaaatcttcagagacatccccttgggaagacagctggaaggcagggctgagccggggtcatttgtgacccagcggtgaggtgatgaggtactgacgaaagtactgtatttcccccttttgagaaacgctttggcatcagatgagtcttgggggagggaggagaggaatttggcagggatctggttataagccatctggagggtggcgtgaggaccggaaaagccgctgcccgttctgtttggtctcatcccctgaatgaggtcactgaatgtgcacgggaggctcagcgctgccccactccagcctgatggagaaatcctacccgaaatcccaaagcagggcagggacattcccaccagatacttttgcagcctttgtcctgtgggacgaagcaagggatgatgacacactcgcctgcccacccggaagtgagtctcaggtcattgcatcagaagggtgacaacctaacacaagtcattgctaagcaactctcgcgtgctcagtattcacattttcttgcttcattctgaccactacactgcacaggagccattattctcaccccccgcctccatttacagatgaggacaccgagacccagagagttttttgttttgttttgttttttgagatggagtcttgctctgtcacccaggctggagtgcaatggcacgatctcagctcactgcaacctctgcctcctgggttcaagagattcccttgcctcagcctcctgagtagctgggactacaggcacctgccaccacacccagctaattttgtattagagatggggtttcaccatgttggccaggctggtctccaactcctgacctcgtgatccacctgcctcagcctcccaaagtgctgggattacaggcatgagccaccgcgcctggcctgttttattttttgttttgtttgtttgttttgttttgttttcagagatagggtctggctttgttttccaggttagggtgcagtggtgcgaccatagctcactgtagcctcaaactcctgggctcaagcaatcctctcgcctcagcctaccaggaactggaactacaaatgcatgccaccatccccagctaatatttttcctttttggaaaaatgaagtctcactatgttgcccaggctggtctcaaactcctgggctcaagtgatcctcctgcagtgctgggattacaggcatgagccactctgcccggccaatctcagagagttttgatgaagttacaaaattctgaccatggagccagaactcaaatctaggtatgtgaggtctgagcccaggcttccaccagggccactgtgctgcaactgccaccacttcctggcacctcaagtgacacccgagcatcattcaagggaaatggcccatatcccggcaattcccccacccgccccactttcttctctgaattagggacttcggcagagacagagccccagcagcctccacccgtcccctcgtgtcggccttgctc

SEQ ID NO: 754 - DNA, 2498 bp, Homo Sapiens
aactgctctttttattggctaggaaaagaacaccttacagggaatccgataggttaattcacaatagtgttaggctgtaatgtcattctttaagaatcttttccagtaaacatttgttactttttcaaagtaattgggagctgttgagtgtggaagcgaaaaccaagttaagaagtcctgttatttgggtgagtccagttcctataaaagttctgttggatgtgtcttaaattgttcggtgcacctcagctctctcccgcagggatccggagaaactgcgccattgttgtcttacagagaaacaaccttctaacactctcttcgccgccatctttttcaagattttaaattgaaaatactttttttgacggctcttgccattatgtctggacgttttaatttcaacaaaacgaaataatagtgttaagttctttgagtcaaacccgatattacagaggtagggattccaggatattagaattttactataacacaaatgaaacacaaagttccttatgcttaacagtgtatcttagaaaaccttgtttgagtgaattagccttgtactctataatgaaacgaggaatcattgagagatacttaggcaacggattttaaatgagtgaataaggaagggaaaaacttcaggaaaatgcagaaaaaagcagcggagattttggaaaaaaaattctaaagcactttctaacgcaaacacattcgattttttatagctaaacaggataacagatcagtctattaagttaaatgatcaatgtctttgcaggtcatggtctacgtgaaacatcaaagaaacctgtaacggaaaacgacttgtttgaaagagccagttctctatccaaatttaccaatcagaatcttgcactgaaaaaataaaccaatcgtgaatctctacggccacttccggaatttagcaaccgatcactaacagggatcgtccacaatccaatcagagtgattctgttcctatatagaggggcaaaccaatcttcctaactcatttactttgcagatgaactatggcgcgtactaagcagacggctcgtaaatccacaggcggtaaagcaccgcgcaaacagctggccactaaggcagctcgcaagagcgctccggccacgggcggcgtgaagaagccccatcgctaccgccctggcaccgtggctctgcgcgagatccgtcgctaccagaagtctaccgagcttctaatccggaagctgccgtttcagcgcctggtgcgagaaatagctcaggacttcaagaccgacctgcgcttccagagttccgcggtgatggcgctgcaggaggcctgcgaggcctacttggtggggcttttcgaggacaccaacctgtgcgctattcatgccaaacgcgtgaccatcatgcctaaagacatccagcttgcccgccgcattcgtggggagagggcgtgaattgttttgagtacaaaccttaaatccaaaggctcttctcagagccaaccactttgtccgtgaaaagggctgtaatcctttgagacgcattagaccactaaactgcactgatccaaatagacatttgaaatagtggcattcagttccctcgatgcttcatttaaatttccaaatttaagcgctccctcaggttttcgcctagggctgggcctccctacgctgttctccattggtttagctggctttgttttgctgttcaggccctctgctgctttcttgtacattgttctcgttttctaaactcctggccacttaattgtaccctgcttaacccatcctcttgttttctggctcaacgctctttcatgtggtggcctgcattttaggtcttaactgcataggctttcaacgccttggttttgcctttccttgatgtttatttgaccttgcccgaggggccagcgcttttgatctgcatcaggctgccttactccactagtgttttgagacccagctacttgccggcgacggtcggtgccttgggtgcggtcaacgttactctctgtgcgcctgatactggtctaaggctaaggttattagctggaacacctagacccgtggcactaacacacagctcttgcagacttgacagccttgcataggttctaaactgcaggagtcaaagcaacgaaggtgcagatgggtgtgtctcaaacctgagtgcgaaaggaaaatgcagaaatcatgagccttttcaactttccagttgatatcttttgtttgcttttttcttttcttatttatttatttatttatttatttatttatttatttatttattttgagacggagtttcgcccttgttgcccaggctggagtgcattggcgcgatctcggctcaccgcaacctccgcctcccgggttcaagcgattctcctgcctcagccttccgagtagctgggattacaggcatgagccacctcgcccggccttccggctgatatcttaaaagaacttttcaactttagtaaataccctgtcttaatcaaa

SEQ ID NO: 755 - DNA, 2433 bp, Homo Sapiens
aagtctcctgtattattgactgatgccgggcaagcaggtgtgcatcccagatagacattgccagtgctgccgtcagaatggcccaggtgaggccgagtgctaaggggctggtggggaacctggtttcctgtgtaagctccctctgcaagtgctggcagacagggcaccatgcacctttggtgttgaccacaggcaagcacttgcctgcaggaggctccgtccctggccctcccaatttataggtagggaaccatctaataatgatccttctagtcacacagcttggagaaagctgctttcttttaaaatattaaaaaatgattcacaaatctaacagaaataattagagcagaatcattctcatgaaatacaggtcccattggtaatttgagaattcacagagttgttctaaccctaggacacagacagcaaacaattgcccttgatattttttttaaatgtgcatatattctattttccagaatctacctttcacccaggacaattcataaggaattttaaaaatgcactgataaaatgatctaatctagcatcattttaaaagaaaacgtaattctaactttctaaaaggggagcagcaggagaacaaagggaaggggaagaaaaaggcatccacacaaaacaccatacgctggaaatgatgctcagtttctagaagaacactgtaagctcactttgtgcatcctcttttcctaaatcctctatccctaaatgtccactcacctgcctttcttagacatctcgtggacttctcttccgggccagtgcattctgctttcagtggccaaaacccatccccaccacaaaagaaagatgccaaatctcatatttgggacagccaacatgggtttccaaattcaaacagctctctccagaaacagcaaaaaggaaaagattgttctttttctctcttaagacattattggtctgttcattattagaaggatgtttactcatgcaaaaaaaaaatcaacccacaggatgcaatctggagagcaggagaaagcaatttccactaaacctataaatcctcctacgtcagatgtcagggattttctgaactgaggttgaattcctgtgtcccagtggaacaattattttagccggtctaaattagttcatcgtcaaatgcagtaaaaatgttggtaaaagtcttattttctggtgcgtcgaataaaaggaagtaaaaatggaccaaagcaatttccaagaggagtaaggccagaggtgcggaactgctttctatgttcacgttaatgagctcctccctggatctattttaagcttacggccattattatttgctttagctgagggctggatttggacagcttcctgcccccacttcctgtggctgaatccctgaaaccccagggctcggtacctgcgtgggctgtctatatggctgagattgggagggcaactggggaagaggtttttttgtctttgtttggcgcagaaacaagtaaatttccttgtcagttgcattgttcttatcatgaaccttgctgcactgtccacatttgaaaaataccagtaataaattaactgtagcctcaagtctgtgttatttgtagacagtttttcttttgctttgatgcttactttaagactctgctataatctacaggccggatcttgtgtcttcatcaaaagacagtctcagagcctcgtggaagagaccgcattaggtactccaaactattgactcttcaaagctgagctgacatggttttggtaactttcagactgtaccggtaaactgagtcaggattcccataactctatagctgaaaagcggtttcacacaactgctaacccaagatccaatagaatgagaattaattacacaagactgaaaaaaaattgatgagagaaatttttttcgggttatttgaaatgcagttgttttaaggttctgttcccagatcgtaagaagccttttctttctcttcttgtgctatctgtaattcacaataagcttttaaattctgcttttataaaccagaatgaagtattcttaaattatatatgattctcactaacacgattcttcttatttgaattcagaaactcttacccagtctctctacatttcttggcaatatagttgtttgcataggtttagtaagaatctgtcctcccttttgccaaaatacaactggaagcatcaattatgcaatgaaagccttgccttgaatgccctatttgagaataatgttcatttaacgaggtgtgacaagccattttaaggaataaaggttggctgtacttacggaaccaatgcctataatgtcctctcaggaaacctgacgtaggtccagtttatagtgtccagtcttacagttagtaaggaaagtcacttctaggcaagtacttggaggtatttttctgaaacctctagaagaaagg

SEQ ID NO: 756 - DNA, 2461 bp, Homo Sapiens
attaatagtaacagtggttttaattttagataaatcatttgtcatttataattctatgaagaaaaatgctatgaaagacaattatatatctgacttttgtcactctataatttggcctatgctctcagatgtaagcaaaaatgcaaaacaacatttgtactccttactcatatatactactttccacactttgcctctgtgaaaaatgctacatttcaagttcatgactacaagcgttaatgctgtgaattggaaattacaacatacctcattgcatactccattaactgtttccacttctccaacaatcggaagccagaaaggcttgatttctagctaaaaagcaaagcgagattgagggaagttcagagacgccatgaaggaactggtgaccagagtcccttgctgcttatggaacccacaagaataaagatagccgcttttcggaattacgattctaattcaggatttgtggagtttactctaatttggtgctgttctggaaaaggctatgtcgaaaagaatttgtttctagagattttcaggaaagtagccaattcaaactgctcaaccctgtgagatcattcctggctggtagcaagaactttctgtcatgtggggcttgcttgagagtgaagagtacccgcatatccactgcttctgaattcatacctgttggggcttatatgcacacgtacacaccagcatctgggtcttcatacccgcttttcacactgatcgtgtgaactgattcacaagccttcaagtgtcctagttagaccaatttagtccagctctgaaagaacagataggtaagatagactgtcacattccatcaagttaatttctaatttcacaattgaggttttaataggacgtctggcctattaaggtcttttactctgttcaagagcaaccaaacaccgctgccaattctatcattaagatcaagctgctgttcagcgaccctcccctcggctgcccttccgtcttggggccttcccagcctgcctatggttaggagccgtttaaaaagttgcactcattctagttacaccctgccacacctccaagcctgtggatgatttcgtctgagttcccagcagtcttaaagctttgccaacagcagacggaggtatcacgctgagctctgtggagagaaagctttgcactgtgcaagtgacccatttggcaccagagagggggaggggaagagaaatcctgatgggctccagggactcctcatccatctacttctccccgggatcctctcctggagggctcttgcaaacacagttgccccgccacggtggaggatcatcaacagaaacccacgaaacaaggccatgccccgtggcactctgagtcagtcccgtagcgtgatttaccagctctctgaaaaaagaaatctgctaggacctgggctggaaccgtaagatgtaaagatgtcaagttgaaaaacctagggtgggcccaaacctccaactccccagccccgattcccaccctgggaaaatcattccagtgtaaacatttctttttacatttagtatatctgtgcaagaaaaactactttattactcaacattaataacattcactttgaaccttaattctgaaaaccacagaattttttaaatgctgtaaatagctgacacgggtgttcttcccttgctttcaaaggaattgtttttgtaattactgagcagggtgaagctgaatttcccctgcagtaaacaggagagtgtgtaatgagatatcttaactaaaaacattaatcatattcagattaattaataatagaaaactttcaggacattcttaatgctttaaaaacaaaaaagcttttattttttgaagttgttaggtctccattctagttctgagtacaaataaatgcctgacatatggtctaagccaaattccaaaatgtagcaaaaacagtgcctgcatatttggcaggaatttaaaccagttcaggtcagtgtctctttctgcccaaagaagagtttctgcatttgcactgagctaggaaaataacacaggaaaacatggggaacaacacggaatattgtaagctccagtacccggctggccaaagaataatgtttggggcaactctgaaattaccgcccaggctgcagtttgggtttgcataacgtcttggaggactgtgagcaagacagaaagtaccgattgcattgttgtaaggaaattgccttcccccttctaaagctctcaccttgcaaatcaccccctcttagcaaaagcacatcttacttgttaactcttcccctgctactaaccttttcaatcatcccccttcatcattgcagaatggcctttggaacaaagcagcattttaaagcctttcccactaaaagtttgcccctccccccctttaaagaggcagtgtgggggtaattttctttcttcctttctttttttgtgtttttttttt

SEQ ID NO: 757 - DNA, 2440 bp, Homo Sapiens
ttttctcccctagtaattctcccatcttcttcttgcaggcataaccctgatagcattctttctagaacttcgccaaataagcggactggaataatattcagactatagactttcacgtaaccttctttttttaagaaatgaatcacagctcttatctgggcccggttttcttgcatccagggtttttgttattctgtattgttagaaagtaaaattttagtctgtcaaggatggggaaggggctatctctgagcacctagggtgtaggtctctatttgtttcttaaacagaattttagctaatacctatggacttttagctgtatactctacttccataagtacttaatgatttatgtttcaaggatccccagaatcctagtgttatttggctcaattttaaggttttcttaaaatagtctggggtttctactgtgtcatttactactcatccttctgcttcttgattttcttattaaaacaaaatcctgttatctcctctccctttttcattaatctcttaaacgtgctttttatcttcttttaaaatacgtttactgccaattttggaagaaaaacgtggtaaatggcatgccttcattcctccacattgatctggaattccttctctgtcttaatttggttcagcctatatccacatacaccaaggctagacttaaagataaaatcaattattttaattttaccagctttggtcaataattttgtttctatgtttttctgacttagtcagtttttatgtaagtcaaggtggttgagtattataagtttctattactataatgatttcatattcaaacactggataggaaaaattgattatgggcttggcatctatctatacggttttacagaaagagagaaaaaaacacttttagatagtggtatcaaaaaaggttgatatatattttttatcatctcctctccttccttgtttgcaagctactaacagtcacacccaaggataaaacattcctatgcatttacaacttttcactagcaaagacctgactactaaacaaaggcagcttgaccagaccacggttttatgatgggcttgagaggggctttgtttcacattctggttgtattttcagtggggctcattcttaactgtttcatgatttggggagacacattgctgattttattgttcagagcctttcttctcctttttcttgtggaatgagtgatgttccacacggaagattaagatatataataacaaaacagaaactctcacgtttagctgtagttagatttatggttaagtttatggagattacttagggctgggaacacacgtccaagaacgtctctgcagttacaactgtgcatggagtgagatgctgttacagactatggacagtaaatacctctgaggttgtgtgtcacttcctgtaggcccatgagtctttctgatttaagtaggaaggtgtctgttagtaatgcaaacaaaacctagtttaacctctgattcccaacatctggaatatttatctctttggcaattgtgcggttcactgaacactcaccattccagtggtccactgaagaaggattttggcttgaaaagagaccgccatgggaaaaaaaaaatctaattcagagtagttatcactgagaataccaaaaggatttgtgatagcaatatccctttgactccacagctggtctgcgtggattgtgctctagtgagagcctgttttcctaatgccgtgagaaaagacatagattcttcctttggaccttattacaacacaagattttttttattgtacactttaaagactctttaatccgaaaacttagtttcaactttttatttctctgtatgcctctgaatggaatccaaacaattcaacatcgtttttttttctttttctctttcagaaatggatgagagattcaagtatacttttttgatgtcctgtggacatttttgcatttttatattcttcattaaacataaaacaaagagctttggttctgaatacaagagaatataagttgttaagaccattaacaactcgttaatggtcacaggcattctggatcttttcccatagcttctggggacacactctttctcaaatgctgggtagaacagtaagtgtggttaaggctgacttgagaatgaagttggaattggatgcagcagtttcacaatgacatcaaggtccaaggtcagggaagtggcaagacctttacccagcagagttaactataagccataaaagtatctaggagcagacctgagtgaagcacgtgttcagttagttattgaaacaaaagtatgtagcttgtctcaagttcctggtaactacttcagggctgattgactaggtatttctgtgtgtatgtaattgcttttctccatttaagaataaactacaaggaacagatactatatagcttct

SEQ ID NO: 758 - DNA, 2334 bp, Homo Sapiens
actacatctttacatcttacagctgaagaatctaaagccaaaaaagagtgagtagctcaacatcatccagagttagttaataaagatcccccccagcacccttcacaaagcattttacagtaaggagaaaggttttggttttcaacacagttgtatgaaaattccagccctaccacttcaaaggtatcattccttatcagtagatttcctttgtgtgtaatggggttatctggataaaacaaaaccgatctccacttttaccaccaaattgggattgatgtgtgagtacaaaattttagggcaatgtagttttcaatttctctcacttttctacttttgcttctttctgccctagttaatcgaaaaagggagttatttgcatgttgctggagggagactatttctaattgttctggcctattaatagcagatgtatagcaaagcttccaaagaaacacatgccttcaggacctcacagagtttcaagagtagtattctatgggttcattttggatttcaggtgattaatggatgtggacgaaacctttaaccttttcaattgtctgctcctgcttctccagctccctctccaagttcctttaattagctaaacttaaagcccttttgaatcacctaatgtcacacaaaagtacttgccctaggcagagaaagagaagtaacccagtttcggggcaactgatttattacatgcagggaaacttcttgttagttttccaaaagttatctcttctcttgttatttggaaagcacagcagttttccacttcattctccactgatggaaaacagatttgtctgacgcctagaagaagctccatttgcactggcgttttatttatttatttattttttttcttggtagaccactacaatcattggctgtgcacacctatattggacttggctactgcaccatactgcacttgcaaaaatgttcttttctagacatggcaagaaaagcctctataagctgaactaataccatctgcctctccaaaatgccttaattgtattggcaaaaggagcacttcttattttttaaagcctactgtaactggattgttagagcagtaccattaaaaggataatgacggtgttaccctcaaatagattttcttaaaataattgcttttccttactgagtgctggcacggcactcgtgaaattctgatggggtcagcgggttctttgatgttgcccaccagaagattgtctctttccgatccactctctctccttttgttttttcctcatctacactcacgttggttttatttagctactgcaacttgtctttgcacctgaatcaagccaattttttttaatgatataaacaggtagctttctcattgggccagtgtttgctgcttctttattttgtcttgatggaaatctttttattgtaggagtcaaacattgactatgagagtgtcaccatctcagaaattgacaggttgaccatgaaatcacaggtctgcatattctgcttcttatcttgggttatcctaagaagttggcaatgactggcatgaatgggggtatctgacccctgctaggagggagtggaccccaggctcctcaggctgcctgccagggctgttactctggagctggagagggaaatgagaagcctggtttgtatgaggcttgattgaggctgtggatatgaagcaacagggaagcgaagcccatgtctctgataaaagaagacactagaaagggaggtctgaaacactaagctaaaggtgtctggcagagaactgcagagaagcaagacagagaaaagtagagagcttaaagagatttccggagacgaatgcatgcagatagagaggatttcatagccacccactgcccttactctgggcaaggagaaagctgtttcaagagtcaatttatacaggagaaaaataggagtacatattcattgttttattttatgcccaactcaaactgaggcagcctataaactaacacagaatagacttaatctctgtgccaacactgtagctcagtaatggtatacatacagtcagaaagtggaaagcattagcttaatttttttgacgtcgggcttcagtttagctaatgccattgaattgacagaccacctcttcaaacctgtctaaagttattaaactaatggtttctataatgtaacataaagttattccctccttctctccgtttagaatgatattctaaatacagatggagtctctgaacacttggtttctccctaagtgatgcatggaggacggatgaaggaaaattgaaacacttttctgctatgttaccttttcaacccatttgt

SEQ ID NO: 759 - DNA, 2308 bp, Homo Sapiens
cagtatgtatttcaaggaaggaagaacagcaagggcaggaaaatagtgagttttcagggtatttggtgagcttgacacaatatttgttgaataaatgaatgaatgactgatattcaaatcttattgcacatatataagcatttcactgagaaaatgctagtgttttgtctggattagtcccaacctgtttgaccttgactgcagcttccttgatagtgaaacgaggattccatcactcttaattatccatggctaaagtcaacaaattatcaaaaacttccatctagtgaatcattttaactcttccattgctaaaacttttaccagagttgtgattcaaggtaattgggttgagatatgctactgtcaattttctagctgtatgtaggttaatgctgcattcctgtggggaaacaaataaagggtacagtggctaggagcaaaaggccccttgataatcagcccttgaataatttagagttgactgtatcatgcaagtgcacctctcaagatagggaagatgaggatcatgtgtatgctttggattcctgtgttagtgttcaaattattcctatcccattgtaaactggctatgtgaaaatgctaataataataatacctttcattaaaatttttagagtttatgaaatttattcacattgattattttatttaatatggtcttcatataactctgggaaatagcatattagatattaaatttaaagagctgaagttcaaataggttaaatggctttttcaaggtcacatggcttctaagtacttgagccaagactagtactaaggtcttctgactcctaatccaaaattctttttaatgtaaattgccttttagcatattcctacaaaatttccctagattgtatcagaataataatgcctgttaatatactacttccagataccccaatgacaggacatacactctcttcctgctaaaagttactttttcaagtccacatttttggggacactcaatgagttcttccctaaccctgagaatctgtggttctaaaagcgtggatggcccagtaggggtaaaatcctagctttgttttacagttcttgccgtcatgaggcgagttgcttctctttgagggtaccagagggctccatccagtcaggcactgtttcccaagcatgtgtttcatgtgctggggcaggctcaccactggatcccatccatgtcttggcagccagtgggcccagtggaatactcgtgattgggaacacggtgatactgcattgacttggatttccactctcctttctcacagctgcatacagaattgtgggtgtagcttacttctgggcctggagaactgctcttctggccctgccctcccttttctctggagaaggggagctcccgtgtcttggtggttaccacagcattgaccctgctctggccacacatgtgtgcattcatcttccaactctgtgctgcctttccccccacagagacagcctctggcccttggtatggtttgtgacagcacaggcattactatggtaacagacgtgttataaatacaggataatagctttgcttttgctttccccctcccccgcccccatgcagtgaagggaatcaccatgatccttaaataataatcacagacttttttgcagactctaggaaatgaacagaataaggctttgccatataggcaagccatgaagaaaacttataagaatattagaaaataataaaagtattgaccaacactttctttttgtgcaaacatgtctttattctttcagtttgaacaaatgtaaaaacctccttctttgctaatttaaaaaatcacatcatgaacataatctgaagtggcaaaaaatatgtcagcaagaattttgaaagataggttaattaaacggtaactttgctgtaattcatctcatgttagagattttagcatgggttcaaccctttgagacttcattcgaagatgatcatgcctttaaagggcttgggcatggattgtaagaactgtgctgtagtgagtcttcattaagatatttggccttctctggttttaattgagctttaaatttggttccctccaagtttgatgattgaggtaaagcactcagaagggattttgaatacatatctttgacaaaggccttataatggtcttcactgctttacaagtgtaatagcccttggctgcattgactggccatcaattttctgcagaggtagggcaggtttgggtctccccaccttgtcaacttctggtcaaagtagccagggtagaccctggcccagttgagactcaga

SEQ ID NO: 760 - DNA, 2496 bp, Homo Sapiens
atcttgagctggctgtaaacaaaacatctcaagttatcgtttttctttccatttgattgagccagttattgtatagggaggtgacacaaaacaaaacttcgtgtttctgaagccgagattttgggattgtactttatgcaaagttacttataagttctgattactttgagagaaaaatattacagtatccttaggaagttttatgtatttgttttaaagctaagcaccaccctctttttagttaaaaaaaaaaaaaagtttggaaaatagtgacatgtcagtacaaagggaatactgctctacaataagaaggaacacgccacagatacatagcatggatgaatgtcaaaaacattgtgagagaaaaatgcctgaacaggagagtaactattgtttgattccatttctgtggaattctagaaaaggcaaaactaacttatggcaacaggaagcagatcagcgattgccaggggtgatggggattggaggaggttgactgcaaaagggcagaagggaacttttcagggaaatatgaaatgttttatatcttaattgtggtggtgcttacactggtgtaaatatatttgcccaaattcgtgtaagcatatgcttaaaatgggtgcagttttttgtatgtaagttacacctcataaagttgatttgaaccgaaaaaaggggttagaaaaggctgtggttggaattttttgtgtaacttaaggccaaatagtccatttacgccagtttttacagtattgtaagctatgccctttgtgttcacatttcttcagttactcctttattcgtcatcacttaggagactttgcatctcatctgccttcctcctagctccatgatttgagcaatagaagttcttggctttcaggaacctcacagttcttgttagtcataagcaagaatgcattttaaattcacttcaaattattttttaagtaggggttctggtggttttctggaatggaggtgtggtggaagcttgagtgtgtgtgggaagaggctgggtgttcctcagatcattgtaccatgcttcctcacacctgtccaagcttctgtgcgaatactgaaataaagtgtcatgaattttgcttctggcatttgtcggccacagctgtggcttcgggttgcacatttgttgtggtttcagagtctctgagaagccattggttgggagggcgctaagaatggttggtgcacgtggtaattgagtgcttaaggggaggaggatgattcttagtgcactcattgctctccagtctttatctcaatcctgttataatttagagagacgttttcctggtgtgtccacagagagatggatgcgtgcttaggaatgcataatttagtgagcagtttgaacatctagatgttgggaatattgttgagtatttatttttaaagttcaagttctccatgtctagtcagtgttagcctgtaagaaagaactagttgttcttaatggatcatgttagctggacttggtacaagtgttttttcttagaagggaggattacacgtttatagtaacaagatgttcttttatttcctagtttatcaaaagattgtgaaatagggtgtgcagatattttaggtagtactattttttaaatagatgagcttgaaagagtgagaaaaggttgtgtcaggttaattgggcttaaggaaagctaaataattggtgggagaaggaaaagtaaatattaattttttcctttgctgtgtatttcttttttctttttttttttgagatggagtctcgctctggctggagtgcagtggcacgatcttagctcactgtaacctctgccacctgggttcaagtgattctcctgcttcagcctcatgagtagctgggattacaggtgcctgccaccatacccagctcatttttatatttgtagtagagatggggtttcaccatgttggccaggttggtctctaactcctggcctcaagtgatcctcctgcctcagcctcccaaaatgctgggattacaggtgtgagccactgaacccggccgccttgctgtgtatttttcttttcttttcttcttcttttttttttttttttttttttgagatgtagtctcgccctgtcacccagtctggagtgcagtggctcaatcttggctcactgcaacctctgtctcctgggttcaagtgattctcctgcctcagcctcccgagtagctgggattacaggcatgtgccaccacaaccagctaatttttgtacctttttagtagagatggagtttcaccatcttggcagggttggtcttgaacgcctgacctcaggtgatctacccgcctcggcctcccaaagtcctggaattacaggtgtgagccaccgtgaccggcctttgctgtgtatttcttttggacatcttttggctttgtgtttgtgtaaactttgaggtttcttaaaactaccaaagcagtgaggagaagatggcagaaagctgtgtgctgatattcttttt

SEQ ID NO: 761 - DNA, 2472 bp, Homo Sapiens
taggtgcatttttgaggggcctatatggtttatatagtgggaattgatactctggatgtaacacatttaccatatttgtgtaaatctcttagagaaaatttaaagttagccaaaaaaacattaactaaatgggttattaaaacacaataaactagctatgtccaaccatacatctcagaaaagatctcatatttatagagatgagagtaggaatagctccaatataggcaaataatctccaaagtacataatcttaatgtacagaaaaactaaaaattaactctaagcatgatactgaataagtattattcctcataaaactatcttcctcttttattagtcaaacaaaatcaaggttaaacaaaggcttaactgactgcttgtaaacacatccaaattatttttaaaaactgaaaaatacaattttagaatcacagaactttatgttatttgattgattataaattacattacctgtaaatagagatggcgtattttaagccttagattaaataaacttttaaaacggtcaatttttaatgattaaaaaaccccaacaagcgaatgaaaagtacataaaacttatgatttaaaaagaaaaaaaaaactataaagaaaaaaaaaaactatgaaaaaaaaacccaaccagcaagtgaaaactacacaaaactcttgacttctaaattgcatgaaggatacgaatgtcaagaaaaacaagacttccctgaccgggaatcgaacccgggccgcggcggtgagagcgccgaatcctaaccactagaccaccagggaacttgcacaacgcttcttcctaaatatatttgttgtgttaaaaatctgcacttaattcctctaaccagtaggggatagagtattgcgtctaagccacacccactttgttcttgttctgagtcctggtccctgaatctatttcctgaaattgaagcaaattctcggaagcgccgggatggccccttaaggaaaaaacctataccctccaaatctaatcctcttcctattgccatgctggaaaatatatcctggaaattctcattctttacgtaacatgtaaatctctttaccaagacaagtgttgtctggacgcgtactgtccagagccttgtaatttgctttattattttattaaccattttagctgctctttccaaatctaagttctgtccctctccgtctttcttcgttctctgtcacgcggatgttaagtccctctaaacattttactaaatctaacgatagattgccaccagctgagagcgtttctcggcgaagagccggagcgacgcgctgtcctgggtgcagagcgcgtgctcaacaaatatgggtgatgaagggtcacgtagcctcatagcacgcggttctattttatttatttggcacacgcaggctaacgaggctgagagagctgtgggtggtatgcctagtgaaggatcaggacatctgcccaaggctccaagcaagtccttcaaacccactgtgtttgttatcctcctactttccaaactgtgttattatctgggcaattgcttcacttctccgcgttatatactagacacggccaggaaatgatgcaattaccaaaggagtcaagacaccttacagcccagccttaattcagaaaccctcataaagtagatgcagagggcagtaagatataactcaactttgaaaatgtcagccgttatagttgaagaaatctgacccaagagacttcgctccgctgcaagatggaaggaagcttaagtaagacataaatttgtaatgaacttgctcacaacatccgccgccactgtgacttgcagtcatcatccattaccacaaaattaggtgagcctgtgcttgaatctcgtttcttttttttcagcagctcagagatggagtttaaatcattgatatactttatctgaaaatatgtaataatatgagaacaggaagatttaaaggggttattaagataataagatagaaaaatcatcagaagaaatttctacactttattgtattttaagtgggacccttttttcctatcccaaggaatcttagatcaagttcagtaggtggagctcttaactcttacttaaggggttgctagacctcagcattagaccatctggttttgaataaaaagattaagcagatattagtttaaatttgtataggtttagtcacaatattttacacaaagtacaaaagggtatggtgaaaaccatcctcctactcactcctttcttcttcccagaagtaaccagtgttaccagcttcttctgtatctcccagaaataatctatgcacatacaacacatatctggttcattttcctccaactttttggtttcgaaacatgtcaaagcaacagaaagttgcaactatagaacattgaacacacatatacccttcatccatacctttgccttccaatttagagctccagcaatttgtggctattaggcacta

SEQ ID NO: 762 - DNA, 2241 bp, Homo Sapiens
tcttaaaggaaatgttagccttgaaactttcttccagagttagagttagacattggtttttagctgcttaaagatatatacatagcaaatagcagtactaattttcacctgccacttaaatcctaaagcaaccatttctctgtcacacccttagagcagatgaagcagagaatgtgaactgggggaagacatcttggatgcttattttgtgggtatcattagctgctctgaggaagcagcatgagaccctgggaagcaactgcagcactaaccagactttccagatgctcttgaatattctcacccctgtgctagaaggaaaagagctttttggaacccgaccactttctgcagcttttgcagctgctgtgcctgaggagcagaggatggagctgggacaaagtctagttgcaggagctataaggaaaacacatttcctttcatagggctttgagtaattctgtgaggaaaaaaaggtctctaattttaccttatttgaatatttctagggattatacaattggacaattatggaattggaagattcctcagatgtctgactctctagttttgtaggcaagagaattaagatccaaagagggtaaagaattgcccgactgtggagccaagtttgcgtaggggctgatgatttagtcttcattgatttttgaataattttcatttagaaaagagtcttaattggcaaacacaggaatttgggttctctaccatgttatgttatgctatgttatgttttgttgtgttatgttacattaccacattatgattcatgctattataatgctcgattgttgaaagcaaataaaatatcatttctggggctgttctcacagtctagagttcacacaacaattaatacctgcttttccaacaacagagctactttcttttccttttctaaaaaagttcctcgtggcattaaacattaagtagagcttaaacaagaagcagagtgttatggtccctaaaatgtggttctcctctcttgtcaatacttgtcccagagtgcacacataggtctttgccagagacattcgcctgctgggctcttacgcaaatggcagattgaagggtagcgtgattgttctagttcctaatgccgtatcacatactctgagtccttggttctctattagacctcaaggaatgacttcatgtcttgtggtttggggtcctacgtatttagttctgcttgcttttcctgttctctccctccagtcaggcttctcaccactcagcctgctctttcccgttcactgagagagtgaatgtatccttctcttgtctctatttctgcaaaagttatcctttaaaatgcttcactatgatagactattttatgtctttgcaatgaaacagttgaatctcacatttcctgttatcttgttaatattatcagaactacattaatgagaattggtaaaataacctcatttgcttaatctcagcattagtataaattcagagggttttgctcttttttaacaacctgacacaatttaattacaagttaaattattgattttgcctttatttaaatagctccaactattgctacaaatgacaacccatttaagattgacagttcaaaggtacagccagttacccttatagaaatttttattttaccctaaagtcatggtgaattgatactcttttgagaactgtttatgtttttttgtttttaatcattacaacttctattttagattcagtgagtacatgtgcaggtatgtcacatgggaagactttgtgatgctgaggtttggggtatggatgatcccatgacccagtaggcagtacctcagccctccacctccttgctctcttccctctccagcagtccccggtgtccattgctttcatcttttttccatgtgtacaccatgtttagttctcacttataagtgagaacatgtggtatttggtgttttcttccagtcttaatttgcttaggatgatagcctccagctgcatccatgttgctgtaaaggatatgattttgttcttttttacggctgcatagtattccatggtgatgtaccacatgttctttatccaagccactgttgatgggtacctaggttggtacctaggtatgatagattgattccatgtctttgctattgtgaatggtggtgtgatgaacataagtacatgtgtgtttatggtagaatgatttattttcctttgggtctatacccagtaatgggattgcta

SEQ ID NO: 763 - DNA, 2395 bp, Homo Sapiens
ctatggcttcgaggattctcaaagcagggatctttatattgataaaaacaatcttttagtgtttttgtggaggaggtgaggtaaacgacaaattgacattcattttgccttaaaccaagtgtcaaagtctggcttcccaaagagaatggccagtattttgggcgcagctgtcaaatcttcccaatttacacagatgcaacagaacctgtgaattaacctgtggcatttaccaaagccaacccctgccaaaaacaaatctctctcctcctggcatactgaataagagatagggatgcattaaacatttacgaagacacttcaagagagtctcaggtaacaggaagtgttctgagattgatttgccatgctttgagtgcacagaagacagagggagacacacagggaatgttcctgagactttttcttttcaatcatcctcctctgtgacttttaccctataatttatttttaaagaggcatcatagttttctgggtgccataacaaaatctaaaataaatgttttcacctagataagcactattaaaaggaaaggatactgaattcatttgaatacatttacagaagattgattttcccaagggaatgtacctatcctatttctttaattattcttgaagttttgcctatcaactgacaatttcttacagaaaggaagcaaaacagcctggctttcgtgacagcgaagaattataatactagaataaaaacaggtttgtcactttccttatctcttctaatgtctgagttactgggagtcagaaatataataaccccatcccagtaacacagttattcagaatatgttaaatcgaaaggtaaattcaaagtcaaatttctctattttttgaagatcagtatactcattcctaactacaagcatccagtatgattagttataaaacattagagaaaatatggtcatattcactttattttttcaactgattatcacctgattagaaagaagaccattttgtttcacatgatttactctcagcaaaaaaactgtttacttaagcataggaaagccaaccttcgtactaaaagagaactgagaaatttaaacagcccatgatcttcattgctttggcctctgctgcaaagcgtcactgtgaaaaattggtcctgatcccagcaatcaatgctttcccactgcacagagatggcctggcgtcattgtgccattgtggctgctaagggcagggttccttagcaatgcataatggccagaacaagtcctccccaaccctgcactaagggcaggcccccagtcccaaatcatttccccatcttattccagtttctcttcgggagctgtggtttctttctgtggttgaacgtggttcagcttttcctgaaccctgtcctcccccaaaaataattatctgttggagagtggtggtggttggacaacattgtgaatgtaaaataccactgaattgtgcatttaaatgggaaattttatgctatgtgtattttactacagaaattatctctaatgtgtattcccaggcagccgagaggtcgtcttctcagaggaccctgagctgcctttttcagcaggtccaccacctctgtatctttgcatgctaacaaagactttttctttttttttttgagatggagtcttgctctattgcccaggctgaagggcagtggcgcgatctcggctcactgcaacctctgcctcccaggttcaggcaactctcctgcctcagcctcctgagtagctgagattacaggcacttgccaacacacccagctaatttttgtatttttagtagagacagggttttgacatgttgaccaggctggtctcaaactcctgacctcaggtaatccacccacctcagcctcccaagtgccgggattacaggcatgagccaccgcagctggccaacaaagacttcctgtgctaatcacagatataccaaatgaaattgtccctttctgccctttcccttctccatcaagggatgaaatataattttcctctccttgaatctatgtagacttatgacacacttgacaccaatcaaatgtagcagatatgatgctggacaacttctgaggctcaatgattacaagcaattaattcatcctctttctcacttgcttgaactcccacactggatctctgaactgcaattgcagcagttcaactgccctgcagccaccatgctgcaagaaagcccagactaaagcacacaaggaaaccaatggagaaacactaagactacatgaagagccacggagaggtgcagccctctgttccagcttccgtcgccgtctgactgcaacttataaaacccacagctagaactacatagtcaaatccttccccaattccagactggctgaaaccatgaggta

SEQ ID NO: 764 - DNA, 2258 bp, Homo Sapiens
agccaagatcgcgccactgcactccagcctgggcgacacaaactccgtctcaaaaaaaaaaaaaaaaaaaagaagaaaccctgtgttctttctcttgacatagtgtttagggaatcagtaagattccatcaacataagcatcatattctcttatttttctgcaaaatcatcagcagcaagtgctttttcctaacattaaaatatatttattctggctgcgcacggtggctcatgcctgtaatcccagcactttgggaggacaaggcaggtggatcacttgagcttgagagttcaagaccagcctgggcaacatggtgaaaccctgtctctacaaaaaaaaaaaaatacaaaaaattagcagggtgtggtggcgcacacctgtggtcccagctatttgggaggttgaggtgggaggattgctggaacccttgaggtcgaggctgcattgagctgagatcgtgtcactgcactctagtctgggtgacagagtgagatcctgtctcaaataaataaataattgaaagttaattatacttctgtctatggaattttttacttcacataagctgagagaagtcaaacttgggttattgaaatgctttagaaaattgttaaactgtttacttttttaagtttttagtctgtcttagttatatgtgtgtgtgcatatatgtgtgtgtgtatgtgtgtgtgtgcatatatatatatatatatatatatatatatatatatatatgtatgccactgcactctaaccttggcaacagagtgagaacctgtctctaaaaaatagtaaaaaataagttaataataaaataagttggccaggtgcagtggctcatgcctgtaatcacagcactttgcaaggctgagacacataataatgcccaagagtaaaaattaagtaaacagttataacatgattagtcattttatttattttattttgctggattggagtctgctgttatatcatataaaacatttgctaggattttgtatttttaacacccatgcacatttatgggaattcattagagggggaagcctggatttaaaatttccctccatgaaacagttaaagatcaagaggtgaatcgtgtgggatatgaagcatgtcatggctgagctgctgacgaggcctcggctgtgctttgcatcatgtaagggctcagcaccctgagaaggtgcctggtaaatgccactggctgatcggacggcagttctcggaaggcctgctgatcagaaacagagcctttggcagaatctcaatggcaaagtcacaaacagtaacagtccctaaaataacaactgcaacctcagcaaaatgaaaaccttctatgtgggaggtataatgggaaatgtattgattggtatttttctccagatacatgaatagtgatcacaagtagagatgctccccttttctacaaaggaaaaggtgtaaaacattggttttacaatgtaggaaaaccaataaaatggtggtataaaacattgatcaccatcagcagattcttctagcaagaatggcagttcaagccaatagatatgtttcatgaattttgtggttgcaagtggctggaatggaatgaaaatcagctttcacgaatccattctctcattcttctcattttaatgagcacctactgcatgctaggcattgttctaggtatgtgcaggatatcagcgagcctagccaagattaaattctctctgctcagatacagaaaataagggatacacatcatacaaaaatacataatatgttagaaagtggaaaaagtaagtagaaaaaagaaaaagtacagcagcaagggaaattcaagagtgccaggccgggcgcggtggctcacgcctgtaatcccggcactttgggagtccaaggtgggcggatcacgaggtcaggagatcgagaccatcctggctaacacggtgaaaccccgtctctactaaaaatacaaaaaattagccgggcgtggtggtgggcgctacacgggaagctgaggcaggagaatggcgtgaacccgggaggcggagcttgcagtgagccaagatcgcgccactgcactccagcctgggtgacagagcgagactccgtctcaaaaaaaaaaaaaaaaaaagagtgccaaaaaatggtgggcatggagcaggggcattaggtgggcagaggcagctctgctgagatggtgataagtgaacagagtcctggagcagaaaaccagtggatgatgggggaagagcattccgggtaaagg

SEQ ID NO: 765 - DNA, 4090 bp, Homo Sapiens
ggttctcaataactactgaatgaaatgttttctaacatggcatctcctgtactgctattcagttttctctagtgcaggcctgattctgatttccctagacgtgaaattcgctgggacaaggactagatcctacccatctttttatctctaccactcgctcttctgcttaatacttatttaaaggggaaagaaaggaaagacagtgaattcagggcattgacaatccagaaagcgtggaggtgggggtcagtgagtagagagttatttggatttcaagggtgtgggtaatcctggagaggaacaagctactatatttatttgcctacgaatttatttatacctgcctccttccagaaagggtttgaggtggctgacaaaaatacacacaatacaaggtaaaaaacaagtcgctgaggaaatcaggccgagaggaaaataagagtaggaaaaataagatcgagtcggcttgctacaagtgggccaaaaagttggccaagttttccacagcccactcgaggcggaagtccctctcccctccccgtctcaggggcggccacacgtcccacacggacggggagagatgtacccgagagagagggcggacaggaccctctccgcacctccccagccgccaggccgccagcccggtgcccgggcctagcagcctccgcggccttggagagcgcgaagtggaggggcgcgcggctctggggggcagcccgagcccagacctgggtcccaaggtgctggcggggagcctgtgacctgggacggggtgctggaggctgaggaatcgcgcctccatgccacgccgcagaggttcccgcgctcgaaaccgaacgccctccagccaccaccactcacggcctactaagcgcgcgctccgggcccagggcacaaagatggagggagcggcgcgatccacccgccccacccccacccaccagacaaaggggcaggccgcccctcccccagccttcttcgcgggccccgccgccctctgctcccctcccctcgggccgccctttggtgacttcctttcccctccaagggcggccccgggacttctcaggaactgcgtttcacctggacgtggggcggggagccggcgcgcagagggcggcctccgggcccacccctaggccgagccggccccaggcccgcgccctcccctttgaacccgcgctcccggcccctggcgccttcccgcccaggcgcccccgcccccacccggtcaagcacgtgctgcccgggccccgagcgcttcccgccgcacgggtgggggctgggcccaccccccgcccgctccccacccccaccggaaacattcctgccacattcctgcaactgcaaggcccagcccgccgctccccaccccgcctccgcgccgggcccagggctttcctgcgtcccctccaccgccggctcgccccctgaggagggggctgggccagggcctcggctgaccggggaggaagaaggggagcagagaaaaacatgagtcacagccgtgtgtcactggagcgcatttcaattccctgcatcacaggaggtgtggaaggccgcctcggggaccgggcgcgggaggtgcgcccgagaaggccccgggccggcctgcagggcgcgccgctccgcctgcgccctttcctcccccaccgccctccccgccatcttcccctttggcttccttctcgctcggtgcaacaagtctttgttaagccgggcgccgggcgggccaggcgtggcggagatggcctgcgtgctcggcccctgccctcaaagcgcttccaggcgacctctggcccaccttttatttttatttacagtcccaacggaagggcccaggtccccaagtgggcctgcgtatctccagaacaccatctaagtcacctcaaggtatgaagcctcccttgggtgtacctgccaacgagccaatcgttggtttcgctggaaggctccaccttgatcatggctcgctggtggccattaataaaacactttggatttcacaagtttcacgtttgaatttcacaagacttgtatctcaccaatcagccacacgcgggttgacactgaaaggcacatgctgacacctgtccgcccaggggaaatctaccatctctctattttagttagggggcggcgtgtaggccgcggaattctctaacgagcgcgtttctcttcaccccctgggcccgcgtggacccccgtccacccccacacgccctggggggggggccgggcccacacgccctggaagcccctagaggtgactctccctgggacccctgtaccagggaggaaggataccgccacccgtcaccaccccccgccagaagctccttcgtgactcctctgcgcgtgccttcccacacctcctccgtccgggactgcgaggagtgggcggtcgactcgagttcgcagcccaggcctcccacacgcccctccctgccgtcagcacccacccgcgcggcagcggcggcggcggctggcgggcggccgcccttttaaatccccgggctcatttgcatggccccgccccctgagtgacacggctggcgcgggcgggcccgtcccccctgcccctgggtcgctctttttaagctcccctgagccggtgctgcgctcctctaattgggactccgagccggggctatttctggcgctggcgcggctccaagaaggcgtgagttcgcggccgctccggtggcttcttttttttatatctataatttaattaaattatttatttattgaggccgcgcacgggccgtgcccagcttcctgcccctcgccatccttcgggggagggggaatatttttgtccccccgcctggctgtgacacataaataccccgcgggggcctgggcggcgagcacgcggcggcggcggtctctgagcgcctctgctctctcccggtttcagatccgcatttgctaccagcggcggccgcggcggagccaggccggtcctcagcgcccagcaccgccgctcccggcaacccggagcgcgcaccgcaggccggcggccgagctcgcggtgagtcgtccccggggcccgcggcggcggcggcggaggggggcgcccgcgcccccgcccgcacgtcgcccctcctgcgagccgcccggggctgcagcgcgcgccgccggctttattcccaggccggggcggcgcgagccggcggcgggggagggccgcgcggcgcgggggcgggcggcggggcccggcggcgcggggaggacgcccgcaccccttcccccgcgccgcgggcgccctgcggggggcggggacccgggaaaggcgcgcggtgggggagggggcgcgcagctgcggcgagcgcgagttgtgcacccggcggagcccggaggagcccggcgcacctcgcgcggcggccgctcccgctggagccggagcccgagcccgagcccgggcccgggtgaggggcggggagagacacgggctgcggcgcggcaggagagtggggggtcgggcgccccccgcagctcagggaagttctggaagtgagggagatggggaggaacccccaaattcggccctacgccctctcggcctttctctcgcgccccctccgcagatgaggccggagcgcgggcctgggtttggggcttcaccccgaccccacctctggcctggcccgcgcctcttcagccccaggggccgggcctgccctccgcccccacaaactggtttcgctgctttgctgggctctgttggaactagtccctttgactccccgtttctattttattttcttctggggctttattttgcggggaggggacggagggagggggctttcttcctctcccccgcgcccgcgcgcgccaggtttcctgccccaaggcgggcttgggtgccccctctggcaggaagtggggccgggtgcacccgcgtggcggtgcatgcggtcggggtgcgctgctttcccgcgcctgcaggagcggcctgcgcccctccccccgcgcgccctggccccgggtcccgccggccggcctgcaacggccgggcgcagacacttgcagagtcaccctcgggccgggtctggagcctgatgcctcgggggtttag

SEQ ID NO: 766 - DNA, 2380 bp, Homo Sapiens
tcaccttaaaaagctctgtgaccttcaaggaaatagttggactaaggatgaaaaagaacatcagaactcctgataaccttttaaatattagtatatataagaatatagggcagtcacggtagctcatgcctgtaatcccagcactttgggagcccaaggcaggtggatcacctgaggtcaggagttcaagtacagcgtgggcaacatggcaaaatcccatctctacaaaaaatacaaaacttagctgggcacggtggcatgcatctgtggtcccagctactctggagactgtagtgggagaatcacctgagcccgggaagtcaaggctgcagtgagacgtgatcacaccactatactccatcctgggtgacagagtgagaccttaactcaacaacacaaaagaatatatatttatagatatatgtaatacacatttatccatgacttttatcacacttcatgtattcctggtctacacctaatcgatcaatagcttttaaaataatatttgtgtaaaccacaatttatactgtatgattaacttcaaactgaaaccttcactaaacttaaggactcacaatgcattacatatacttttatcttgtaattagaatgaagtgtgaagtatataatgcatgctggcaaggaattgaaaacttaaatttgttttcagattataaatttattcgaaaacctgcaaagccttaatagcacatgagtacatgaaggccactaatactctgaaaatagcacctagtccctgacccatttatcctccatcctccatctgtaccagaaaaggggaacaaagatgttgaatttatggccagttcctcaaaggtctgctgcttcttgataatgagcaaattgttcttttcttaactttgttcttacttttagggaagtccttgctctaattttgagaggaaagtagaattctaactgtaaaataaaggttcttggctactctgatacatatatcatctaaaagtgtaactgaccctgacagtggccctgtctcctaggaccccctcctttctcatagaatccagtacactggagagatggtagagatggtacctgatctgctgctgatgtgatcgctccttccaaaatgtccagattccgattcattaatgccaaagcctcctcacgagacactggtgttagggtggcattgggcaatatcgctgcatgctcataaacagctgcagtgaaagtgtcctggcagctggctcttgagacatagaaaagcaaaattgccacgtaagctggcaactgagtagtcatgctgaagtccaatgagtgctgaaaaacagagcatgtcctggtatttatagaaagaagacacgtggtgtccagaacttagtaccttaaactacggaagttaattaagaaaacgctatgatttcatagcattgttacataacaaaagaccctaccttattgcagtaatttgtgaagattaactcaagaactctatgtacattagttcgctagggctgcctaacaaaatacaataaactgggtggtgtaaaaaataaaaaatttattgctttgcagttctggagggtgggagtcccagatgaaggtgtcagcagagttggttcctcctgagggcggtgaaggaaagatgtgttccaggcctctctccttgacccatagatggctgccttctccctgtgtctcttcatatgctattctccccatgtgtgtgcctgtatccaagttttccctttttgtgaggacaccactctaatctttaacacagggaaagggaaaatcccagctctagctttttttgtcatcgttgttgtttgtttattgttgttgttgtttgagatggagtttcactcttgtcacccaggctagagtgcagtggcgaaatctcggctcactgcaacctccgcctctcgggttcatgtgattctcctgcctcagcctcccaagtagctgggattacaggcgcccgccaccacgccaggctaattttttgtatttttagtagagatagggtttcgccgtgttgggcaggctggtctcaaattgctgacctcaggtgatccacctgctttgtttttatgccaaataagggcagaagaaaaaagccaactgaaggtcataaacccaggggtacaggctcactgaaagactgagactcaatcataggaccaattcgatttagtgcccactgtactccagtataacttcatcttaactaattagatctgaaatgaccccttttccaaaaaagttacattctaagatactgacagttaggacttcaacatataaatttttggaattcatatattttggaatgtcaacacaagacattcaaataattttaaaactttattattattttcatgtgaatatt

SEQ ID NO: 767 - DNA, 2405 bp, Homo Sapiens
cagtcaaaacttttgaagcatatactcttccaaatttctaaacttcaaattatgttcggccttctagtcccattcctgcctgagtctaacactagtatctcaccatcacatatggcgtaaggcttctttttgacatattttacttacattttaagaaataattctattattctttacaaagtacgtgaaaccacaggtatcaaatatatatgcttacccaaattttaagattaacttacttacatgccacatttaattatgagtatttcgtgaaactaccatatttgaaaggaaattctctaaaatgtactttaaccagccagactgatgttacctggatttaaacaggaagattacacctctcctgcttgtaatgcaattttcacttccatgtgtaacccttaacataactaacatacataaatctagtttgagatagtctcgctcatgtcacccagactggagtgcagtggagcaatcaatcttcgttcactgtaactttcgcctcccggactcatgaacaaccctcccaccgcagcctcccgaacagctgggactacaggcctgcatcaccagacccagctagtttctgtggggacagggtctcaattatgttaacggtcaagccccaggcttgaacgaccctcccgctccaacctccactgaagtgcaagtactgactgctcacaagcgttaagccacctcgcccagtgacatatataaccaaaattacctcaaactaatggccgatggaacgctccttgaaaattcagtccccgtacattcccgaaatgcgcttaaacgggcatttgtgacaggcaagtaagatggctggttaacagcagtaacgttttgtaacgtacagcctttttctgagacggtaggtggctctgaaaagagccttttgttttttctgacacagaagtctttttaccaatgacaaccttaagttacttgctttgggctttatggtggtgactctcagtcttcttgggcagcagcactgcctgaatgttaggcaggactccgccctgggcaatggtcacgccgcccaaaagcttattgagttcctcatcattgcggatcgctagctgcaggtggcggggaataatgcgagtttttttgttatcgcgagacgcattgcctgccagctcaaggatttctgctgtgagatactctaacactgccgccaaatacactggtgcgcctgcccctatccgctctgcatagtttcccttacgaagcagacgatggatccggcctacgggaaactgcaaacccgctctagaagagcgagacttagacttggcgcgtgcttttcctccctgcttccctcgtccagacatctcctcgcatcaaattgcagcaacacgagaaccacatttctagggctgctactgggcctatttatagtctgactgaggttggcatttgctatctgattggctgatggccgtctacccaatcagaaagtcgtactagaatcgcctcatttgcattcacgccacttcccattgtccaatcagattttggataccgaacgcggcgtttgagggccgtgcctataaataccgcatctttcatcctccagttctgtttgtttacttggcgagacttggagctgaggtcatttggagctgtttaatactgaagagctgttgagcactggaaagtgctgtgtaaccctggaaaagaaccgtgtaacgctgcagaagtgtgtggtagctatgccggaggtgtcatctaaaggtgctaccatttccaagaagggctttaagaaagctgtcgttaagacccagaaaaaggaaggcaaaaagcgcaagaggacccgtaaggagagttattctatttacatctacaaagtgctaaagcaggtccatccggacactggcatctcttcgaaagctatgagcattatgaattccttcgtcactgatatctttgagcgtatagcgagcgaggcatcacgtttggctcactacagcaagcgctccaccatttcttccagagagattcagacagcagtgcgcttgctactgccgggagagctggctaaacatgctgtgtctgagggcaccaaggctgtcactaagtacaccagctccaagtaagcctgctaagtaaacgtcatttctaacccaaaggctcttttcagagccacttaaacatactgaaacagctgtgggcttcgtttttgtgtagtttctaaccgtaagggttttttttttttttgaggcggagtctcactctcccaggctggagtgcagtggcggaatctcggctcactgcaagctctgcctcctgagttcacgccattctcctgcctcagcctcctgagcagctgggactacaggctcccaccactacacccggctaatttttgtatttttagtagagacggggtt

SEQ ID NO: 768 - DNA, 2500 bp, Homo Sapiens
cagtgctcactaaaccttatactggatcaagtgcccactttcctgccttccatgcaagggctgctaaacataaccaacaaatttcagtgactaactgggccaaatgagagatgtaataaattttctattttcctacggaacttaaataatgttttaaattcaccaagcaaggaggtaagttcatctgaccattttccttacaatctaatgtagtaatcattaaactgtcaacggacatactgctgcaatatttgatgcagtaatttgaaatagcattttagtaaaaatcacatccagatacatttcctctccaaagaaaagcagctttaacagaagcctttacagctttaataaaattattggcttgctctaattccatttcaggagggttgtgaggaaaccataaatatatagaattgaagcagaggtactggtttaagtttaattccagaaagtattttcaaattatcaatagcctggtttgcattgtaaatagtaaatgtgctaatgccatgcttatttagaaatcattttaaactgcatttattgataactaaattagaactcaaataatgtattacccaatagtctcgaaacatttaatttaatatggagtgtagcaggttctgataggcgttgggaacctagctaatgatttatgaggtcaccacttagcacccctagtaagaagaaggctgcattttaatgtccctctgcttggatttgctacttagtttttctttaatcaggatagggtgtacacataacttttaggtttcacttgtgcttataaaatccggttaaaatgatcttagtgtgtcttttacacttccttttacattttgaggacatttaatgagctcttttggttgcatttaacatcattcccaggacagggagaaatctccacgccagactcagcgatggaagtagatcttttagcaattgagacagtttactgtcgtcgagaggaagatattgttaatggtgacattcgtctgatttatctgtgttggtggaaatggtaatgcaggcattgtttgagggagctccagaaaccattgttctggggtagaactcgcaactactttgtgtggttcctcaaaacgtccctcactctccgcctccgaataaaatgtttttataaggaaatactagggagaacccgggcccaccgactgtatgttccaggtatcctttctggggtaggtaagtagggggctgtgttccctcccgcgctggttgcgcggcctcttaccgggacctcctcgatggcgtgaggtaaggagtggatcgagaggtctccgagtcctgagctgagcgcgtgtgggccgtgcaggaggtcctcgtgccgcctgtagtccctgcgaggatccaggcccgacagctggtgaggcagcccccggtgcgtgtgcaggagcccagactcctggctctgcctctggccgggccagcctgggtgctgcggctgcggctgggcgtgcagggggttcaggctgtaggggtcgttgacgtgggagtaaggatcttgcgactgggggtagataggctggtagggtggggggaagtatgggggctggaagtcggcattgggggtgtgggacagcggcggggcgctcgtgtagggagattgacctacagtgcccagctggggcaaccgtgccgtcccgttgctggtgccgtcgtgacggtcctagaagagagcgagaggaaaggtaaagaacaaggaatcaggcgtcgagctacaactatccacacaaaatccacttgacaagtctgcgtgggaaatcgcccgttcccgttggctggccgccgggaaaaaatcagctctaagttcttttcaggaaataccctcaagtgaaacagaccgaacaacgcagagaaactgtatatggagggggcacaagagactatttaggggtttctttcaaagagaggaaaagatagaaaagggtctcctggaacacagcccattaaactgcagcgtgaaatctctcttaagcaaaattaaaattcctcctaaatactaaacagcagaagcggccttttcttttcccccgatttgaacctgtctgccactgcgttattgtttattctcttccatttatttggagagaaaaaaatcataaacgttcaaagactgttaccgtttcatgactacttaaatagaaacatatttcgcagaggggctgtaacaaaaacacacgtttaaattaccagcttaaagaaggttttaactgcaggatcggggtctgtctttttcgcttcctctgttaggagcctttttctcgacagagtcgatttatggtttggatagggaaagggggacgtcaagtcaaggtttaaaatagaaagattcagccttattgggtttaaaagagagaggtgcaccccggggctgtggccccccccccccgccccttccaccccagccccaaagggcagaagaaacgcctgactttaggtttctctattgcaattcccttgcaaaacaagcgaa

SEQ ID NO: 769 - DNA, 2475 bp, Homo Sapiens
ggggggctgtaaggtctttcccttcccacgaggccgtatctcaggttgtctcagtggggggaaacctggacaatacccaggctttcttgggcaggggttcctgcggccttccgcagtgcattgtgtctctagttaatagagaatggagaatggcgatgacttttacaaagcatactgcctgcaaacacatttttaccaaggcacatcctgcacagccctagatccattaaaccttgattcaatacagcacatgtttttgtgagcacaaggttgggacaaaagttacagattaacagcatctcaaagcagaacaaaatggagtttcttatgtcttctgttttctacatagacacagtaacaatctgatctctctttcttttccccacatttacttcatcatatgatatcaacactgactctttcatgtaaaatgtcagtcctaggttccttccacccttgtgtcctgcctgtgcccccaagggtgtaattctttgttccctcttcccatagtcagtgtgtgtgtgtgtgtgtgtgtgtgtgtgtgtgtgtgtgtgtgtgtgcgcgctatattctgacacatcattagaatctaaattaatctaccttgttatatttttctgccactgataatcttctacttagtcatgttacaaatgtattttttaaagtaagtgtttgaagagacagggtctcactgtcgcccaggctggagtgcagtgctgccatcatagctcactgcagccttgatctccttggctcaagcaatcctcccgcctcaacctcctgagtagctgagactacacgtgcgtgccaccatgcctggcacacattcatttttcattatctgtgtctgtatgtgcccagaggtacagataacactaaaatgaaaagaggtggcagagaacaggaagagaaagaaaccagaggagccgatatccttaaatgctgtggctcctaaggactgccagcaggttgtggggctagccagaaaaaacagagcctctgattctagaaggcttggagaaagcgtgagaagggagatcagatcagaatagattgatggaagggaaaggcggtgagggtgaagcaagagaaactcggctccagtgaaaaggacccatcattgcattccagaacgtaatttgcatttcatatgtaaatgaggaggcttcctagaggctggactgggctgggcttagctgagcctttgcaaacagcagggattcaaccctggggaactgcagaccaaagtgagagagggacgcaccgcatctccaggcacatccaaaaaggatggacgagacaccgaagcagaggatacaggaggattaaaggattcaggaaagcaagcagccctccggagaagctgtcgaaattcaagactggcaagagaagcaaattcaacctctcacaccgatcatttctcattccctgaaaagaagagattgtttccccagggaagtgaaaataatgaacttttggaggtactgcttttttgctttcactctgctcagcgtggtcatttttgtgagattttacagtagccaattgagcccgccaaaaagttatgagaagctgaacagttccagtgaaaggtattttaggaaaactgcctgtaatcacgccttagagaaaatgccagtctttttgtgggaaaatatattaccatcacctttgcgaagtgtcccttgcaaggattacctgacccagaatcactacatcacaagtcccctgtcggaagaagaggctgcattccctttggcctatgtcatggtcatccataaggactttgacacctttgaaaggctctttagggctatctatatgccccaaaatgtctactgtgttcacgtggatgagaaagccccagctgagtataaggaatctgtgaggcagttactgagttgcttccaaaatgctttcattgcttcaaagacagagtctgtggtttatgcaggcatttccagactccaggctgacctgaactgtctgaaagaccttgtcgcctctgaggttccctggaagtacgtcatcaacacctgtggacaagacttccccctgaaaaccaaccgggagatagttcagcatctgaaaggatttaaagggaaaaatatcaccccaggggtgctgcctcctgaccatgcaattaagcgaactaaatatgtccaccaagagcatacagataaaggtggcttttttgtgaaaaatactaatattttgaaaacttcacctccacatcagctgaccatctactttggcactgcctatgtggcgcttaccagagactttgtcgactttgttctacgtgaccaaagggccattgatctactacaatggtcaaaagatacctatagtcctgatgagcatttctgggtgacacttaatagggtttcaggtaggtactaatttccattctgattgatagattgagtttgctaacattctgctcgcctagagaactgactcatttgaaat

SEQ ID NO: 770 - DNA, 2426 bp, Homo Sapiens
ttaacttttgtatttttagtagagatggggtttcaccatgttgcccagaatggtcttgatctcttgacctcatgatccacctgccttagcctcccaaagtgctgggattacaggcataagccactgtgcctggctcaagggataatttctaagaccccctgtggatgccggacactaccgctagcaccaaacaacctgattaccatcaatcagaactcatttctgttcctatcttccacccacaattgtaatgccttttccattttaaccaagcacttattatatactatggccataacttttgcagtttgaggtatgacagcaaaattagcatacatttcattttccttcttcacattttcatagatggaagagtctttcttaccacagatcatagcaacctcggcatatgacttttttctttccctattaagtcaagaacttttatcttgacttttcacttaaaggaagcactttacagcttctctttggcatatccaaattcccaacatcactactcttgcactttggggctgttgctaagtaaaataagggtgacttgaacacaagcactgcaacaccaggacattcgatctgagacctgagccaactacgatgtaactaacagtcggggactgtgtacagcatgggtatactggacaagaggataatttcatcacactactgagaatggcatgcagtttaaaacttatgaattgtttatttctgaaattttccatttaatatttttggaccgtggttgaccttaggtaacagaaaccaaggataagtggggggtattatatacatatatgtatatatgtatgtttatctgtatatgtgtgtgtatatgcatatatgtgtatctttacatatatacatacatacataaagatatagaaggatacatagcagggatttcaaactggtggcccctgaagtggaaatcaatatttaaaatctctctgacttttgaattcgtttacacctgactttgtattctccattacttcacagattcagacattcctgattttttaatgtcaaagttcacatatttgtattaatatttatataaattaactcaccctatgcacacatttatattaattttactaccacccaattcacatttatatcaactgcctggccccataagcatttagttcgtgactctgaatatgcccaggcattaactatggttctctctaggtcatgagtcgtttttaattttttctttttcctggtctgccctgtctaattttgctaaaataaacaaacatggcttttgtaataatggagaaagacgccattttaattaaaaagtaataacaatgtggcctgtggccctctgggctgtttgggccacgctccactggcccccactgagcctggcttttctgggctgctgctcttcctgcctccccagcctgcctcaaatgtgtcgccaagtgagcggctggggtcccttcctttccctgtgactggggtccagtgagagctggcggttggatactgtctgaagaatgggcccttcctggaagcgtttggaaacccagttggggtctgaggtcctttcaaacgctgaactcaagcgtggggactcagtccctggaaatgccaactgctttactctgactgggactgttgatagatatattgcttcatgctaatgtggtattatcacaacacagttccactctcagctactgcaagtcactaagacaacatctggtttgaatcttttctcattatggcctaaaaaaataaaagctgaaatccaaaccactcctttaacactctgtctctcttttttcttcctctcccttttctctttcttttgcactccagaaacttcaaatgagggggaggagtttagaaattgtccatcttatgtgcccttctccccattttacagatggggacgctgaggcccagggaggagcagtgacctgctatatcacaaaccttgttaaggtaagcagctcaagtctcccaggtttcttatctgcaagccaggatggcactgacctctccccacatcacctttaagggaccccctcaaggggcagacaggatggggcatggtgatcagtaaggagcctaggcaagcattagctgttgccaccgtccaagggcttctagttaattggtagcagaattaggtctttctagaatctgagtcctctgatttccaatggtaatgtactctacaatttactcgggaggaaggactaagatcataacactaatatcttctaacgtgctggatgctccactaagtgttttatgaatagtgcaacatcacagaggagagcaacgtgctggagcccagctacgaccttgagcaagcacatcactcttgaaacctctttccacttgtgaaaaatggaaacagtaatggggtaacgagattgttaagagga

SEQ ID NO: 771 - DNA, 2422 bp, Homo Sapiens
ttgtccaagggccataatcttttatggcctcaggttctccacatgcaaaatcaggataataatgttctctacctcatgaggttatttaaaggaaacggtgagatcatgtgttttgatagaatatattttaaagcctctatcatggttcttgacacataggaggtgctcaggaaatattaggtactattgtcattgcaacaattaggaaaacttctgccactatttatatgtgatagaattgagggatattagatctggaaagtagctgggccattgccttggatgacctgctcattttatgtttgaggaaactgaggcccagcatgcttgtccaagttcacacagttaattagtggtggagctaagaatagtatgagtctacattgaaaggaggccagctgtgtttacatcaattctatttaacttctttaattaagctgttgattccttcagtgacgtcacccacttgttttagaaatgagttacataagcgcgtctccctccactatttatttgctccctctgagaagagtatcgggctgtcccaaaataagcaaagattcgagagaatacccctgtttcattgcttctgctccctgctgctgactcatttactcctgggcctctgagctcgctcacatcaatcacccatcctcagaagaacacactgcgtccggcctcacaggccccgtgcagctggagctctgcaatgccacccctgggaggcttcattgcaatgcaaggaaaggccactgtcaggtcctcccctctgcacagagcatggtacccagctaatgatcatgtccagctaaaaacccttttggtttttaaaattcaagtcaggcaatcccaagaggaacggcatccaaacagatgtgtcttttaaccacacagttttaaaacaactggataaaaagaacatttgttccatcttcctactaccaggcattcaaactcagttttaaataggtatacaaatagctgggcatttcaggttgatgatatccactctcagggcaagtggctaatttccttcctaagctcgaataataaatgcctaatcatctttttatttttcctaaacagtaatgtgctctgcatccagtctgtgtctgtctgccggtgcagagctgacattacctgatcctatttcacagagaccctgtgtttgctagatgtccaaataagtggttgattcagggcaaaaatattagtcaagccatttgtttcactcagttaaagaatcagtgcaggtaaagtaggcgagtcagtagcccagcgtaggcaaagctgcgtgtcctcgaatgatctttccagccgtcattcctgggagggctgggcttttggggcactcctaaaggaactgccttgggctcaaggcaacattctctctcagcagcttctccttccccatttccagtggttatctcaactacttcaacaggcaaccttaaagccagccagaagcaattttagtttatcaagcttgaatgtgaaaaggagcaagcaaagacctgagctttctcttgtttcttttcttatgagtaacatgtgatcttttaaaaattattgtagtaagaacacctaacatgaaatctaccctcttaacaaatttttaagtgtacatgagcctttaaaacaaaacaacctgactttttaatgatcgccattctaactggcgtgagatggtatgtcattgtggttttgatttgcatttctctaatcaccagtgatgatgagctttttttcatatgtttgttggccgcacaaatgtcttcttttgagaagggtctgttcatatccttctcccagtttttaatggggttgtttttttcttgtaaatttgtttaagttccttgtagattctgtatattagccctttgtcagatggatagattgcaaaaattttctcccattctgtaggttgcctgtttacaatggatgccagagaggatgtggagaaataggaacacttttacactgttggtgggagtgtaaatgagttcaaccattgtggaagacagtatggtgattcctcaaggatctagaaccagaaataccatttgacccagcaatcccattactgagtatatatccaagggattataaagcattctactatacagacacatgcacacatatgtttattgcagcactattcacaatagcaaagacttggaaccaacccaaatgcccaccaatgatagactggataaagaaaatgtggcacatatacaccatggaatactaagcagctataaaaaaggatgagttcatgtcctttgcagggacatggatgaagctggaaaccatcattctcagcaaactaacaaaggaacggaaaaccaaacaccgcatgttctcactcataaataggagttgaacaaatgagaacacatggacacagggaggggaacatcgc

SEQ ID NO: 772 - DNA, 2365 bp, Homo Sapiens
aatgcaactattaatgctatctgttataggctcaaaacatttcatcacccccaaaaagaaaccctgtacctattaaacagtcacttgcactctcccctgccccaagcacctggcaacagataatttgctctctgttgccatggatgtatctgaatatatacccccaaataattgaaaacaggtattcaaacaaatacttgcatatgaacgaagatccaattttaaatgggcaactttgaaaaaaatcagtctgtaggtcagttaatcttagaaagtgagtctataaagaacaggctgggtggccacaatgcccattgaatttattaaaacctgtttttattttgtaccttagttcagactgttcttagtgccaaaagcagaatcagaagatcacaatggcttctagaaacaagatgaattaatatgaatggtgagttctgagtgagccaggtcataactttcagtaagaaaaacacagaatccaaatttcattgttttcagcttttgttttaactgttttataattgggaaattttgccctcaaatgaatactattggtaaataatcctttctaattgaaggcttaaaatgtctgggcaaaactaaaaatgactccctacccaaggtttagtaatagttaaggcattcaaacaggagcaggctgaagaatcgtcttcaggtttggtcttagcaaacctgcaattactcatctccccatccagacttaccctgaacaaagcaaagggtaaccaaagtgcattaatcgctcactgatgactcaagataaacaaaaaccttataatctttgtttcaaatagtgtgcattgagatacatagagagagagagaaaaaaaaaacagtccctcttaggtggtgaataaccatttacccatcagatcttctccaagtcaagagttccactgcctatgtcaggcttttggacaccgcacataaaacaaattaagctttattaacttagtggaatatttggaaatactaattttacaggtgcatgagagaaaactgcagttccaagtattagagtaccattaaatataatacactccgtatgcaggggcagttatttaatattaaaccaataaaacattaccagtgccggtgagagttttggttgttgacagcaggctaggtgtcccacagccatgccgtctttctgtttgcaggccaattttacacagctgctttcttctggaaatcatgcctcatttgaagccttcgcaagtatgacaaatagcctctctaagccttagcgacggtggagaaacttgaaaatatttaggagcatttattaactagaatatgaaagaagatttagttcaactgcagcttttgactgtgtggaggtcttgttattgtaagaaatgctatctgtttgggcgtgtatatcttttgcaggacactgtgtaaaattatcaccctgagggcaaagctaagtttaaactgcatagaaattctaacgttgatctataagtggacaaaattagaatcaagtctttactttcaaactcagctgtctggtggtactgctgatccacatgctgccattctacgtatcacaaatgtcagatagagctccttgtacagggagcttcaaatctgtgcaggaatttaggatttataggaaaaagatatagaaaaaaagaaagactaggtgctaattgaattgttcaaaccaggcttgcaacatgcaaagcacactgagactaaagtcaggagaggtggacccagctgttggagtttgggatgaataatggaggaagggaggacataggcaactggcaggggctaaggatggggtggggtggctctgtgcacacaacatgacatattttgagaaaaagtgaaccaatatggctaaagtggagagttcatgaaaagtccatggaggcaagtagaaggagagaaatgtagatacattgaatggtcccattacagaggctcttgaacaccaggataggatatagatcttttatttaactacaggaaatgtggggtgatgagggctttgggaacatgagtgtgacataagaaggaagggtttggggaaattccattacaacagcctcttagattaattgacatggagagaattgagaaatgcccagtatgcttagaggattgagtaatgagagacctgcacgaggttggaattggcagtgataaaaaggaatggaatgttttaaagaatcatttgaaagagagaaacattttgaaggaagtatttataggacctgagaactcactgggtgtagagagtgacgtgtgggcaggttcaggcggattctgggactttgagcccaggccacttaaacaacaaaataagaaaactcaaagagtaaactga

SEQ ID NO: 773 - DNA, 2356 bp, Homo Sapiens
tatgtaacgggaatgtttttatccattgtcacaaatattacaggagttataattcaatcttttaatgaattactactttgaaatagcaggtagctgaaaagacaatctgtagggatatgaggaagtgtccatgaaatttcaaggttacatatcctactatcattccagaaatagtatgcttgcagtttattttttgtaaattcaagaaaatcttacaaaattcttatgagactgagtgattcaaaacctctttcctttcaggctcatgcaaaattctcacaggtgatctaaaaatgcaaattttgattcatgggacaagtagaatccttcagatcttgtagttggcttgagtgctagcatatggcctatagtattaaggcgaaatggagaaaaaagcgtgaaaagacaaaagacaatttatgcgagcctcaggacgaaacttggaaaaaaactcagtttctaccttcttaattcaaacagccattaaaagactaatgactacataatatagcattaaaatatccatgcacaaacacacacatttttcattattttacccacattatgcatgtgacctctgtacataaaatataaaagaatgtcagaaatagcaaagttgccaaggttacacagagactgctattttagatgatctaaaaaattttaatgatcgcacacatagatctgagagatgcagaggcacacagctgtagccttagaacccagctttatttaccatctgtctgttagcaccatgaatcttggctgagagctgctctgcagatctgagaattctgtcttcttttccaagcactctgggctgagtttttcaggggattaatggaacctagaagtaatgtttccctgctcccaaacttggggcaaaacaagggcaggttattaacttcaaggcaggttattaacttagttatgggctcttcatatgcttttgcttgtaactgtgtggcagactagacatttagtcacttaccttctgtaagggaagtcacttaatgtagatgctcaaggaatcccacgtccaaatacggtcattgctgaatttgatgggagaaaaaaaggactgtatttttgctggctaatgcggcatttctggatgttcattaagctgttaaaaaatgtgaaatgatgactcactgtgaagccttcccaacccccttccctgctccaatttgcctgcggcttgaaggaatgtatactgacttgagttaaagaagaaacttgtggtttccattatagtctgtaaacatcgattgctgaaagcctcaagtgtgctatcatctcctgccacacacatgctttatatacagttcatcttggaaaacagattgggagagcaccgtgtttacaactccagagtaacccaactaatggggggctggtctgcctgggggtctcgagaccatcactgttaacagtggaggtcccctctgatgtcttttaagccaaagtatcaagagagaagccaaagacaagcctcattaaagaaagatcttcctggtacccacagtggttctttgctgctttatcatcagcaaaagagacataaaaaaatctttgcttctcttttaggttgtatccttaggccttattcttgatgtcattgaaaagttggtttatctattatttccaaggccactggcaatgctatcatttttgattaatgattagtttatggctaagtagtattccatggttaggtgatggttatattgaaagcccagatttcagcactatgtaatatagccatgtaacaaaattgcatttgtaccccctaaatctatttttaaaaagtttaatttaattatgcaggagtggcagcagaatgcaaaccatccagggaattattctggtagtgcctgatggatttaaataataccaagagaaagactgcagagggtatcctgagatttgcatgacatcctgaccagggttgataagaagagctaaatggataagtttcttctggaaggagatatcatggatgtggtatgggtagaaaaagtacaagatgcagcatcagaggattcgaatgtgccttctggctttgacattcagtggctttgtgacctagggcactgcttcttagacattaacatgggtacatatcacctggggggtttgttaaatgcagattctgattcagtaggtgtgggtggggcctaaggctgcccaccctggtcatcttgcacctggctgtgagaaatagagaacctggcaaggctcctaacccacgtaagtctcagtttcttctttaataacacggggtttagaatgatgccaaccttccagggttattgggactcatggcactggtaagagttcctggcacaggcac

SEQ ID NO: 774 - DNA, 2474 bp, Homo Sapiens
aagtttttttgcaaatatttataaccccatataatctattaccatctatcaggtacattttctaacttatatgttctgaaatccccaaatcctgaaatgttagaagtaaacttgggaatcatttagttctaccacccatttaatgatgaaatttcaaatcagatacttttttagttgactgattgacaagctttctactcttttttaaaaataatgtttctttacaagctcctttaaattatctttacccacattcactaaaagcagtaatgaagtcaagggtcactgttctgggcagatgcctgtggatatcagattcctaggaagaccaagtttaggaatttagctttggaggtctaaattccttggaagcaaccacattcatgtccagtttctttagacccatgagctcaaacaaaaaccttcttctgaggcattacccttttgtttgtagtcatcattagtactcttgttatagcaggtcatttttcttgctgccttttctgctagttttactttttttgaaatacataaaattgtttgggatataaaatcccccctctcctcagccttgtgatttggactattctctatcacatactgaaccttttcgtattctttggaagcctgatggcttgctctagaattcagcaaattgggcagagtggatctttcaaaggcaagtgagcattgtgagtatcaccttttcaaggtgaagagtgtcctcttattcagagagcactgaccctgagaagtcacttactgtttctgctaaagcagaccttgagctcaggtgttctttagatgtgactctgaagctgagtttctccatttcctaagcctgattttggacaaactgttggacctttttcactctttgctttgcccctctgtgcaatgggaaccaggatgccgagttcagtggttgccatgagagtccactgaagcaatgcgaaatattcagtgcagtgtctggtgcctagtaggcattctacagccttgatgcctttggggcaggcttactttagaagttttaagaaatctcaaaatgagttctatgatgtttgccgtgcttggacacaaaatgagaaacagaaaatctgccttctcaccctatgggtggagtgttgctcctctatattttaattctttttaataagaaaagggcgtcttgaatgtggtgggaaagggcagaccacatggtgggaagtcatgtaacacaagatacactttattgcatggcgtgtttctgtaccacagatgtgcacacagatgtgatcatcaacagagataactagtttacaagccctccctggaaactcctcatcgtttttagtagaaaagtgattttcagccaaggcctgagctgaagctcagcccatgattaaagcatttccaactgttccacactgaaaagaaagaaaagagaaatgaccagcagtggttttccagccaaggtgtgagaccagaggtcacctaaaaggcttaagtctattaaaacaagtatctgctgtggccttttctttctgcctttccctccttccttccctccctctttttcctaccttcatccctactttcttctttcatttatttctttatcatacattttttttctcctgctctcttcttcttctttctcctctctccttcccctttattcttcatagaaaaatatcaccttatgtcaaggaaacactgagcaacatctactcatcgttgagcctgttaatgtggagagggcatatttgtttactttctaagttgtgtaactttattattattatttttattggtgatatgtgatggaagttttatgcaaatgtctaaagcagcagtttagtataataaatacaatctttttaggattcaaggaaaaacctgagttcaaccctggttcataattctcaactatgcagtattctcaaatacagtagctctgcggactaaataaaataaatgtatgaatacaaggtatctctataatacatatggaactacagcttaagtctcattctctataatagaagtagggcctgagaaacagattcaggtgcatgtcattttgggtggtaaacatctcaggaggaaggggagtgaaggaagcagatggagcaggtggaggagctgagcttaggatgtggtctcttctggagtctggatttaccctaatcccacagagagctctggagtgtgaattacacacatgaagtttgttcctaccttgatgtggttggctggtcttttgtattcttcatgtccattagcccttgcaggtgggctgcccctgggctgggggtggcgaggtaacctcccaggcaaatgtccaagaggaaatctctggagaagggggcagttatgagccattagcagcctccgcttgcagcacctggggcagaggtaccagtctggtaaagggcgttggttgtgatatcagcagcatccactatggggctcaataaatggtagctaaa

SEQ ID NO: 775 - DNA, 2412 bp, Homo Sapiens
agggagcttcaagaaggaaatagtggctggtaatctttaaactatggaagcggtttaagtttaaaaaatattctggctgttgtagccatttggctcttagcaagatctcttgcaggcgcttgagtggaggaaaagatggaaggtgtagaggatgatattggtcttctgtccacatccctctggaagtcactcgcatattccaaggactgcttattatgaacacctgtaactccttgcttggggcttttatttattttcattattttatggctgaagagtacccttagcctaagcacagagcaagccaaaatgacagagagtttacgtccccagacagctctgaaacaatgacaaacagatatttgataactaaatatcccaatccactggtcctcagttggaataatgctgaagaatgtttcacaccgtctctcagagctccccagagggatcaactggtttgataatcttcaagaacttgctgtcctgtctttctctgacatactcctctactcccctaccagtgtttctgggaatcacctaccaaacaaattactcactcttgaatccttgcctcagtggctgcttctgggaaaccaaaatcatatagaagaaaagagttagaccagtaagtataaacttagtgagaacagctgaaaaggagtatcaggaagagaaacacagtcaaaaatggcttattataatcaagaaagagtgctaagcttatttgactgagggtggaaggaatataagagacagaggggagagattttataggaattcatatgcagaaatatttttttttctgatgctgttggttaaaatataaaaggagaaaaaagaaaagaaaaaataataaaatttgcattataaaacttaggaaacctctttctagataagataaaggcacaaaagtttcctcttcaaaagcataaaagaagttctgatgttcttggacctttgtgtgtttaggaatttccaccatctctagaatccgtttaaccactccatgacacatttttttctctccagatgtaaaaactgaggagtcagttgtcagttgaatactctagtattattttctcagcaattattttaaggaatgcatttgaataaaatgcagttttggcatcattttaaaaaatggatgatgatttatgcttttcttgcggggacaagatggctgtgggcatgagtcatgactgtacgctgggaagattccgatgggaaccttgcttttgctggttgagccataacttacacggacttgagactgtgcgtggcttttattaacatgttcattttgcttgttaaggctcgagcttcatctttttcttcccgactaaagccctgtttgtatttcacacacacctgattcaaaatctgtgcttggaacccagagtggcttgggaatagtaatttggaaaaatttgattatttgtcagttaaaatggaatgatgtgttctcagctgcagctgggaaatgggctatttctctgcaggggagtaaattcaaatgatagacaaagttctaactcttccaacatccctgtcttcgtggagcaggtttggcacaaatcaaaattgtttataggccaaggaaggtacaaatcatagcacagatctgtgcttttctcaactgcataaagagctttcacatataatttttctggtgaaaaatccctgtcccggagcagatgttccatggaaacaacagtgaagtttttaaggggccaaggtgaatgaactgtaagactggttcttgaagttttccaggttaaaaccatctctctcattgtccttggaactggttttcaaaatgtgttttacagcattgcttctcagattttaacatgcatacaaatcacctggggattttgttaaattgcagactttgtttcagtagttcttgtgtggggcttgagatgcatttttgataagctcccaggggatactgatgccgatctatgtttatccctgaatcctactttgagtggcgagtaacagagggatatagaaagttggtcttgaaagattctctccaatacaaagattctctagtctaataagttcaaaaaaattcacatttttgtctttctctctagaattccgcaaattaacaaattaaagactctgagaagatttgcactgataaagtctgcagtcaatgctgtctcctaacaacctatggaatttgattttgtgaaaggaaaggataatctgatgtgcgctattcttgggaatatttgttcaggcacttaaacagactgaagggggatttcagaaaatgtttgactctctttgtggtgacccttgcaacttttctcaggtgagtgttactgcttctccaaataagcaagattctaagtccagctctcaatatccccagtagaataataaactttccaccta

SEQ ID NO: 776 - DNA, 2464 bp, Homo Sapiens
actctccatgatcatgtagtgttctatttagaggatcccagtgttgttattagagcaccttgcatataccaagtgctcaataaatgatggctgaatgcagaataaaatcattactgacactttcttttttaatccccaagggcatggcacaagtttcaataaataccaggtgatttctactgaaaataattttactgtataatttacaaagtgcttaagtatccactacctcatttagtccttactacagttctacaagctaagtagttttatccacattttaaggtgagaaaattacgcccagagaagttagatgacttgctcagggtcatcaacaaataagacatcatgaagggaatgaattcaaatttggtgcctttgcatcatccactttttgtgtagagttgactggtcaaaagtctgtctctcatttacaagtcaaggtgccaggcatacagtcttgaatgttgagcctcaggcctccaatgagcaatttgtattataaccaaatagagttgtttggccattttaggtcagcatttatggtatttacacctatgaacctacccccttttctctttacaaacttataggttgacaatttttttgtgtgaaaattcactgaaatgagattatctcatttttgcctcttgatttttggtgtgctttcttgttcttgtttaaaacatttggttttgttttgatattaagcttcagtgtcagtcctgtgaagacgtaagatagaagctatacatgtacaacaatataatccatacttccaaagctacaataagcagtaacacttttggagcgaaaaatcttggtaaagcaaacaacacatgttttggggtttgagatctaggtttgaggcctagccacagcactctcatgttctttttgacccaagccaaatcactcagcctgctgagatctcagttgttttttttcatcctggacaatgggcatgatgctgactgtccctctgggtggttctgaggatcttgggaggatggatataagtgcaacttaaactctggagccctttacaactgcaaggcagcattattcactcaaacataaaaataggtcattaagcatcatcaaagggaaaagtaaatgttcagggatcatctctgctgcactgttgctggggaaagaggctctttgtccctttaagagctttcagacacatctctagtcacatcctaaaagccttcctagttgtgtagcttaggtgcatccggtagcacagccgtgttctgatcttcctggcagatgtcataatttactgtcacccccatgcaggaatgcagggcgaggggcccccatgccggctctgtgatccattgcctgacaagtcctgagtgtcaacctcaggcaggcccagcggaggtggaacaccatttacctgatagtgcctgtgataaagtgggcaattagacgcacttggaaaagcctggctggaaactggctggcatttacacaacattacagccaagtcaggcttcataaaagttaatggagaaaaatgaagtccttcaagatctaccttgctctctgaggaagtcaggaacacaggactctgtagctttatttctttttgtgtctctcccaccttttcactctatttcccccagacagggtaatatattctcattggagatgggagtaaaggaaagcgaattgagagttgaggtcttaagtgtttgatctcagaggcatgttatttctttagtcttcaatcctctctcttcccctcctctctgtctctctctcacacacacacatgcacacacacacacacactctatacttctatagagtatacacactctatatttctctgtctttctgtctctgtctctctctcacacacatgtgcgagcacacacacacacaatcacagtgctaggatttaacttggcaccttggcttacaatttgcctctcactggagtttctggagtttggtgccagttcaagagcatgatctgtttgacatgaattctacagccctctcttcatttcctcctaactggatagcttcagtttgccgatgattaatgagtctggaaggtgagcgacagttatcttaagggctctcaaaagtttatttcagagactagccaaactctcctgctacattaactgcagcgaagtttcctgtttaacagcccatggaaaataactgcctgacccccgccccccccccaaaccaagctgccatgagcgcagctctgtttattggccaacagtgtgcatgttctctctatcgcttcctttcaggcagacgaacattttacctatgagaagtaggaagtccattgtgaggctggtccaatactggacctcatttggatgtggaggatttctgaaattggaaagtcaggactgatctggaaaatgtgcttacagatagtggaacaggaaaatgattcgctccccaaggccagttcctcctcctc

SEQ ID NO: 777 - DNA, 2429 bp, Homo Sapiens
cacaaatattcatgtttatgggttgtttatatgtgcatttacatatatatgcatatattattatgatagcttaataggaaagattcctgcatattataaaacttagatttatcaccaactctagttttatgacattgactagaaaggaaggaccagaaataatggttctctttagctttagattgggtgatttttaccatttatgtatattttatttgattggcataatatagtggagcacatgagcaggtcatgtacataattctcttttttttccctgaaggccaagcatataagaacataagagtgaagttctaaaagattttgtagataaatgattgcaataagatgactatcgatatttaggtatgttttaaaaggacagaaacttaatttgttgtttcttattgtattgtttctttaatatttacttaattgctttcattattaaatacctataattaattgattgcatgaagaaagcaagaaataagtgaataaaaaatatgtctataccaaatgacatatataaagtataaaacaatgatcagttagatcataaatattttagcttctgcagttcatacagtctctgttgcaactagtcaactctaccattttagagcaaaaacaggtatggataaagtataaacaagtgagtgtggctgtattccaataaaatattgtttactaaaatagtctacaggctgaatttatcccatgggtcatgctttgtcaagagctgatttaaggcatcaagggcagccctttattctcaaaataaataattagcttataggtattttaataatttgcaagacttcatgaaaggatcggctcagaggaaacacaattcacccaaactttctactgacaagtcatcagtatatagatggtgtacaggaccaagcaggcctttagactttctctcctccctgccactaaattccttttggccttgctgtattttatgagttattcttgtttccagcctaatacgaggaaaatgggtagatggcataagaggacattgaatgtactgaaggcagcccaaatattccatgcattagtcacttcggatatccagtggagtgaatgcggcattcattaatgcccaatgtcggcccgggcaaagtccagacagtctgctggcagcaagaaagctaaaggcaagaaggcctgtgtcgattgtcgtctgtacttacgaggctgagaaacagtagctatgaatcagcctgtctgagactctgctgtcattatttgcagcagtaaggaagataatattttaaaaagctttcaggaataaaatgagtcttaaccactagaggaagaatcacagtctgcagctacattgcctagaggcttaatgatgattcattgcaaattagaccaattaagaataccccccatattgtagtcttgagtggcttagataagatcattggttccctttgactcctgggatcctaaaataaatgggatctcagagatttctggttcagggcttgtggaatgttagaagtatgaggcatctcactggagatctggtcaacccatttctttacagatgcgtaaactgagctctggtgaggtaaatgacatccagtgattcataattagtcggtggtgaggtagaaattgagccagcactcttgattctgggttgatagtttgattcttttattaagacaattgttatgtattcaaccaatgtagtttgcacattgttttccaaagtgatttcatcagagaaccccttttgtttcctcacatggttcagagaagaccagagttctccagaacctacttcaggaaactctttaatgactacccgacaccttcaagccctttcaactccacccacacatgctgttttcaagtctggaaaatgagatccaaagagactaggttgttggctcctgaccttgcctgtatattagaagtacctacagatcttttaaaaattccaactccaagccacacccagaccaataaatcacaatctccaggggcaggacagagacatcatattttttgacgtttcccaggtgattttaaagtacagacaaattttgggagccactgggacagggcatttctacctctgctatatctcacataggaaggcatcatccattatggtgaaaacatgatttgaggacattagaagagatggaataacatttcttgaaaggatgccctgccaccattgtgaacacacatcagagtagttctgaagaacaaaggaacaaatataggtgaaagtgctctagaaaactgaaggatttatataatatattcttcttttattttaggaggtattcagacttgagctagctgtgaatgctgttttatctaactatttactaggaagaattattctgaaatcagagaatcagtaaattttcaaaagcacttaacttttgaaa

SEQ ID NO: 778 - DNA, 2431 bp, Homo Sapiens
tatagatgagaaacctgagacccggaaagtttacctacttgcctgaaatggacaatggcaaagccatgattaaattcccaagttctaagaccttgtccaatcccccagtgccctggccttataagaagaaagtaactgatttgggattctccattcataccttttcttttttcttttcaatgtaaaaccacctgactgaacttggtttttaataaagcaatttagagtcacttgataactcctgcattgtaattaatatccttctctcttttttttttaaaccattccaggggaaagaagggagcaagacagagatttaaaaatatatatatgtatagtgccgggcccagtggctcaggcctgtaatcccagcactttgggaggctgaggcgggtggatcacctgagatcaggagttagagaccagtctggccaacatggtgaaaccccgtctctactgaaaatacaaagccaggtgtggtggcacatgcttgtaatcccagctacttgggaggctgaggcaggagaatcacttgaacctgggaggcagaggtttcagtgagccgagatcgcaccattgcactccagcctgggcaaaaaaatgtgaatctccgtctcaaaaaaaaaataagaagagatttagagacagaaagagggcctgggtctgcaatttcttgttcttctgtgaagtaaacttttcaacttaccaaaaacacagcatcaggaaatgttgtgtctttaagtgtcagcgtgtcccttcctgacccctgattcatgtctgcccatctgatgaagttatcagtggcttgcagcctgtacaggtcaggagggttccaatgacccaggacaccttcgccggatgctgtggctgaaaccacagcatttctggcagcaaagtgaggggtgtgtgtgtgtgtgtgtgtgtgtgtgtgtgtgtgtgtgtgtaggtaggtaggaggagcaacttaaaagagagactttagcatgagggatgattatttctcaaaacccaccatctaggcctctgtaggcaatattctgaattcaaaatgactttcagccaagtcgtgtttgcacctgggaactgtgagaagtattgaaagcttcataaaggagaggaaacctgaccacgacaggaagtgacttacagcccctgaggctcagatgtattgacataaggtagtgaagtaggaaagaattacggttttcaaaaagaagtaggatcttggtttctcttttatcccagtgtgatgtgtgtgtcctagaacaaaatcctctaaccacagtgcaaaagtgacattcatgcaacaggagtggtctaaatcccttgcctttgtgggtctgatacagaggaaagtcagaatttcctctatgacttgttcatcgtgtgtcagtgttgtggtttccaagtgctgtgcaaacctgattttccaagttccaggtgggctatgtgggtgatggcagcgtccaaaagtgcggaagaaatgagctaaagccagcaagttacttggagactgaggttgtggctgcccgattcatagtagtacatttctttgtgtgcacaaattgtcagatattcttattctctagcatttcttgttgcttgattcttctttatgaacatttcttgttgctccacttgaagcaacaagggatctgatatccagcagcaggtgagtatacaaaaagctgagtatgaactgcattgctggtgtgtgaactgtcttggaagaaccatgtcactggaaaatttgatattcttttgaaaagatgatgggccttaccagtgagatgtctccactccagaggaagctatttttttaatgcaacaccttgcctgacatactgcttcaagatcaatctcaggagaatcttgagtgtagcaaaagcattctgcaccatttcccagcaagtgatttcataataaataagaccattgaactttacctcttgagccaggcctcataatactaatttctaccagtgttcttcacatgtagctggggtgaaatgtgctcagtttgttttcccctttcagttcacttcttttcgtctccttcatccaaaacccagtgttagagggacagtttgaaacaacctgaagggatggcatatgatgacttttgaggccgttcccttgatccccagatgtttccctgttctgcatgacctgccatttgggggtgagcgggggaagccagtggaataaatatatttctatctgcaaaaccgagcactggctttgaattaacatgaagggacaaatggaaagcaaggtgaaagtatatgatgtaagagagttgatcaacatgaaaatactggtagaaagtgctgtaacttcttaagcggcttgtacaggagaaaaagctgtttatctttaggtaagattggctaaacatcgtgggccaagttcaggccccacgtacatgtgg

SEQ ID NO: 779 - DNA, 2460 bp, Homo Sapiens
cctgtaatcccagctactcgagaggctgaggcaggaaaatcgcttgaatccggggggcagaggttttagtaagccaagatctcgccattgcactccagcctgggcgacatagcgagactttgtctcaaaaaaaaaaaaaaaatggataatttttattccatttgcctcaattcctcataagtgccagttagactcctggaggggaaaagaaatgagtggtagaattcagtcaacaattcagtcacctgaattcagaatggcataaggcagtggttttaagagatatttgcgcccccaggagacatttggcaatatctagaggcattttttgttgtaccaacaggattagggattgaggagggtgttgttaccagcatctagtgggaaaagaccagaaagactacaaaataccctacaatgcatcatccaacccaaaatgttgaggtaatgacaatgttgggaaaccctagttttaaagatctatgccaaagtgttaacagcagcttgtcttctattttctatatttgtaatttttctacaatatttgtgtgttgctttactaaaaaggaaaacaataaaagctacttttacttttaagacaaagtggccatagcatgtcagaagttcagatgtggccaaatgttggtgactgttgataaagaaaataataaacctggttcttaccaacagcccttggcactctttggaaccccccgtggaatgaaaatagtgactaagaggaagagagattggatttgatagagtctactcatagacatgcattattaaaaaagaaacttagcaaggcaacccgtgcctagagacctagcctagtggatttcacgttggctgactttttttctgttcactcaaatggtatgaatttttagctgctgacaccactgtatgggtggtgtggggcatgccagggagcatctagttctggctccataggtttattatggctggccagtcctaattaaaagactccctttgtcttgtcttcaggacttccagacatggaactggggctttatttttggctctgggcatctatgctgcttcctgttatgttgccagattcatacgtaagctaaggcagccctagaggaatatttccctccctttattcttattccttagtacagttctggatccacagccaatcaagcgtatcatagaagagccagcaactctgacgtgcaaaacgcccatgtcctgccacccccaacatgctggtatttttgacagtcctcaattagagcagtacggttaacttcagcctgtcatttgtgtgggttaagctgtttgaaaaatccttgagggatcagccagtggtgggaggatgattttcctataaacaaatgatggaacctcgatgtctggaagatactagctgtggtttggttcctggggccttttgaggggacagaaatgtcagctcccttcttccttggctctctgggctgtctcacagctgggactgatgctctccattccagcattggaagaccctcaggaggcctccggaccacagagatatctggttccagtttcattttatcattgctagtgctaaaggtgtaacatttatccccaagtgactatataaaataatttcttcaagggagatcctgggtatgaagttcatataaacacttcagaatagctagaaaagtttattttgattttagaataatgtttcacaaggactgagtcaccaaaaccactcttcccataagtccatttcactgggagaatatttatacaaaaatccttaatattggggtcgtgggagggaaagtgtgcagataatgtaaaaggattttaattccgaaagaaacaaagaaaaaaagaagaggaccagcatatccagttttgttttacgtgatctgaaattttatctgatctctcagtagattgttaccaaaatcctgatattagaaagaagtctctatccattcacatataacatgatagtctatgtagaaatttgcaagaaatctacaaaaaagcaccagaattaatacatgagtttatcaaggtcacgggatacaagatcagcatttaaaaatcaatcatatgtctatacattagcaatcaactactggaaatcaaaattttaaaaaataatacggtttaaaaattacatagtctggacatggtagctcacacctgtaatcctagtactttcagaggcaaaggcaggaagatctcttgagcccaggagtttgagacctgactgggcaacatagggagaccctgtctctataagaaatttaaacattagccaggtatggtggcatgcacctatagttccagctactcaggaggcagagcccaggaggctgaggctgcagtgagccgtaatggtgcctctgcacttcagcctgggtgacagagcaaagtcctgtctcaaaaaaacaaaacaaaaacaaaaacaagatgtaattatgtata

SEQ ID NO: 780 - DNA, 2489 bp, Homo Sapiens
caaacttggaatagaactctagatcatagtggccaaagaaactgactttgcttgtaagcaagttggatcaagatctatatgagagctttggggctaagggaaataaagcattgtcccaagaaggaagactttgccttgacaaaacattctcttacaatgtgattctcctaagaaaccataaaagagcagttagggatccatccatgcattttaatatttgaagagtttcagactgactgcatgtttgacagctataggaattttatttttataagaatttatctataaaaataaaagtatatctactatctctaaatctatatatctgagttttaaaaatatagcttctctttagcttttgctagcatatgctgtcaaactccttcatgctgccagactcatccaaaaattaattcttctaatgcatgccatatttcatgttgttttggctgcttttgtacattctgaagaaaacagggaagataatggtttccttttccaatttaacatatacatgcgacagagaaatgtaaggatgttgcactcccagaggatcaaacctaaaatgacaatagattcgactgatttttttaaaaaagaatcctactttatgtaatctggacaataaggcacacatggttggattaaaaatattgtgtttttaagatctctttctaattcttactttataaccataaagaaatgaggctatgtgttgttgcaagaagtcttattgcaaacacatgcatgtgcatgtttgtgtgtgatttgtaaatttagctctagaaaggtgtaacaataaaatggaattgaatttagccatggctcttacgagcgtgagtaaagtatgcatgtggaaacctaagatgttaatgaaatcagcatagactttaatggcattctggtgtcttcaaaagatcgccaccaaataaagcttaatgtgtcaaaatggaaaccccaagtaagagaaatgtgggaagaagttcaaggaacagaaactgtttggggaagatgatttgaatgtcttccaaaaccttcgagaagcattaagctcaagctcagccctttatctttgacaaataccacactgtgtatctgcttgttatttcgtggtcctgttgctcctgtcagcttgttaaatggaactctggtttcagtcagatgaaaatgtggtaatctctgtgctttgcttgcctcggcgtccgaggagcggctgtgcccgactgtgtgaggccgcccagtgccaagggtaactactggcacctgcactgacagcaagcagtctgcagcaacagattgaaaatgttcttttcagatctttagattggaacttcagctttacttttaaaagtttcatgtccacagcacggttgacaaaataaattactaaaccaattgctttgggagcttccaagctgtgacattaaggtagctgcgagtcatcattcttgatgaaggagcagcttcagaaattgtgtgcatctgatggaggtttggcaaagtgtgtaagtctgcagacctatggtaaacaggtctcatttctaagcatttattttcagaaagggaaaaaaagagctgtccattctcaatttcggacttattttaaattactcacagggaaatgggtgccccatttaatggcattgtttattctcacagagaaatgtttgcagtgaaaatgcaaaataccatttcttttctctgctgaggctcctcatcctatggtgcccactttactctcccagcagagaatgcagaaaagcaccaaaggcagcatcatgaaacgcagagctgttaattcccaactccgtcagagttctgccctccttcccatttggggagctgaactgagccattagaactttccttttacactccctctagaatacaagtcctgacaaaattaaagggctttatacccctaaagcctcagaaattctacagggtacggtgagggtaggggtggggttgaagggatgggaaattcataggttaaaaacaaaaacttgggcgaaaaatccaggctctgccagttactatcagtgggacctcagctagttacttagacatctggccctctgcttacttgtttgtgaaatagaaatgatcatatctgcctcatgtgcttgttggaaacatataaaacaagataacttcaggagcaaagtgatttatatctgcaatgttgaaatggataaaaaataaaatagatatgtgagtgcatagatgataaatatgtcataaaacaaaggcagcaaagtgttagcaattgtaaggagagatgtgggtgtatgcatgtttgttatataattctctcaacttttctgtgcatttgaaagcatcttaatcaggaggaagcgatttagaagggcaaatcttttccatgtaagtataattcccgtattccctgcctctagttaaattccagatgtaggcacacggccatactgaacctcagcggagaatggaaaaaaatatatctttttcat

SEQ ID NO: 781 - DNA, 2500 bp, Homo Sapiens
cagtgataccacctgggtggcaaggttattgatgaggtaaatgttatcctattttttgagctataacttctaaattttctgcaataaacatctatcacttttacaacaagaaaaataaataaattttactagaaaaaaaccctaaaatataatgcaaggctgtaatttcctttttttagatcccactgcactaagcatgtataaaaggctcaagaaataatttttggctcccttaaatcctgtgtggaaaggatgtgtgtaaatgcacaggtgtctctgactgcatttgtgaccatggaaagacgtcattacattgagtggctttcttaggttgtgctcactttatttgagaagtgatcccaggaagcaccaatctgagagcagggaaatgagacagacagtggaagaaagccactactgggcaaatggggcttcatcttactgggacctctgagagaaagagggacacactgcagcgttattctccctgaggagcaaggaagctgggggtatttctccgccgctcccatctgctattggtttaaggatgatcccagagcatgtcaactatttggcacttccagcctccatgcccaggccgagcacgctccagggacctgagaaactctttaccttcccaaaaccacacagcacttgccattggaaggcaccgggttgacacacggaagcgtgatgagtgttgaggggatatgggccaggtaccaacaaaatccactgccatagcattctgcttttcttgttaagcaccacctcagcaatcttactgatgattctgtcctggtggggctgggactgtggcgggaagggagcaggaatggtagggatgtagtaggtccataagggaaatcctgtgactgggcttggtgttatcctgtctcctgtcaaatgcttgagtgttcatttaaaaggctgaccctgcttgatgactctgggaatattcaaaacaaaagatgtgaaatccaggtttcaacattaacccagtatggccagaggaattgaagaatgtaccatgaaaacatgatatcagaactcagagatgtttatttatgagtttggcaaggttttaaaaatttttttatgatgcgtttgagttcttctgcatacaaggcaaaattccatcaacccggccagcctataaaatccctcacaaatcgttttatgatgtgtttgaaatacctcaggctgagttatttgttgacaatttgtcctttatttttgacacctcggctgaggattatcttccccaaaatagaattgctaacttcttggagacctgtgaccactgtgtgctagcaatgtcagtctaccaggcacataaatattcatttattggtgttaagcaggtagcaacagaattctggaccttagttgctggagaagaaacaaagacttttagaactagaatcacaaattgtttattttatggttgaggaaattgaggccgaaggtcacccagccaacttgatgtggagctggaatgaaactccaccatctcgtcccatgaagccgcctctgcacaaggttgattggcggcccattctggttggctgatgaaggacactggttctataattcagcgattcgttctaagtgccagatcagtctccccatagtgggatttgatactctcctcgtattggccactgagtggttggcagtaatttcaccctttatggcttttctgggccttttagttccttagattctaaattggtcaggactgtgtacttcagaaaacactgaccgattacctaagaatattgctaatcagctagaacgaattgttatgggatcctaatataatattttggagtgtcagatacagagagaagacatagctgggagctggcacacttaagttctctggcctggtcctcttcccatcctggtggaggcaattctgaagataaataaattatgtgagcaaaccaccctatggtgaggttaagttcattagagattaaatgctcagaggggaaaagggaagttgacctctttgatgattcaaaaagaacgtcagctgaagtcaaagtacaacattctagggctacccgctggctggtggaggaaggcatggctttcccacagggcaaggacagacaagacaggcagataattacagcttgtgcttgggcagtgcatgtgcaaacagggcggagaacttgtaggttattaagccaaggaaataacttctctctgctgccatgcatttattagtaaaattggaataattttcatttctttttattgcttggaaagattaattaggataaaacagaaaaagcacatagagaactaccaagaatgtagtgtgtgctgagtagatattatctatgtatctgtcatctatctctttatctatccacccatttatctatctatccatcctatcatctatctatacatcccatcttcatctatctatatctatctatctatctatctatctatctatctatctatctatcatctatcatct

SEQ ID NO: 782 - DNA, 2460 bp, Homo Sapiens
agcatctcacacaaaagcatctagaggcttttcatttgtcttgagtatgtttcagatgtacaaatattatttactttaaacttcaaatcaaaaggtgcactgtaactgttttaaataaaacattagtcaagactgaaatatatataaattcaaagcaatactttttttttccatttatgtgaagggagctcagttaacaaattttaggatacacgtcggaggaactgtttagcaacacacttcaagcaagcaagcacttaataaaggaattcattcccagtcctccaaagataaatattacaaacccactctacagctaagctgcgaagttagttttctgttgcagactctcttaaatgtttgcttgaataagatggggggtaaaattgattttgaagaagtgaagctcatcagtgaaatgtacccagggtgctcatctgggggggcattttgaaaaaatgaagaaaaacattcagctacaggctcagctctatacaaacctgtttgtagtatgagggtcatgaaggctgatgagtggaacttcagccctgggagaaaacccttttctgtgagcatttaaatcaatatattagaaattatagtacatcctagagaacatggcagaaattgtgaaaaacagagtaagatctctttttgcttttaataataataataataagccccaaggaccatactaacaaagtagattgatccgtttaggaataaaattctcaaacaaccctgtgaaagataagtattccctattgtagcaaaaacaatgagtatgatctttttttcccgatgaagatcctgtttaatgtcttaaaaatattttgtagtgatttttattttcattccttcttcctccagctcctttcctgaatatggaaccagagtgtcccttgttgtgaagcattcctgggaaagaggcgctaaccttgtatcgcttttgagtgtaatatacatttttcattttaaatgggagctcataatgacattgtgtggaagggattccaggcctctgtgattatcaccatgtctccttgagctgcgcctctggaaaaaaatgtgaaggaggtagccctctggaatgaataaatcctgccgcctgcctgtaattatttattaaaatagattaaagaaataggctaaaaaggaacccgccacccatgttagagatagcataataagagtacatagaaagggaaaattaacaccagggaggaaggaatgttagatatgtgctttcaagaatacggccatgtctgcattgttggcttacacgcagacacacgctcgggtttttcatttggcagggtgggctgtgctgatgaaaacgtgggttactaatactgatgtgtatgtctctaattaacattagaattgagtggtaaacataactaggagagcattcaagagagaaatgggctaaaagagaagccaatgtgtagagaggagggggaagagacgggttggagagaagaaatcggtcagcccttgttcagatgggtttaatttagtcacttgagtcaaaactggaaacctgttttctagtacaattgcttctgtgtttagtgggtgctgtccttgcaggcgcctttcattgcaggtgaattttataaacagcacaccatcatcaaaccatcttgggggtcaactttttccacttgtgcctttagctcttacgcaagtacttttatagtgtcttctaatatacaggatttatcttcggttctgagaagagcttttaaacttaatccctcactggagtactaatttgtttcttcatccttaaaccagtactttcggttaactttcatcagaaacggtagatttctttagtatggccactcgagaaacataggtttgtgttaattttttgttttgttttgtggctgtttttgtttgtgactgctgggagaacaacagggtgggggagattttgatgatggtcgctgatattattcttgtatttctgtttcttaaagttcaaagtacataactggaaatacctgtggacggttgccttaaaaatatttctaatcatattcgcctaaagaaaataaaaactactacctatttttaaaaaaaggaatgccagaacttatttttgcttttttattctggcttttcccatgatatttgagtggaataatatgctatgatgtttatgtatgaaaaacagaatacacttgcatatgttatgaggaagaaagctgcttctaggaaaacgaactttttttttctttttttatgttttaggaaatgatttatcaaagtaacaaaataactcattgggaaagcagtgttatttataaaaacaatcagcctttgacttcctttcatttttataaggctaatgtaacaaggatgttgcagaggcaaaaatgaactcgaatccttttaaccatatgaacacttatgaattttattgcagctcctatgtaaccactttattta

SEQ ID NO: 783 - DNA, 2463 bp, Homo Sapiens
tcatgaagtgggtggggaggaaagacagacttaaaaatttattagcatctaatcctgttaagattttctccaccatatgccagcacaacaacccatttgaaatgtgtactaattacccctgttgtatcctgtgtgtacgctttctacgcagcccctgaccttttcgttaataactttgcgttgcattcgttgacctgaaacaaattgaattcagtggcactcactcaagaattgaattacatagtcttcttaattggtgtcttatttaaatgtgagaaagtaacggcttgccacctgtaatacgtttccaacaaaataaaattagaattctaatatttttccccattctagggaaaggtttggccatgaaaatatcattcttgtatgatctcaaaaataaaattctctgaatttttttcattgccaatgccgtgaaaactgcctatatagacacatattaattggagagatttatgcaaatcagctgggctaggaaggcttttcctggaagtggcccttaaaataggcggcaatctgtctccgttgccaacagttatactgcctttccctccccagctcttggatttcggattatgtgatttaatatacctccggctggcaaaataggaagcgttaagacaggaatatgttaagcatctgaagatattttccactgcatttgttagttttaagtccttgagccgcattgtctgttggttggagggggcagaaatctaatttcaggagtttagtgatgttctcctattgacggcttcacaggcaatagatactgcgggtaacattgttcttaacaccgttcactcatgtctttcctcggaggattcttgcaagcgatcgaacagataggagcagctggaaattttgggctttgctctctaattccagtgtgaaattaattgtcccaactgcaaagaacgacttactcctttacttactatatttaacttaaaaatgcaaatgttattagtggactgatcactgataagggtgcctttgtgcccggctttaacctctattagtgaggattatgaggacgtagccacattggcattttctaagtgtcaccgtgacagcacttgctgcacaaatgcctagctgtcaccgtgagttttatcactcagtttttccctccgaatgtagactaataagcccagaaattacaattgcctccctgccgaatctgtgataggcggaaataatgatatcagtgccctgctaatcttcttgcctctgcgcttggcactgtcctattgagtcacctgtcacactccgctttgatgaggcgaattcaatctccctgctgtaatgacaatggggccattttaatgtttggaaatgattatgtggaagcttcaccgtgctctgtcttggcaagcaaaccaaggcactgtgcacgccaggagagcgggctctggctgtcaggcaggcagtggagatgctgagttattattaggatttagacgtagaagtcggcttcattttgagcctttggtggtggccttgcaggagggaagaaggatggggaggggaaaggtgggatcactgctgcagaagcatagccattggctaatctcttagttgtctgcacaaatttgcctctagaagggtttcccaggccacctgtgttgttcaaggaggccagggtggctggagcttataaacaatcgtggtgacactaccaacatcatttgctggggcttttggtgtgtggattgtggatttcctcttcaggacattaactgaatcaaattactcttacaccaggcctgatctttcctggttctttgagaataacactgctgcagaacaaaaaaatacacataacttggaaaacactaggtgtcaatgaggatctggagcaaccagatcccactactgatgctgatttctaaaaccacctcagaaaagcagcagtctctactgaagccagacatatataaacccagcaaattttgtattgatacagaatattttacatatttataaagtgcatgtgagtatttgttacatgcatagaatgtcaaaaccagcaattttgttcctaggtagataaccaacagagatgcaagtgtgtatttgacaaaacacatgaactagaatgttcatagcagcatccttcatgataatgccaaactgtaattcgtccaaatgcccatcaacagtagaatgccttaggagttggtttttggtggaataccatacagtcatcggaatgaatgaactacaactgtgtggatggatctcataaacaggatgttggatgaaagaaaccaagcatgatagagtacatatgtaaagaattccaggttgggcacgttgactcatgactgtaatcccagcacttcgggaggctgaggcaggcagattgcctgaggtcgggagttcaagaccagcctgaccaacatgaagaaaccctgtgtctactaaaaatacaatatatta

SEQ ID NO: 784 - DNA, 2499 bp, Homo Sapiens
gttgcagactgagattttctgtttatttggagggtgaatttggggtgctgaagggcactggggtgtctagggcttcctatgtcttcccttagtgctacctctgggactccattttgtcagagttcctgatatttcatgagaaagctggaaatccaggttttttttttttttaatcagaaatgtcaggatttaaaaatataagcagctaactaaaaattcaaaaatccctaaccattgtgcaagccaaatgaaataggcataataaacatgagctgctatgttcctaggtgcctggtcagctgggatacaggtgaggggctgacggcaggtgcaggtgacccccttgcccactgcctgtccattccatgtgttgttgcttggacccattaacattgtctgcctcatatttctgtttgaagaaagttctgctacgtgggtgagtcttgtctatattgagagcagggttgagctgcagtcagttataaagtctaccttcagtgggatattataagggttcacatgaattgaattaacaacatttttatatctgaggctacacaatcctaaaggaaatgtgacttctacagagagaatgaagatgttcctagcactttcaaatatatcgagcgttctccaataagtgtatttttttcatcttgtgcatcttgtgtatgaaagctttctgtgaggttatgtccatgaaaacaaacgcctttttttcttttcctcataaaagcggaataatgaaagataaggttaaggttacaccatggctacagtggttgtcaacaagccttttgagattgtctttttctgttgaaatcagttaatgaattggagttttccactgagctcacagaaggtagcttttcagatctgggagcagataatcagagagacactttttccatgcagcatgttgaagggcatcatttggtcttgtggctacaccagctgagtctggtccaggaccaatctcgctaattaccacaggtggacctttggcccaaggaagcaaacaaggctttggggcacttctccatggccgccttgggacccttcagaagtgataagccgccaatctggaagctgcttgggtgataatgattctcgaatgggcttttatgtggacgagcaacatgacctaaggcaccagggataccagaaaggacactttttatgcagcttgaaatgtgagtagagagcaaaacagatttcaaaagacgagcaccgccgctctctcgacattataaagtgtcttctgagtgacaacagtgcatccttgtgcatgaattgcacttaagctttgtatttttggaaaataacaatctgtgttttctggttactatagacccagtatgggcctagaggttttatgtgtgcaggacctcattcgtgtaaccctttcagtgattgggagaggcaggagtggttcttgcccccattttacaggggaggagacggagatccctaagctagtgaaggatccagctgggactctctagctgaagtctgtggatcccaaagcttgtgcttgttgaggatcaagagatgatagaacttgcagtggcttggatgtggcaggaactcatttcacttatcttttctcaagacatgggtggtgggagtcgtcaggctgatagagcatctgacgggaagttaaaagaaatttagcctggttagtagtgtgtttggaatcaccttgtagggtttaccttaaatcatggggattgttgcagattcattatctatgtaaaaaaaaaaagcctctcagtgatgccatgggagggccattgtggattactgcttgattaatcacggctgagtagggagagttgctgtcattttcctttttctcttgtttctgtgaagttcctcaccttcctatctcagccagatgtcttcatcaaccccatctcctcccagctccttgggaaacttaccacatctgttttctttttacttttgaatagtctttttctgtcaactggactcttcttattttctttttcaccaatgttgcaaaagttgaaagaattgtacagagaaaatcacgcacttaccacccagatgccacaactggcatttgctgtatgtgctggatcacacatctggtcttctgtccattcttctaaccgcccaccaagactttaaaaaaatgcatttcaaagcaggttgcagacattatatactcgcttcctacacacttcagcctgcataccactgaccagatttcaagattcatttttgttgctttttctgttaagtaaaaatttacagtgaaatgcataattctcacatgtagcattgggcaagttttccccattagcttttaatacatctgctaatctctcctattaaaaaaccaagccaaatctgccctcacctcaggcccattcagctactgccccgaattgctcctcctcatttccaatcagacttttcgaaagcactgcacccgtttcttctctccagcctctccctgcacccatctggccc

SEQ ID NO: 785 - DNA, 2323 bp, Homo Sapiens
tgagaattcatgtttcttaaaggctctaggtgactctgcacaaggggtttccgtcatatcagctggacgctctgaggctctccggagcagaatgaggtgctaaggtgttgtgtctaaacgcatggcttggtcaagtgtcccagtgcagtgatcctcagagggtcagatgcagcgaaagtgaaaatgagcatgtgggttatccagacaccccaagtttatcaccctgtctgggccagggtgcatgacgctcactcctgcaaaacagagtgagcaggcagggctgtttcttccccctgcagctgggaagccccagccagcctgctccattgaactttcagctcccggagttggctcattccctcccagagaaaacagccctattataaacatacaaacttgagttggggcgggggtcacaggctcttgcctaagtccatcctgcaaaattgacttttctgtcaatgagaacacagctctgcttttacctctcctgtgtgctttggcagtttctgcttggctgtaaaatttatccaaggaaaactggcatttatcttgggttcacttgtactcagcaaaactgataaacagatgggggctggccaggccacgggcaatttggttagcactttacaaaatacaaatgtcatcctttatttttacagggattatttattgtgaattaggaagttattggtctgttatattctaacaggatcattcactccagttaagggatccatgtccctattataaagtggtggggggtgtcctgggtggaagagactttctggcattgttggcaataaaggaataaaatggccctgctgggtttgcgtatgcacacacagggcacttatctgtgaagactgtgaaaaaagaaagaagcaaagaaagaaatcaacaagatttgatggggaagcttgcaaaggagatcagaattcagatcaaatgtcccaccccagtgtctctggagttttttttcttttgtgtcccagctaaaggcactgggaggatcagagacctcatcccagctctgtttactttgggaacaatcgttggtgtatgaataataatgcctccctctgaccatgactaattgaattgcagcctgcgggcagtggggaggggctttgccgggccagtccatcacggcgtttctcaagtagccaccgacagtgatggatgcagcggcgcttcccagagtgcatcctcgaacacctaagagcaggggtatgaacctgcattccgagtttctattagccggggcctggcagagaggacgggaatggcggcagttaaagatgagttggttgattaaaaggaagaggagaggcagcccttttcctaacctcctcctcccacacctgattttaagcaagttttgttcatggggacaaatgagaaaatattcatcgtgtgaccatgcaggcctcagtggggccacctctgctgaggccgtgcctgttaaaagtactgggcttgtttggggtgcagtgggaaccctggcttggaaaacaaaaaaggcaaaacagccaaagatttgtcctgttagaggatgtttagaagccaacaaatgaggtagaagaggagacagaaagacaagagagaagtaggggcagttggaaacggagtctatggccatgtctataatccaacaatggatcacacagggaccctaacatttggtcgtcctgttgtctgcgctgtgtttacacagcagaaccatgcagctggggccctgggctcagtcggactttgttctcacagcatgaaggtgacccctggtgaactgcgatccgggaagcttgtgcagcccagcagtctctatggtggtctggacacaggggaagtcgtccaattacagggtcactgctttctatctcagtcggatttagtccgggccaaaccccagattggcacctttttatgagagctgtgcacgccaccctggctccttttggtggcagaggctggctgaaactccaggcggattttggaggcagatgctggctttaagggagctttggttggcctgctcctcttggaaagccctgataaaagcattcggggcaggggctatacttctcttgtatctaaaatcctgaaattttaaatccctccaaacagtttcttataacttttttgttagcttactatgctttaaaaattatccataggtcttagtaccaacagtcattttactgcacagaagtttctcagctcccttctcttatttaagaatgagatactctctgcccattctgaactttacaggaataactcagggtgtcttgttcttataaataaaaaatttttaaaaaat

SEQ ID NO: 786 - DNA, 2466 bp, Homo Sapiens
gtttgaaataaataaataaacaaataaataaagggtttttatgtatgatgcttgtgctctaagtaattcgggcaagagtgacaccactgcctgcctatcagcacttgcaaagaaaaaccaattactgtcagcccccttcaaaaaaatgtatctgctaaaattgcttgatgacatggaaatccacactgaggtgcttatacccaggggcaaccaagtctcccctgcagctggggcctataaccatatttccttcatttcacaaaaatcaaaagtttaggaaccacgaggaaggagcaagaataaacaccactacaaacctcaaaccaacagcgctgagagattacagcagcctcaccctgccatttggggctagagactgctcacatttattctgtggtcagcgtccattggaaagcaacgcagcacacaccacggctgtgtttgagctgatattcactaacactgaactaactgcattccaatccaaagacttcgcaagtgccctctttcttaactgggaatctggcagaatgttatatttaaatatcaaacgttgttaatcatgtcagcggtactttagtttggataaaatgtctttcctattgtagctaattgcttgaatatctgcagactgatatactctttgtagacatttatgctgtcctctttttataactttatttcattttctcttcatttctggtgttgactcaaagggcctttatcacctcatgctgataatctgtgctttatggccgctggtgtgattgggagcagttgaagccgcgtgcaataatacacacatataaatatttgaacaggaaaaagaaggtctgtctgatgtagaccaaggaagaaatgcatttaaacaaataatgccactagagggaccttgactctgaaccacgaataggcagggtcagacttggaagggcaccctctcattgcccggcttgtacgggtgggcgctagtgccacggcccattttaaaaagcaggttcttccaggccccatggcacagggagccgagctgggtccatgccagcaggcttatgacgtcattgttgtagcttgcttatttggtcaggatcactaaaataattccctttgagaagaataaatttgctcttgcagaaagttaaagacctgagaggttttaattagtttaccctgccctcgcctttggtcgccaaacgttattgcagagttcaaagaacatgatgttgtgtgtctccctttcccatttttgcgtgggggccttttccccctttttagcacctcctgtgaatagttgaaaatgagtggcaaaatgacattcgacttagaaagtaagagcaccaggaagcaaaactggaggcaaacacagcagctaatttcaccaggcatagctggtgctgtccgcggttgtccctgacagcgcggccgacacagaaccacctgtgtttgctcactagctttccccaatctgcgagaaaatggcccgggccggtcacatggcagccagataggccaggcaccatgggaatacaaaagccggagcttttagcagagttaatcattaatgcgccttttctttgtcccattcaggagtgctgacagggctttgatagcctgtatttgccatcagccggctgcagtcctagccaggtactaatgagacccctggctccaggctccctggcagagcccagagcccagcctggacccaggtgctgccatcaacctgaagcctgcctgccccctgagctccctcctgctgcccgctgtgcccccactccttaggccttgttctggttgatcacccacctgcctggaatcctgcacgtttctgcaaagcatctgcctgagttcagcgaagcaaggctaggaaatgtgtgattataaagcccataatcctctcttcccctgtgtcatccttcccccagctaggaaaaaaaaaaaaaaaattagaaagctaagctgaattttttttttgtttgtttggatgtgtaccaaggatggattgttttgccctaacatcagtggggtgttttctttccaaaacttagcttagagagtcacccacgggtatattctaatatttccactcagcaagtaaaatgcaggtgtccctgacagcaatttttttaaatagaaaacctcaccttaacatccttaatggtaagtagcttgtgtgtcaacatgactggagctagggtgaatgagaaccacattaaaaccttccagctaccagttcttttttttttttcttttttcttttgtgatggagtcttgctctgtcgcccaggctggagtgcagtggtgcgatctcggctcactgcaacctccgcctcctgggttcaagcaattctcctgcctcagcctcctgagtagctgggactgcaggcgcatgccaccactcctggctaatttttgtattattagtagagatggggtttcaccacattggccaggctggtcttgaac

SEQ ID NO: 787 - DNA, 2473 bp, Homo Sapiens
cctagttcataatcagttctcagttcatggtggccccccttcatcccccaaatgtcaaagtctccagcttcccatttcccttccattcctgactctaagtccttaaattgggtgaccattaatattactgctaggagcattttcagagcactttacatttacagcgttttttccttcccaaattgttctcggtcctttcttcggaataggtattaaaaacacctcattggacaaattcctttccttagaagatacatcatgaatatggttggagaaggcaggatcataattcggagaattcagggttgatttcccttaccttcctgctcttttgctgtaaagtccggagccccaggaagtgccgccaaactaccccttattttccctccaagagcagggcagaataaattgctattttgtttggttttgtttctcatatacaaggcctcccaggccctggaacctaggctactggcattttaattaatgttaatgactgggatgacctcctccccattgaatctgagtaagggaaataaacaggcaaacccgaacaaagccatgtgcggatgtggtaccctctagaaaagctgacctctccgatggctggccagggtctctaaccaggcccatactccttcctcatatacccccaattttgaatttttttagttcaaatagaaattggttgcagggggaagcaggtagatttcctcctttaatacataaatgattctgggtcctcggaatcagaatccccactttcttattactaggagcatttttactctgagatcaatacaaccagaatgtgtccaaccataactttacaacaacagaaaagatacatagcaaatgccttcaaatacctggaatctggccttgaaatcgacctggcatttaaatcgacatgtatatcccagttgggtcaaaacatagtcaaggtttcccccagagatactctgtttcattttccttttcaagtaaatttctatttttccccccaacctttacagcttaagcgttttatccagtttaaacgttagggatttaaattgctattttagtggaagaggcttgattaaaacctgtgtcctcatcaaattattggacagtggttcttgggctctgtttacattagtgtcaaccttaatttaaattccgcataactatatttgcttcgctaaatgcattcaccaggaacacaccacaaattactttgcattatgagccgagtctctttgtctattgcaaagtgttttgaaattagcaccataagtaactagctgtaagtgtcactccatctccttaatgcctcattaatcaaactccatggcagctgatgtgatgtccaagcccctaacatataagatcagtatcatttactccttgcatttgaccacggtctttaaacttgatttgttatttgtgcatttgccctcgctggagctctgctcctccctcagtggcctcccaacacgtggggctttgtatggataccagttgcatgtgtactctttgcagaaattggaaataaaaacccatttcccatgttgtggaaatgcatagcctcaaagtcaggaaattcttttaatggaagaagagttccacttattcccctgagttatccacagtgattccccatgattttcagattaatgctaaaatgccataatggaaaaatttccctgggcaagtttttctctatgtcaagaattagagaaaggaattacgttcacccaggcagactacaatttccatcttggcctcagttccccaaaaaaccagatacatttagtctaagcacttaatcaggaaaaaaaaatgtatttttcccttattatgtgatacgaattattctgtactaaatacaaaattttagaatttatgcttgcaaagaaatacagaacaatttatacttaataattttattacatgtacacacaaaatcatagcaaaatatgatatattttataggatttttttgtcttttcatgatgccatcgaatatttgcaaatgcctaaatggaaccctttcttcattctccacacaagtccaaaaacacaaacacacacgcacacacatacacctatacacatgcatccttttaaccaaaggtaatactcactggtgttaaaactaacagctctactggacaatggcttcatggacattttagaggcagtcttaagtctgctgtgggcacaggcatgtcggatatgatttccctgcagggatgccctctcggtggctgtgggggatgcttgcggcccctcgcctgccagcgctgagctcagcctcacagtgagccgagatgaacaggtgctctcttctctggcggcggcggcacgtgaggtcggctccttgcagaacagcgtctcagtgggagacctttagcttcacggcctttccttctgaccacccagcaggaaaaatatacgaaagcgtttttttctgccagttttgtcgatg

SEQ ID NO: 788 - DNA, 2437 bp, Homo Sapiens
ctgggaaggctggggaggcagagctggcttcctagcagcctggggtttcctcgggtggtttttgtgcaagttaaatatgctaagaaagtttggttgtaggatcagtgcctgaccagatgcctttgccttttactggctggtgctgccacacacacacacacacacacacacacacacacacacacacccctgatgctgtgagacttggcagctacaggctcactgggcatccttccctggagaactgcccgaggctggcagaaccacctggctccaaaatgcctggaggcccagcttcctccactcaccctcagctgacccgatgggtcctccgctgtgccccttcctcaaggcaggacttgctgtggacaattcatccctcacatccttgctcggttccttccactctcctatccagctttgctcactcccttctcctcaataacacacaagcaccaaatccctgccttaggatctgcttccaggagaccacctaagccaagtggtcatttggcttagtcaacctccaagactggcatttatatggctgtaacacgtagaactgtacatttaaaagggtgaactttattgcttttcaattatacctcaataaacctgcccttagaaacaagatgaacttcatggaaaaatagttactgctattttggagaaaatatccaaacatgttaaccaatgaaaaacctcagaaaagcaaaaagggaggcagggaaaagctatcctgcatttaaaatattctcctggcccaccggcttgcagctgccacaggtggaggacaagacaaggggtgggtctttccagggtgccccaggtgctgactgagcagccagtatgtgataaaatctccttcttgagagaaaaggaggaagcacaagacagggaagggaagcgcagctccaggaaaggggtgggcggaggggctatggtctctgctgtgccattcaaacgcgtgtcgcagggacctctgagggctgtgctctcatctgcctggctgccctgtgctcacagggccagcatgtgattatttgggatctggtgtgggttttctcttggttgttttatttttcacttaccagctgcgtgttaatagaaagtcccctgactgaaggatttgcccgggatttctgtaataaaaatagaaggatttgtcacaaacgctggaaggaccctctgcaaaagtggtatttttcacgtgatcatgagccccagaacatattgtcatcccgggctgcaagcctggcctcctcactgagtggcagtgacagatgtcccctgttaatgtccagtgattgaatgtcactgcagaggcccgtcctcacccacacaacctgttcctttctttctgcagccactgtgtcacgcttgtcacaaaatccacattttctgcacattgttggccttctccagcagtgagcccttgtgccaaccctgccctgctccctcctcggcccatccccgaggacactgggggacaaatagtaccatcactgctaagtgataataaaggctggcaggaacacatcctcagcttggggcggctacaaggaaggaaagaaataaagaaaaaagctcatgaagttgctggagtcatagtctcctcctgggaattcagcccaagaatacaatttatcagaaataaaaagctctatttagatggagatttattgaagcacttgctatcataacaaaacactgagaacaacttgaaaatccttttacaggtaaataaatgatgataaattctcttgattggttacggcaggacccttaataattatggggcactggttaaacgtggcaaattgagcagcagtttttgttttcattgcttccccaagtactaccaaaataaaagcaaaagggaaaagtatacaaatgcacagagacaaagaaaacgggaggggagaaaaaggcaaaggaaacagtagacaaggaaggtcaacaaagatggaaagagcgtgaacagaaaaggcccaagttcctgaggaggggacaccactaaaatgtgggtcatcgtgtgccacagaaacccagaaaggctcaggaattggactccccaagtaccagggaaagcaggatgaggctggagctaagagggaaagtctgcaggggaaacaagcagatgcctagaagacactgtcagggctccagtggccccagaaccatcctcccccagccgtcgggaagtgggagtgtcttctctggagaaatgacttagatacatttccaaggtggagacatccagcagtgggggcaggactaaggcaccagacagaaaggagtgattatgacagaaaaatgtgagatcactcaggcctaggtcactagcctggtgcctaatgacctgcaggaaaacccacaggtcagcaagtgcccccaccacactcacgtgcacatcctcacatgcactcatacagac

SEQ ID NO: 789 - DNA, 2215 bp, Homo Sapiens
aggggcccagactggtaggctccagcctcccgtccattgttctggggcctctctggaaaacaggatgggaggtgaaaggtggacacaggcctggacccccacactccctgaaacaacccaggggcacagcacagaatccttaggagggagggcctggggacagtccccattttgtggatgagaaaactgaggggtttcattcctattaaaagggagagagcctgaagccccacaccctttatgtgcccacccacagcctcctgccgggtttgggggatggaaaaatgacaccccagaatggaaacaaaacggtctattgtggtttccatttctgaatgcttaccatgtgctaagtgcagaagtgtcataactctgcaggttaagttcatattttgtacccattttgcacaggagtacactgaaccataaggcaacaatttattcttcaaaggacactactctaaacattactgtatttcaagtagtacgctgtgtgaccttgagcaagttgcttaccttctctgggccaggccctagttcagctctgggacacagcagtgaccaaaggagccgtggttcctgctctcttagagcccatagcctgggcagggaggaggaggcaaggaatggcaaatacacaagaaaacaaagatcatttctgatggtaatgaattcagtgaataagagcaggagaatgtaaaagaaagtagcctagggggatctgagaaggcctctggggaggcgacatttgacctgagacttgaagaatgaggagtctggcaaagacctggggctgatcagtgttctaggaacaagtaacagcaagggcaagggccctgaggcaggacagagctattaatagtttaaggagggaggcctctgggctggtgagagaaagggaaggggcccagttgggtagtgggcaggggaggagtttggatcttattctccgtgagatgtgctggttctggtggtagtgggggggcctgtagtctcctgttacaagggttgggggtgtggggacagccagagccaaaggtctctcccccacagctccggcagtcccagcccagaggcgccggcctggcggctggaagattgcactgtgggcacatctggggagcagctgccgagccagggccagagtgggtcacgtggcacagggcaggaccgtcctggagcctacaaggccaagactcctaggaggggcagtggagaacactctggacgagaacagtgcgtcaacgaggaggaactgtgcactgtagacgtccaggcacacggccccctgcagccccacacagcccctgcctcaggacagagtgcctgggttcaatgccacctcccagctttgtgatctgaaacaagtcactcaacctctctgggtctcatggcctcagctgtgaaggggacatgatattactaccacagttccacaggctgttctttttttttttttttttttttttttttttttaattttttgagacgcagtctcactctgttgcccaggctggaatgcagtggcaccatctcagctcactgcaacctctgcctcccgggttcgagcgattctcctgcctcagcctccctagtagctgtagtagctgggactacaggctcccgccaccaggcctggctaattttttcatatttttagtggagatggggtttcaccatgttggccaggctggtctcaaactcttgacctcaggtgaaccacccacctcagcctcccaaagtgctcccaggctgtttatttctaattcaacaaatattcgttgagcacttcccacatgccaggtgctgcatgaggctctgcgtgacagcagggaacaggacctccgtggtcccttcccttctaagcacacaattaatgctttagaaccaggcctggcattgaggaaactcttagtaaatgtaagccatttgcctggagctctggaggccagaggaggcaccctggaaggcagagaaggaggtgtggtgacagaaaaatcctaaggaaagtgcactcccttttatcaccaggtgctgcagttggctcctggtatggctcatttcactctcacaaccaccctacgaagagggatgagcattagctccaatttatggatgaggaaactgaggcccagtttgtcaatggcacagccaggactggaggcagtgaagggctggtccctttttctctctggggctcaatattcccatctgt

SEQ ID NO: 790 - DNA, 2431 bp, Homo Sapiens
cacactagacctactgagtcaggcacgctgagggtggggcccagcaacgtatattttaacaagcactccaggggacagtgatgcgtgcctaagtgtgaggaccactgtgccaggagagggacctgcaaatcctgacagacaacaggtctcctaatgcaggtacccatgggccaaggagccagcagccactctcctgtgaccttagtgcccagccagtcaagagcctgtctcagggtgagaacatcttcctcccttccacagccccttgaggggtcacctttgtacagtctgactgagttagacacgggagagctgctgagcttgttgagtggatgttttatctccttagccaagactccattcccagaatgaagacggagggaagaatgcttttccatatgttcttccaacaagtcatatgacagatgaggaaaccgaggctcagagtttaagttactcatccaaagtcatgctgctaataaatggcagagtcagaatttggacccacgtccatctgccctccagtgtcctttctaccgcagcaacttgcatcccttgaccagagccagctccaggaggatagggcctggctttttctggatttgagctggagccctcactgaactcttgaccttgctgtgggaacctccagctaagcttctcagacactgggaggcaggtcctctccttgctttcaccctgtcagcacagcgggcatctcggaccatgctggatcccgtcagggatgtggcagctgccagtcagttaagtcacaagcctcagcaggcctgaatgatagccaaggtggtcaccgtgccaagtggattgcagccaggaggtgccttgcctagcccacccctcatcctttatttggaggcccctcaccatctcaggcagggtcttcttcccccagcagctgctcagagcttgccatgcaccccctggttcttatggtagcccagtttagcaaacggacctgaagttttataaatagcgcaatggcaggctgggaagctgtcctgtgtaagaggacagaacatgcattctctgctcctcgagccatttcctgggatcgggtgatgggagtgacttctagtgcagataaagtcgaattactcttatcttctaggtctatactccacacttggtcttgcttctactgtttggtatgtctgtggtttccccctactgcttctgcctttatgtgatggtgcttccaagtctgctcccgggacgtttcctgttcttggaacagctgcaccagcctggggtaccctcctgctacttgatcctatagggaggtgtccagtggctgtgggcaattttcagatgaccttgttcgtctgacgtcattagatcgctatttttggctttgctgtttatgctgcagaagttgggctggaatgggagaggaggaatgaaggaggggctgctcttggtttcccattgttccagggtcctaccaagtaggtgcatttattcttccacatttacagagcacctactgaatgtcaggccctagggcaaccaaactgattcttcactcacttatgaatttatttttcaatgggcattgctttgtggtacggagtagtaattaaatgtgagggctctggagcaagagagtttggatttaaattccagcccgccatttactacctctgaaactcctctgtgcctcagtttccttttggaaatgggagtgattatagtatctacctcataaggttgctctgaagattaaaagagttaatatctctgtctgacacattgtaaatacacaatgaacgttagtggctattactactaaccacaacagcaccacgtattgtactaggtacttgggatatgaaattgaatgtgatgtagtctgcatctgttttgcactggcatctggactccaagggtctcagatattgggatggggtacccagtcaacaccgtcagaaagaatacctgctgtgtgtactatttttcctaccttatgttggagggcattcaagggaaacagaaattgaagtttctggctgggcgcagtggctcacgcctataatcctagcactttgggattatagggaggccaaggtgggtggattgcttgaggtcaggagtttgagagcagcctggccaaaatggtgaaaccctgtttctactaaaaatgcaaaaaattagctgagcatggtagtgtacaactgtaatcccagctactcaggaggctgaggcagaagaatcacttgaacccaggaggtggaggttgcagtgagcagagattgcacgactgtactccagcctgggtaaaagagcaagactccggctcaaaaaaaaaaaaaaaaaaagaaacatacaaaaaagaaaatgaagttcctgtcctaggaaagccttagatcagtggctcttcaccctgccacacatcagaatcttttggagagat

SEQ ID NO: 791 - DNA, 2460 bp, Homo Sapiens
cctgccctgggagaccaagcctccctctgcctccagggtggcccagacaaaggcggcggtgtgcccggccccctggcactcgggctgccttcttgtcctcctcctcctcttgctccagggcactcgcagaggttcttttcacaaaggagctggaggatggggggcagggctgggcagccccaaggcaggggaagggagcactggtgaggccacgccctgccaggcctgactcctctcccagccccgtcacacaggcacccagtgggcaccaatcgtggcctgctgaataatgaccattctgagtactgagtgtggccagggtggggccctggcacacgtggacaccactaatcctcccgacaagagatggggtttcacacttaggctgaggaggggagcgtgtcaagggagctattatttccccagtgtagtcaagaggaaactgaggctcagagaggccgagccacctgtctaaggtcatacggttcaaagtgggacaaactcacccccgacccaggtctacctgattgccacagatggcatgctacccgctgccccaactgtcacctaacaaacaattaataataaaaagagaaacaatgaacatttagcaagcatttaatatgtggcaggcactgtgcctaaggcattacctatattaagtgatttaatcctcccaacaaccctatgaggtaagaactgttattatatccatttcatagatgaagaaactgaggctggcaaggtggggcaatgcaccaaaggacaaacagcaaggatttggtggagtgggtttcaacccagccctccagaacctgtgcgccaaaccacagttctatcctggacggctggatgggggacggacagactgacggatgggactgatgattgacagctctgtcccacctgcaccaggcctgaggctgggcacccagtaggagcttagccagcatcggccacaagaacactgggcattctcacgcagtgcctgccggaggggcctcatgtccccagcagggccggagcttgggggcggtgggcagtgtgcctgggctgctgggggggcccaactccctcccgagcagagccacggcggcatgacggatgtgcccgccaccgcggggagcccagggtatagcagttgcctggaaacaggctgctctcgcggcccacactcagacctttgtcaccatctcaaggacctttttttccctcttcctcctttcacgatggagccagaccctgcacgcaggtgagaaaccgcagccaaccccaccagcagccccctgtcaccagggaccatgggggcccttggggcctggttgcgggtggggaggtaggtgggtgccgggaggatgaggggaacctgcagcgggaagtcagcgctccacgggcggcccagccgaggcttggaaaaatcccgacgctggaatgcttctctcactggctttattttccccaagcttccctgacaaaaaacgaggctgagtcctttttcttaatggcgcaatacaagaagcatcagcttccagagccgagggtgtgcccaaaggatctgggcagggctgggcctctggggggcccagagcaggggacaggtgtggtgcccccagcacagcaggcactaattggctctcatgccggtggccctgagaggggattaactgggccctggggaactggctggggatggggccacgccccagccagggttgggcttggggacaggagtgtggaggagcaacagtgaggactctggggtcaccccagcatgggcccaaatcccagctttgtctcttgggcaagttatttgtctcccctgtgactcagttttctcctcaatgaatggggaggacctaaaagggtggttatgagaatcaaacaatataattcgtgtaaagtacctagcacattagctgggcatggcggcacgtgcctgtagtcccagctattcgggaggctgaggtgggaggatcgcttgagcttgggaggttgaggctgcaatgagccgtggtcatgccactgcactccagcctgggtgacagagtgagactctgcctcaaaaaaataaacaaataaataaataaaatatctagcatatagcaagtgctcaatgaaagaccacaggcgcgcttactccgagggccatggggtgcctggctccaggcatgccgtcaggactatttcattctcaccctaagcactcagggaggcaggaagtccacagtccactcactggccataggcagaactgaggctccaggaggaatggcatttgcctagtgacactggggagcatgagatgtcagattgacttccaccccccacccgcccatcaggcttccggcttcactgtctcagccactatctcaacctccccgattagcagtgctgaacgctgaccctgaaaatcagacctcaacgccgcctgccccaaacattcctgggctccccagtgcc

SEQ ID NO: 792 - DNA, 2408 bp, Homo Sapiens
agttgcttctgaggtgtgaggataggaggggctgctgcctgaggccctctgctcactcccacccactgggacctcttgtctggcccaggctctggacaggtgcgccgcatcggctgcagaggtggccttgggctgcacaaggctggagctcaccattctgggcttctctcccatcctggctcctgccaccaccctctctcactgcctcagggctcttcagtaccttaaaaaagtttgtttaaaatttaaaaaaattatcaacttttctagatcttctcagtagggagggttggtctgaaaccacctcacttgctacttttttttttttttttttttttgccagggtctcgctctgtcgcccaggctggagtgcaatgggaccttggctcactgcagtctctgccttccgggttcaagcgattctcctgcctcagcctcccgagtagctgggactacaggcatgcaccaccacccccagctaatttttgtatttttagtagagacagggtttcagcattttggccaggctggtctcaaacttctgacctcaagtgatccaccctcctcagcctcccaaagttttaggattacaggcgtgagccactgtgcccagccttacctgctactcttgcattataacaatggtcatggtggcaaaatgtttcattgagtggcatggctgtccttattctcaacagttccctacttagggggcagttagtttatttcttatttttttgacggggtggtcatgattaatgttgtttcagtaatgtcttttccatatagggattattttctttggctagatcctgataagtgccatttctgagttaacaggtcttcaccaaacgttccagtgcgttccagtttgcactgccctgtgatacagggcagaggaggtcctgttttcaaaagtggcttatgctgtagcagggggccctgaacgtctgttttctcagtggatggaggggaggggccaaggcaggctggagaccacccttgggagtggaggccccggcctctccagcagcccccagctgtgtgctccctacaggtggtgagtggctgcctgcgcggcacagtgagtgtgtgggaggtcgtgacgggcaggaagacgatggagtttgctgtgtctgggggccagcacgtggagatgaccgccatggccctggatgagtcagagcggtgcctgctcacaggtttgcgggatggcacaatgaagatgtggaactacaacattggcaaatgcctgttgacctttcccagtccggaacagctggaggtcagtcttgcttgtcaattacagccagggacggcctcttgggaagcaaagcacagctcctttgaccctgggatgcactattttttgtacctctctgaaagggtgttcatcatagtcaggtggcctggcttcaaacctccctgagcctctgtgtcctcatgcatgaaatgaagacaggtaacagtgcctggactaatgggtttccactaaggttagctactgttgctctttaaatttgctagcacttctcattccacatactggagctttggattgcatttctagcagtgggatcagttaattcacagccacccatggtcacccctatttgggaaatgcctgatggtattatagggccagtccatgggagtggcatagggcaaagccagcagttccaccctaacttctgtgacacagtcctttaaccaactcagaaagtgtacttagctggccaggcagtggctcacgcctgtaatctcagcactttgggaggtcgaggcagggggatcacctgaggccaggagttcgagaccagcctggctaatatggtgaaactcccgtctctgccaaaaatacaaaaaaaattagccaggcgtggtggtggctgcctgtaatcccagctactcgggaagctgaggcaggacaagccgggaggtggaggctgcagtgagccgagatcccgccatcgcactccagcctgggcagcaagagtgaaactctgtcaaaaaaaaaaaaaaagaagaagaagaaagaaagtgtacttagccaagatgccaggggttgagtactgctccagatcctatcactcagtagtgacttgaccttagccaggtcacttgcccatttcccagctatcctctctgtaaaatggacatggatgcctaccctatctcactcccctaagtccatcaaatgagggaataggatgtgagaacatgatgacaaatacatggtggtatcacctgtaggtgattttcgtcatccagagatttgacttcttgcttggcacctttaggaagacatttagggcccagagccattttctctgataagttttctagttctgttttctttcatcttcaacagattagtgggattatccatatgaacaaagtgttctatg

SEQ ID NO: 793 - DNA, 2461 bp, Homo Sapiens
aatcccagctgctagggccaagatcagccacgtgctcctttcccttggccatggctttggacactccaagctggcagtgagtgccaggtgagggggctgctaggagccggcaggggggatctcacctttgtgccacttatgtccctaatcaggggcaacctccccaaatctgcacccccaaatcccctccccagcttgactggagaaatcactctaactcccaatgatagcaactccaaatcatagcaataataatttactgagtgcttacagtgagccagacacagtgctagcatcttgtaccagcagttctcaaactttttggcttcaggaaccctttacaccctaagaatgatcaaggccctcaaagctcttgttcatgtgggttgtatctatcactaattaccattttaggagtcaaaacaaattttaataatatttatttataatttatttaaaatagcaataataaacactacatgtgagcataaataatatattcctatgacaaataactatatttcacaacacacaaaatttaaagagaaggaagtgtggctttgttttatatttttgcagatctctataatgtcagccttaatagaagacagtttgatttttatatctgcatctgcaagtttttgagataccacatgtcatgtagcccctgtaatattccactgggagttttaaaaagctttcactgagagcaaaaaacccccacaaataacatgtttgtattattgtcaacattattctgaattttatggaccatctgaaagggtctcagagaccccagaggtgcccataatacactgtggaaactgctgcctgatatacatgatgggtagcttccaatattgccccatttttacatatgaggaaactgaggcacaaggagattaaagtgacttgtccaaggtcatgcagccaggcatcaaagctagctggggagtcacttgattttggtgtccagggtcccagcactgagccctgaaagagagggtaggaactgggcacagaaaaagccggaagggcaggttgggccatgagtgggggagctgggtgtgcagtgaggggtgggggtgggaggggaccgggggatcagttagtcaccaagtggtcctggtgacagggctggagatggcagctggcggcggatgtagcctcgggctggaaaatcaataggtgatcagcggtccaggggcaagctgttcatcaggtgcggcagaggggcaggggcaggggcgggggggctgggaggaaatatcactgacccccggcaggattgatcaaacagccagacacccaaggccaaactcactaataaagtgagacattcagctcagcccggcggctgctgctgaaggtcttaaaaaaaccgcttactggggagttcttgataaactgtctttgtttcttgaggcaagtgggagggaggacagactgtggggaggcctggctcggctgccgtttggcctgggactcatggtttgccccaggtctggaccacagaaccctggtgcttgtatggcatgtgtgcttgcactacagcacatgccatttgtacagggcatgtgcagacacatatgtgcacactatgtcgcacacattcaaatgtgcctgcacatgtctttgcacgcccgtgcacatgctacaacctacatttgcttatggtatgtgtgcacacatatgcatgtgctacagcacatgtgtacaaatatgccttgcatgtgtgcatagacatgcgtgcaccgcatcacatggcatttacacatgcatatgctatggcacatatgtgggcacaaatgtgccttgcatgtgtgcgtatacgtgcatgtgccgtagcacacagaatctgcctttgaggggtgagcatgtgtgcttgggggttaaactctttctccattgtttcactgatatcaccactttctctgcctgtagtcccaaaggtgccacatttgtaatgacagtcatgattattatggggtggggagatggacggaaaagtagggactggaaaactgtatctaaaaggctaagctgtacaacagagagaggcaggtgtgaacaggaagaaagagggggaggaaaagtgaagggccggcatggtaagggctaaacatcgtttggactgggagttgagggagagaaaatggcaggattcgggggtggctgggtagctgttgggggagcaaattaaagaataaaggatatgcaaatataatttttatttttattgatttattttttttaagacagagtctcattctgttccccaggctggagtgcagtggcgtgatctcagctcactgcaacctccacctcctgggttcaagcagttttcctgtctcagcctccagggtggctgggactacagtctcatgcagccacgcccggctaatttttatatttttagtagagacagggtttcaccatattgctcaggctggtctcgaac

SEQ ID NO: 794 - DNA, 2417 bp, Homo Sapiens
cacagcctgagtatattcatccattttctattacttatatcagaatacctgaaattgggtgatttatgaagaaatagaacttatttcttatagctgtggaggctgaggagtctaagactgagggcatgcatctgttgagagccttctggctggtggtgcagagccccgaggtggtgcaaggcatcacatcatgaggggcacttgtttgttacagcagcaagcataacccaagctaaccttccctgcccatggagaactctctgccagtaagagaaatgaggcattcacccaagtgtcttagtacagagatgacttacaggaacttcagactctggaggatgatttctcacggtgataccaggctgttctgccatgtggcacaactgcaggaggagccattcacattttctatgtgaacagcactccccgtatttgtacaacctgccaccctgggcaggattcccagaggagtgggcctgttgctgagactccaaggatgagtaggaaccccacccatggagatggggaaaagccactgcagctggatgaaacagaagggacagagacacagcatatggaaaaccagaggcatgcatgcgtgcagcagtaatagccaccagtgtctactgagcaggaacgataggccagacagtgtgctaagctctttacatacattagctcactcaatctcacaacagcctgtgcaaattcagacactctggctccagagcctgtgctttaaatcccccaacagatcctgcctactatcactaacattggtacagcactttacagtttacaaaactcttttggactcatgatctgttttcattatggcaacagagcaactgttcccattttacaggtgaagaaacagtactaacggtcttgtgacttgtcaaggttacacagagagtaaattgagaggccaagacttgaaccccatcctctggccttagacaaaggatgccacagcaaggtgtctgcaaagcagtctctttcttcctccctgctctgcagggaggtgaggtgtctatatttagatcattacaaggagctgctgagagaatgtcctcaggctatgaattcagccttacacgcaaattcactgcagatccaggagaaggccaggaataaacgggtgggagaaggtccttgactccaaacagaaactgagctgatcaaacacagcctgagcacacgcagaggctgcaggagggaaacgagattaatctcaaaccctgtgtactcagaagctttccccagaacccaggtcccactggcaggaaattgtcacttcgtgcatttgtttatttttcccatgtcttctgccaggctccgtgtttcactgagtccttatcttctctgtgcatgtccacaggctgctgggttggaaatagcccaaagccattcagaccatttcaggcactgagttgtatcaaggatatttcttgtgggtagagcaaagatacgctcccactctccagttgggctcactgaggcctccccctattggggaactggctgggctcctctggcagagatgcctgctacttatcaaaaatgcacgttccccccactgtggtatagagttgtctctgagaaacacagcccaaccaggaactacatttcccagctaaccttgcagctaagtgaggtcatgtgacctgttctcaccaatggaatatgaacagagtgataggcttctcacctgggcaaaacagagttgatgtgctttctccacattctcgctcagcttctgcctggattcagaccctagggaatggtagagccacaagatgaaagtaaactgggtacccataaagagaaaatacttgtgttagtttactaaaatgatgagagttatttgttatagcagcaagcataacttgaattaatatatcttccttcctgactcttggcaactttagctccccatggagacaggggttggaataccacttgttcccccaaagagagctgtaatctattgttccctgttgtgtgctggcttcaccctcacacctggtttcctgcctcagttttcctgaatagaatagtagattccccttaagacagaggtgactcttatccaagtccatttgggactgactgcccagccttggtcaacatcaaaatgcgctaagactccagtgttataattaatgtccacctaccccccaattcatgtggccactgctcagcaaccctgctactgtatttgttccctttgaggttgctactggctgggtttgggccccaaacagtctctagctgtactggtggcttgataccagaaacttgggagaagaatggtgtaagaggaagagtgtattagtccattttcacgctgctgataaagacatacctgagactgggcaatttacaaaaaaaaagaggtttaattggacttacag

SEQ ID NO: 795 - DNA, 2486 bp, Homo Sapiens
gccaaggaatctggatacttgcagagctcagttagattgcatacaacgctagctgggtgtggtggcgcacccctgtagtcccagctactcaggaggctgaggcaggagaatcgcttcaactccagaggcagaggttgcagtgagccgagattgcatcactgcactccagcctgggcaacagagtgagactctgtcgcaaaaaaaaaaaaaaaaaaaaaaaaaaaaagattccatacaactccaaatgatggctgtttgactattttttcttcacatcacggatcacccctgccgttatacatccatctgttgattgtctttccccctactagaaaggacaaggactttgtgctgttcactgctgtgtccccaacagccagaagagtgcctggctcacacagacactcaataaatacgtattgaatgcatgactttactggcctgtgtcctctgcttactgagttattgaaagtcagggacctgttggattcatcattgcgtccccagggcctagcacagagcttgatgcacatgctgtttaataaatattgaaagaataaatgaatggaaaaacgtcttccccaatgtgttacacactcccgcagggccgggactatttgatttatgtatctagcgcccaacacattgcctggcagaaagcagaccctcaataaaggtttgttgagctagacaagagtctcttctgcatgcgggcccttgtcaggcctgtcatgggagctcaaataaaggcaaccagaccctatactactggatcaggcagaaagagataccttgttggcaaaggatcttaggaccctggagtcataggctgtgcaggcaggatcagcctgcatgtgtagggtggccagagagaccaaagagggcttcccgggggtcaggaatcctgcctttgtttatgtcccctagcactgcccttctctggcaactggcaggcagccccaccaatgaggtttgggcacagctgggggtggaatgggatgggacagatggtgggagacaaggaaacccccatgttttcctccatctgttacatttaattgacttcccgcagaaagaaaaaaaaataaaccagttgcaaggatgaaattgctaattaaaaggccctctgattagatagacaaatatttaccaattatgcctgaccctgcctgtccccttttacgtctgcgaactcccccatcagcactgtggccacatcatacccagctggtggctcttccaccaatcactctcttggggctcagactggctgcgggtgaaatagggtagaagaaaggtgaatactgcaaacagccgttcaacaaacgcgatgcctgttgcatggtcaggcttagtgctgggcccctggaagccatagcagaatttccatggacagcctttcaagttgtgtgctgcacaaaggtgcacctgcaggagagtgggggctccccctgtcaacctgggacccctggcaccaggcaagggggatttttattttctttgcgcaacgggtcattagcttgccaagctgaatccacaggattttgcctgcccagagggggtacctttttctaattcacacagaatgggctagtggcagctctacagagatgaagatagttcagttcctgatcctcaagggctctagggatagtgggggagaaaaatatgcctatgatgtataaacattcatgtgtgattttttttcttttttcttttcttttttttttgaggacagggtctcactgtgtcacccaggctgagtgcagtggcacgattacgacttgctgcagccttgagacccctctctccccagcagcctcctgaggagctgggattactggtgtgcatcaccatgcctggctaatttttcattttttgtagagacaagatctctctatgttacccaggctggtctcgaactcctggatgcaagcaatcctcctgcctcagcctcccaaagtcctgggattacaagtgtgagctaccatgcctggcttaaacattcattcaataaacatttcttgtttactggccactaatgtttgccaagcactgtactagattctgggagagagagagatgagtaatatatgtttcctgccctccagaagccgggctatttgggggagacagagatacttacctgggtctgcccttcctttttccccttcccttttttaattccaaataatcttcacctgggaggtatgaataaccgctctggactctcaccattcaaatcctggctttaccgtgtcttggctgtgtgaccttgggcaagttatctcacctctctctgcctcaggttgcctctctgtaaactggagataatggtaactgcatcccagggttattataatgattaaataaattagcacatggaattcatgcctgacacggagtgctcagtaaaggttagctattgtgtgactgtttcttttttttttttgagtgcctactgtgtgccaggccctgagtcctgg

SEQ ID NO: 796 - DNA, 2463 bp, Homo Sapiens
agtcctgctctaccttgcagatgctacacccccatcccaccttcttggggctccatgggcacagtgcaccagctctggactggatggtaatgtcctctagctctagctccatgatatccttggcatcaagtgacagcaattgttgctgcagacttcaggtcaggagtggccttgcatgctcctgagcccaaggtgctcctgatggtactgccagtgtcctcactggggcattttatcctgcatatcctcctgaaaggcaattttatcctgtatatcctgcttctggccaatccagtagccccacagtcttctctgagaccttgagtttgcaatgaggttcccagagactggaacctcacagagttcctggttattgctttgaatttgcacctgtggatttaactcctggtgatccaaaggcaatcaactttggggtggaacttcatgagttggcttcctaggagagaattggcagtggcagctagaggaagtgtgtgagaggctctgttcagcagggtgagcatatgccttgctcattcgaggcactgacagtggcagaaaccaaaggaaaggagcagaggcagagtggcttggggcattacaatgatccgtgcagttagatgtgctcggtgttgatgctagacgtgctcctcccattgatgatagtggcaacaacagtactgatccctttaacattattgaggtctattatgtgccaggtattgtgctaaaaacacctagtctttatggaagtcttgtgatgtaggctctattcttactcccattgtacagatgaagaagatgaggcataacaatttgtgcaagcccacacagttaatgtgccggagtcaggctttgaactccgacagtctgactccagaccacctcttcctcccagtatccatgctctggtgcctcctgtggcacactcagaagatggcctgcatgtgcatgtgctcatttctgtgtgtgtgcatgcatgcatgtttatgcaggactgggaatgcaggggagttagagtccagttaggaaggagagaggaaatatgatctctttgttgcatgtgggcaccgtaactccagccaggcaaagtgctggtctgttgtagctcatttttatgtttttatttagaagcttcaataccagagctgatggcagaaaatgtgcagtaaaatgcggggaggccgctgggtaatggcccctgtaaagtgttaattgcctattgagactgcagactttgtccatgctccaggatctgaactattgacaggttctaatttatttcgggcccacaaagcgggctcctcctctaaacaggcttccaatcagtcacgcttccctgggcctgccaagaagctccagtcgataagtatgtttgctgccttaaccctttgaagctggtcgtgtggtctgattctggcttgccttaaggaaacttccatgcacaatggtcttggatgaaaatccatgagaatcaagtgctgactccgtgctgggctcccagctgggtgttttacatgcattgtctctgatccttaccgcttagagaagcaggtagtatctcttcaaggacatcctaacctcagagaagttgaattaattgtttaagtgaccactatgattatacttcagactgttacgggctaaactgtgttccctcaaattcatgctttgaagctctagctctcagtaccttggaatgtgaccgtatttgaatatagggccattaaagaggtgattcagctacaacgaggtcttagggtgggccctgatctaatcttactggtgttctttcaagaagaggaaatttggacacagataaatacagaggggtgacccactggaagacacagggagaaggcagccatctacagactaaggggagaggcctcagaagaaaccaatcctgctgacaccttaatctcaaactgcaagcctccagaattataaggaaatgaattcctgttgcttaagccacccagtctgaggtattttgttatggtagcccgagcaggtgactacacacacccaggacttggtgtggccttgaatttatgcacatgaccactgtaagtatgaaaactctgttctctggcttatggctccagttagaataagaagcagaaagtgggcaatattacctctttgcagtaaatttgttcttaggttgggtcctcaaagggcccatgcctatccattagaaagaaaaagaaagctagatttgggattctaagtgcaaaaagaagtcattgactgtttctaagcagagtcagtaacacaatcagaatttctttctttttttggaaaaaatagtctcctctggctactgtgcatagagaatggatggtagaacacaaaagtgaagcaaggagaccccagaggaggctgttgcactgcaggcaagagatgaaagtgacttgatggagagtggtggcaacagagaaggaaagaggtgaatagatt

SEQ ID NO: 797 - DNA, 2461 bp, Homo Sapiens
taccatcgaggataattgctctctgagctatatttccattaccaggtgccatatcacagcaatgttttatattatatcattttattttatttttgtgaggcagggtctctgctgcccaggctggagtgcagcagtatgaacacagctcactgtagcctccactttctgggcccaagcagtcctcccacctcagcctcccaagtagctgagaccacaggtgtgtgccaccacccttggctaaattttttaattttttgtacagacaaggtctcactatgttgccctggctggtcttgaactcctgggctcaagggatcctctccccttggcctcccaaagtgttgggattacaggcatgaatcatcatgcctggccttactgcagtattttaaacctagattggaaaattagcaattaaaagtgttaaatatagaactatcaaatagatggactaaagacatatcaagctcttggtaagaacaacagtcttggactgacaacctctgagttaaaggacagccgtgttttcagaatgagagcacaactagataattgattggttcatcctcttccctctggctggtgttgcattttggttgtaaatatgcacgaagtgtgtgcatgtgaatgtgggactggagggaaaccatgagtatctaattaggcatgtttatatgtgacctgtgtgcttatgtgtgtgcgtgtgtgtctgtgtgtgtgcatgcatgtgtctgcgtgtctctgtgtttctacatatgggtctgtgtgtatatgtgtgtgtgcctgtgtatatctgtgtgtatgtgtgttgtgtgtctgaaggtaaactccaagaaggcaggggccatgtacttagcatagtcactggtacagaataaacactcactatttgttaaatgaatgaatgaatgtgtatgcgtgtctgtgtgtgtgtgtgtgcatgcatgtccatatgtgagtgcgggtgtttgggtttctgagagtggggttattaatgcttgagtgggtgtgagggtcctacatctgattatgtgtttaggtttctgtaagtctagaacttgaccatgcagagacaatgaattttcttgcactcctctgacccctacctgtgctcccactcatcttccttagggctccccttgcctggggagctaccctcctcaccagcctgtagccagcccccatttggacctttacttctgtgtgtcttccggaggacacagatggcaggagcacggaatcggaagcacttggcaatgaagcagcaattcattccgcaatcccttcgtattcatcgcaacaatgcctgctctgatgggctccgcgcgctgaatgcagctttcaatgtgcaatccagcgggaattgtggtgctttgtggtcctcatcacgtccacttattgtcaagtgttgctgagaattctcccactcgggatgagggaaccacttgttttagcaactgatttccgaaaccttctctgggttggggtatctgcgaagctcctggtgatgtgttattgttcctggtttgtgttttggacactcatgtgctctgctgaagtatgtaaattgccataatgtgaggaaatgtgatataaaaataactccggggcaacaaacaccagaggagctccaagattggcacagcctttcctggtcctgccttggggctagggagcatctcttgccggcagtgttggcagcaaaggcctgagatgccctggaatgaccactgcccatcctcctgcagctgcccagctggcctgctggagaagggcgggtgagacccctcctaggaaggcaggaacagctggatgtggaccgtctccttttttcgcagctggtcaacagaaccacaggctttgctctggctaaagggaatctgccacccctgactattcaggtggctgcacacactcaggggcaaattcacattcattgttggccgcccacagcccgttcatcttgccagcagggggctgtttcccaggatcccaggtcaggtggcttcagctgggatccactgggaagcattgatggggagtggaggacagcggaggggaggatggagacaggaggagctgggaaagtctctgtttccctctcctctctgactcagataatgtcttcaggagcagctggtctcctctgtggatccagaccctaaaggtgacctcctgtggtcttagcttctggcagaagacccttgctcctggtcatcccatctctcctctgaccctctggcctagcggtggtggtgatctcctgctgttgtttatctctgggttgactcactggcccttgtttggcctctcagctcttccattacccatgtgacagattcctggcatcgaagtccctctgttttaagtgttcagtagtttctttttcttgtttagactctgatacttcatcaaggacgtcttggactaccagatcttcctccatggcctgtcgaggaaa

SEQ ID NO: 798 - DNA, 2495 bp, Homo Sapiens
accatgttagaagggttagaaaactttgaaagtaattattagttcagcagaagctgcaagaggcttctacaccatgaatagcctaattttgataaatagaacttgtctatttagtgatcctaaatgtatctaatgatgtcatgacagtagtggccacaacagtatcagttcctgacagcagtgtggacacaggttctgagaaccccatacaacagctgactagataatgtgacattggtgtgaggatgtgtgacccagaccactgctttagagtgacccagagttggctgtgaaattgcaaggaggcatcaaggggcaggcactccagatcctgagtcatgtggaaagtgttgagtcatatggaaagtgctgacatccaggggtgggcctgggtgtaccacgaggtcagtactcagctgccctctggatgcaataaagcctggacatcaataacctaatgattcttgacttcatgggagtcagtggacctgctttacaccatttctatgtcaaaccatggctcacataaggacgtcatttagttagagacccatatccgaaaaaagaccactccggaaatttttaaaaattaacatgtgatttggaaattgttctaatgtttcataaacgttgaacatcatgactcgtatgaatgattatgatgttcagttagtagagtactaaaaattctacctatgcttttgtcagtgttgtaatttcactaatactttttattactatggcaatgctttttaaagttgtttaagactcataataagttgcaaaaatagtgcaaaattcctgtgtaccctttactcaccttcctccattaataatatcacacataaccacagtacagtgtcaaaatgaggaaattaacatagtatcatactgttaacttgattacagaatttgtccagattttaccaggacttacgtgtactcttgtgcgtacatgtatgcgtgtgtgtgtggtttacctctatttttaaggactgtctttccttacaatctctatgccaaggtcatggagttttagccattgctaggcagaggtggagctatacatgactgcgcccccacataatcacattcctttcatttaagaatattcatcccatatggagaaatagaccatgtttattaatcactccagaaagtatgtaatttcattagatcaagctctgtctctgggcattgactaatagagggaacggctccccagcgacccagaacccctacgacacggtctgtggagaccatactttggggccagctgctcaaatgcactgctggaattccaggcagaaatgtgtaatggcatgccaagggctgctgagctgtcatagtccaagcagggttatttgtggcttccaaagagaggctgtaaccttttatggtatccacaaatctcagccttcaagagtcagggagaaaatgcaaccatgctgtttgaccgagctaactctttccccaccttgcccctctcccactcccaccatcactctacccccaaccctgagtagtctgcatagctgtcccagggcaaagaacatggcatgagacattacctttagcattacctcagggccagataaaatggccaggcatcccttctgattcaatgagggaaagtcccagaaagttgttgacaaagtagaaactttctaatttgaggtcctgaacattcattgttctttctgagcaagacagaaaagttttacttattggctggggtacttttaatggcagctgtaggccagggacagtcatgtctacacatgtactctcttatcattgatcaggcccattagaatgccagagctaaagaatatctctcctttgctttgcaggcacatggagaagggtttcctgttgtcccttttgacataaacacagtgcttgaagtatcttttctggcaacttctctgatccacttgtatgtgtattcacttatttcattcaccaggagagtcaaatgagtgaaatggttacaaatggtggctctggaatcagacagacttgggtttcaatactacctctaacacttattggctgtgtggccttcatattaggatagaaagttcacatgttgaacttctaatccccagtacttagaatgtgactttatttggagatagggtctttacagttgtgccctttacagttgttcctaagaacacctaagattggtgtccttaggaaggggtgacattggagacaggtacatataggaagaacaccataataacgcgaactcagagattggggcaatgcttttacaagccaaggaatgccaaagattgtccaaaaatcactggaagctaggaaagaggcccagaacagatcttccccttactaccctcacatggtgccaagccctctgaccttgatcttggacttctagcctccaggactgtgagaaaataaatttctgttgtttaagtcaccacttagtatgtggttctttgttacagcagtcctagcaagccaat

SEQ ID NO: 799 - DNA, 2425 bp, Homo Sapiens
atgcatcctgagtgatccaggaaaattgccttctttctcttctcctcaatctctaagtacctaaactaagcctcctcctcttgcaacgttttatctctggtgttcatgggagttgagaacacaccattggagaatttcctcagttcaaagacaccagatcaacaaaacaatctggatgttaaccctgaagccagcctacaataatcagggcttctggctcaggttcacaatgagcaggagacctctgccacctccagtgctacctctttgtaaaacctcaacaagctattttatgtgaaaatattaatcactgctcattgcagcgttcaaaatcagtcaaggaagcctctttgaaggtggtgacgtaggggtttatataagggatcagctgatggaaaggagaaagatgcgcgttccagagagaagaaacaagctgggtagttttgcaaatggtttatgcccatgtggagacacgccaggttagagcaggtctgtgtgggagagaagttgtggttaggggcatggaattggacagagaccaaaaacatgggtcctagaaagtcaaattggaggactttcatcctgcaactccaccctttcctctctttttttcttcgaaattaaccggacttatttcttattctcctcatgggagatttcacagctattatttccattttctcaatagctttgggaggtataattatccccatttactagctaaggaaactaaggcttaggagggttcactgacaggagcgggagcagcttgggctcatgtcacgtgtcttcatagtcagcacatagcttcatctgtcctatcctgcacctgctgtgtcttactgcatttagattgcagccagctttctctctgtctctttgaatttcagcacaggtaggtactgcacttacccattcttatagatggcaaaccgaggctcagagatgttaaaccactcctccaatgtcacattgctaggaagtcgccaacacattactaaacctggggacatctgctcttcagggcagcactccgttgcctcccaatacccagtagctgtgattgttagatgatgatgatgattattaatagagttattgcttttggggcaacactagcagtgcagcagcgagcaggctagcagggcccagggcagcttgctcggccacatctgccctggagctgctgtctgctgtgcaccaggaacccgccgaagcctgagagctgtcagcacagattccaccagggagccagcaacgcccctcacttcctcaggcctctctgaaatccagccaaggaacaggcgctgagctcacagtcagatagctcccggagcctccggccctgggcacggtgccctagctggtggagatggaaacagcaaggcccttctgactcaaagactcctcattgcccctgacacctcagacttaaaacccaccatcactgtcattcagcatccaccctgccaggcatgatgcagggagagaggaggggataaaaaagggaagggccgtacagagccagggcagagggaggaaccgagctggagaaagcattaaggacccacttgtgaaaatcctttggagtgctgaggctaaaagcccatctgggtgggatcaaaggggagcccccaacacagcccatgactggaggatcagcaacttgcaggcctagttaggccttgatttccctttttctcagcttttgaggagaactacagtcactgcctgagaaaatgcagcctcaggacacaggattctaattcagtgcctgcacagccttccaaccagaggcctgcaaatggtagagtcgtccatctggatcattctgcaaattgtgaggtcaaattgcattaataaaaaaaagcattccccttttaattctctttctctttcagtttctcatcagattgggatgagatgcagaaatgcatcagattgggaaacacacctaatcctttgctaagctcccttttaaacaacaagcccaatctctggtaggcaagggtgtcttggtaaaacctaaatagaattgcctagtttccattatactcattttgacagtgaatcctttagaataggaagtatttcttgtctaaagtttctgtttagatcctatacatgaagtttttaaaagcaaaaggaaatcacagctcagccctttgcagatactctgaacatcttgaggagaggcagggacaaccggaggtagggaaacggggtctcggatgacaagcctcagctctgggaaagttctggaggtggcaggacagccaggccagagttgtccggtggagacttggctcctgaagccagcggggcacccctgagcagcaggcctttctcagagcaaacatcagtctctctcctctttgtccttaatgaccacagctgggtaggggggagaggctttaactcccaa

SEQ ID NO: 800 - DNA, 2488 bp, Homo Sapiens
cttttttctttttgagacggagtttcgctcttgtcgcccaggctagagtgcaatggcgcgatctcggctcactgcaacctccgcctcccgagttcaagtgattctcctgcctcagcctcccacgtagctgagattacaggcatgaaccaccaccacacccggctaattttgtatttttagtagagactgggtttctccctgttggttaggttggtctggaactccagacctcaggtgatcctcccgcctcctcctcccagagtgctgggattacaagcgtgagccaccgcgcctggccgaaccattggctctttctaagcagtggaataacaatggttcataacatttagaagatggggttatacactcaccagatctatttccctagagcctatttcagtatctgatacagggtagattttaataactgttgtcaactaataaatatatatttttaaatacattgtcagcaatgtggaagatacactgaagaaggaaaagactagtggcaagatataagccaggtggtaaaatctaaaagaaaagtcagtgatagaaaagaagtttgctgagaatgatggtttccagcttcatccatgtcccatgtatacatatgtaacaaaccagtacattgtgcacatgtagcctagaacttaaagtataataaataaatatgtgtgtgtgtgtatatatatatatacacacacacacacacaaagaagttgatatgggagagacatttgaggtagaattgacaggtcttggagacagcatgactgtgtggtctcagagagagacactagttgagaacaactcccaaaattcctatttgtgtgtgatcctccatgggggatacagaagggggagtctagtcggggattttgagttccagttgcctttggaacatgactgcacagatcgcggcctgaaaggaagtggcagagaagaaaaattcaaaatggctgccaatagtttgccctctggaggcctcagagttccgggggccatggatgcatggccacgcagggtgagcaattgtgatgagagaacagaaaggaaatccaaataagagaactcaaagcagagatgagctaaaaatcagcaacacgaaccatcacaagtgggtagttacgctcggcaggagatccaggcaaagcgagggcaaacttcttagccttttcctgtggaaaatttataaagctcagattggagaaaacgtactgatagttttgaagctggcattttaagttggaatgtcttctcaaagtagcacataacggcacaattcaataactctgaccattgtggaaaaatgccatgtgccaacagcgattttccataattttgttcagaaaatctgaaagaaatgcaaaaaatggatttgcagccctggcagcaggcagagaaacagtagcagagggctgcaggccagtaattgatgtttcaaatatcactgagtgctttgcctgtaatttcaggggagaatgataataattaaaagcacaaacttacaagtcatttctgaggaggaaaatgctgaatgcacttaaagtgaagggggtttgttgaaatgcttaagtttttccagcgagctttcagatatgcaatgattagttttatgttcacagagtgactttctcctcaaatgttccaaagtgccacaaaatggaatagattattaacccatgagattccctgggagccagtgatgaaactataaccatatgacattcccacatgttcagaccttacttgattgtaccggcctttgttacaaacagcacagtacactgtttaaaaggatgaaatgaaacctttcctccttctcccaactgacttggggctttactacgaggcagatttgagcttgagtctgcatccaccctttttagtgctgtgaccttaggcaggtcactctattcctctccacttccattttttcatctgaaaaatagatagaacaatagcacttaacatctcatagggtgaatattgaggattacctgagagtaaaacaatcaatataatttcccacttataatctacgctcaataaatattagctattattgatattattattactgctaaaatgacaaaggcacactatttttataattatttatttttgctgacagaatgtaaatttggccacagattgtctaaattttcctgatattttaaaacaaacaaacaaacaaaccagccagagattcaactgagcagcataaccctttcctgaaaggaatcccccatggttaaacaaattcagggactgagttttccatatcccagaccctattacccattgtattacaggccctggcatgcagtgagcactctataaatgtggagcacatatattgctgaatgggtaaacagttttatccctcctgagaagtaaggacctctggtccctcaccactttctgatgactaatattatgcttgtgcccacacaagttagctgtgacatctggatttttttca

SEQ ID NO: 801 - DNA, 2378 bp, Homo Sapiens
ctgaagtcatagtccaggctctgacccttactggtagtgaaacttcaccttgacccctgtgcttcccactctgtaaaatgaaggtgggaacagctcgctgagtgactgttgtggggattagatgatatttgtggaagaactttgtaaggggtaaagaggtatcaccttataaggtaatgtcatcatttttaaggtggggcaagtgacagtcagacactcaagttagagcaaagccaggagaaggttgcactggcatggaaaggggtaaatagcccacctccaccagcctctctggagggtcaactccaaagttattagagttttaagttttgggtaaaaaatgtttgtccttagagtaactcctcacttcttcagagttattatgtccaaggtgttttgttctgtttgtttgttttggttttggtttttgcttcattttgtttttctgagacagagtcttgctctgtcacccaggctggagtgcagtggtgcaatctcggctcactgcaagctctgcctcccgggttcacaccattctcctgcctcagccacccgagtagctgggactacaggcgcccaccaccacgctcggctaatttttttgtatttttttagtagagacggagttccaccatgttggccaggatggtctcaatctcctgaactcgtggtgtttttattttgaaaaagggaaaaatacgttttatgccctgaggtctaatcacaaaataccttcactcttcaagtctgaccaggagccacttgcctcagaatgacctggagtgtcgttcaaatgcagatcctcaggccccatccttgactatcacttaatttttctgagcctcagtttttgagttttgaggcgtgacgtaacttttgctttaaacctcagtaagagagtttcaatagaaaaaaatgaacaaatgaaaagatgaatggcttgcaagggagaggtagaatatgtatccagacaagatgactcctattgtcccatccaaatcagacctccattatcccaggtccccaaagatgtcttcagtctcaaacaaccaacagagtggccccattcctatccactgtgcatcctggccaagtgcacagtaagtggacctcttggccgggcattctgccaatgctggagctgttaggaaataagaatgtgtgtatttattgaagaaaataaaaatgttcatgcgacgttgcacagagacgatttatgagattttatgaatgtgtcaccaaaagacccactcagtcactgccaatgttaggtctgcaaacacctgggggctcaggcaacaaagctccctgatggagtcagtgggcaggacgtgcttgtggaggggagtatgagccctgtgctgcaggtgcctgcacctgtgagttgtgtggagccaagtacacttaaatcataagtgtatatatgggtgtaaataaatgtacacacactagtggtgtgcaagggagtatgcatatatgtggaccccatgagatcgcatagcatgggccactcctggtgtgactaggaagagaggctaagccacagtgcagaagtggacccattactcacactaccttcaaaggacacagagttctcgctgctcaaaggaaggggttagtcatcacctactgctaagaccaaaagccttggggcatcaagaaaagcagattatcaagagaaaaatgtctctagccgagcatgcaagaatggatagagtctgaccaataggaggaagagcagggtcccatcttgctcacctcctctgctgggcctgaacttctcattgacattatagcctattagttccaggtctctgaagcctctctgagttctgtgaaccaggtttatgccttaccgccctcctgggagcattgtcttgtgctctccagctgccaggctggtgcaaaccacagaatgaacaagctctcctactaagccccttggagcctagagtagttcactgttttctgagggttaccttctatgggagaaagttcaagaaaatgcatagaaggtatgttattaaaagaaaagggaagaggaagagaaaaggaggaaggagaaggaggagaaggaaaaggaaagcaagaaagaagtgcttttagggtgagtccctgaatcacccagagtccatcttcataaaaatagccttaagaccccttgtgggccatgcaagaaggaggggtgcctacttcctccctccctttcattcctctgcaacaaggagagaatcataggttttgcaagagccctttgtttgcctggggcacgccatcatcacatgcatcttctcaggcacgtgagggaggtcacttccctacgagacagggaggaaccctgggcaactgtggcttggaaatgaaaccagccctttcaa

SEQ ID NO: 802 - DNA, 2432 bp, Homo Sapiens
gactctcccacctgtgagtttctgaagaactctgtatataatgccaatatggtgctggtcatattctattctgatttccactgtgcctatgttctccaccagactgtgagctctttgaggacaaggacttggttttatccacccttactcctaggttcaccccaatttggaatggagtaggtgcttaataaacacttactgaaatggacatcaaacctgaataagttctgaggactcccaagtccctcagggctggagagaggaaccaccaaattccctctgatatctgggacatacacatagttcacaacaattaaaataactaaatctggatgactcaggacacctgagctttccctcctacattttccaccactttggcaaaccccttaacctctctaagcctcaatagcctcatttgtcactctgaagtaactcatgtgccggccagggctaggtatgtttagaaacgccatctgttttagccctcacaacaatcaaggtacatgagcacttgatttccactttatagatgagaaaaacggaggttcagagagattgagtaactttcccactttacacagctagtaagcagcagagctgggatcagaccaggcccctcaacccagagacattacttattcatttaccgctcctctcagaaaaatctttattgagcacccactgtattgttggcacagctctagatgctaggggtacagcagtgactaaggcaagtgattaaagtgtccccatatttatggcatttacactttccttctgtcatgcacccccccaaagctggtgacacaacatgagaggggcaacaggactgcagtggccccaataaggtccagcatacacagcagctttagaatgagagcagcaagactaaccagccaacgctaacccccaccacaggtggagatggagcctgatgtgaagccacgtcctgcttgctcaggacagggcaggttgaagttctttagcacctgtggttgggctgggccaggacagagaggggagaggcaacctggaagctgcaggtcacaagtctcctctcctgccactttgtgccccctccccagtcctgtcctcagccaagcacaggagcagtcgctcaagtttacgatgtgctgcgtgcaggttgcagacctaccatcatccataataggttgttgtttttactttccatttatagaggtggctgagttaccacctatggtcaccgcagccgttaaactgctccgggggctgagatttacatagcagccatgtgagctgccacaaacttggggttgggaggaggatgttttcaatcgaattagagctgatgattgatagacagggacagcagagaccagcctcatcaactccaaaaagcccaggaagccctcacccagaatgcactccctggagataacagtggtggagcccaggccatgcatgagataaagaaaaaggctcagaacaagtgggtgcacattcgcaccctggaatagctaggaagacctgggagtgggaattagaggatggacctctactcctttcccccatgatatcaaattcgcgtagtaattatgtcttttacctgaacagtggttcctaacaaccagctaataacgggatataatctccatagctttcaatcccaagatctcaaaacatattatgaataattaaatgccattatttagtgatttgggtaatcaaagacctttttaactgtcattttttttcttttgctgtgcccagaacacagctcagcaccatgttctcaaatgaggaaactgaggcacagagaggccaggtgaactggcacagatcatctgatacctcatcgtggctcttagtccccactccacactctttctccagggccttcagcactgtgcctctgcatgactgactgcccccttctccccagccccaaatcccacccccacctttacccatcctagacaccattatttaaatgtttcctgttgaaatcaccctcattcccactggggcaggtgcagggatccagcaggacaaattggccacctcccttcctggcctcaccttggcccctctcttaccatttaaatcctccaccctgaacaaagtagcaaaatgtaccccccttctcatgcggtttagtataaggacaggtttggatccctacaatgaaagttcatgtttctaacaagtgtccacagccagtgccctctgcatccatttaactgttgcctcctgaaagctatcattttctatttcctgtgactaatgtgcactgggagctaaattcacacgtgtgtgcaggaccctacttccaaagacatgtttcatcatcgtccattgacagggctctcaaccccaagccaggacccacgcatgccagaggctgtggcgagccacgagcattgcgtttactcatgcatgggcataaa

SEQ ID NO: 803 - DNA, 2475 bp, Homo Sapiens
cggagagcacagtggcctcctccaggaagccaccttgacttttactcagacctctccctttgtgccaggcactgtgcttttcccacagcctctctcacagggtctctcctcgacacaactggcacctgacgctcttgtccttttgaaaacaaggaaacagagggtcagggaagtaactggtacctagtgctgttagggccccgccccttgcagatgaggagacaaagggccagggaggcagtgggatggatatgttgaggtcgccaggaaaagacagcctgatgtgcacctggagctgtctctgaaggtctcacagaacctggcacagcgtcaggtaacccggctgcctctcctgccacacccaccaaccccagagcccacaccttggcacagaaggaagagatccaggctggtgctgggtcgtaatatcccagggaaaggggtaaggagccttgacctgctcccatacctgcctgtctccaaactgggctggatcctggctgggtggccgctgggtggtagccttgtcccaggacacccggcagcaggacaaggtgggggagccagttgctctgtgagttcccctcaggaccatcccttcctgctccgctgagcagagacacagctccccgaggcctgagtccccatttttcaccatctttatcctcgttcctggcacagaaaagcctcagtatcactttgtcgaatgtggtattgagtgcatgggtgaggcactcctccaagcaacttactacagtaactttttaaatgtttacatagccctctgagaaggggactattattattgcccgttcacagatgaggaaatggaggctcagagaggttaagtgacttactggaagtcacacagctggagctaggatttgaactcaggtctcctagctccagcgtgcacattcttgcccacatgtctctgctcccagggtagcagtgagcctgaaatacgtgcagtgcctggcaggtagtaggtgcttttccaagcccttcttttgcttcactcagccttgaggtcagcggcccgttctgccctgtgcctgggaggaatgttcgtggtggccccagcctggatccgagaagaaaggcagccttgtgggcgaaaggtgagcggctgggtgggcgcgggcgtgtttatccagggccggcgtgtggctcggggtggcgccgctgtcagccgcgccggctgccccaggcctgtgctggcctccagatgtgagctggctccagccggccgggcccccccaccccacgcacagaggggctttatcaaaagcggctgtgaggaggcccaggaggccgcctggctccagcctgctggctctgagccccgggcctgcagaagccaggccagtcgcacttgtgctcttgtgccctggtcttcgtgtgctccacggcccagctcctctgttctcctcgagtcccctgggggcccaggcgagggacagcccctttgccaggaaactgaagctgcaggagcagtccgggaggggtaacaatgccagaaccctcctgcagcgtttatttttctgcattccaggggggtagaggtaacccacacggaacaaaagtgcaaaattcatcaaaattcagagagtgctcagtgagacatcaaagtgtagacactcgtgggaaggagaaattgcagattcagagagccagttcttagcggggaggagagtaactggggttggggggtttgcaggggctatgttttctctgcggtattttcttttttaggtgggggtgggggtgttattctttttctttttcttctttggagacaggatctcgctttgtcatccaggctggagtgcagtggcgccatcgctggctcactgcagcccttgacctactgggctccagcagtcctcccacctcagcctcgcgagtggctgggactccgggcacgcaccaccacgcccagataattttttaaaaatagagacagggttttgccatgttgcccaggctggtcttgaactcctgagttcaagcaatcctcctgccttggcctcccaaagtgctaggattacaggcgggagccaccacgcctggcctccagggatgctattctgtatattttattcagtggcctgaactattttgtaataataaatcataataactgggaaaaaaaacagagaaaaaacctgagacatccacctgctcccgaccctcagccctactcctgttaaaaatggcttctaatgctttctagagattgtctgaacacccacaagaaaatccacatacattctctgtcctcttttgtttttggttttataaatagtatcaaaatatagtctgagcacagtggctcacgcctataaacccagcactttgggaggccaaggtggacggatcccctgaggtcaggagtttgagaccagcctggccaacatggtgaaaacccatctctactaaaaatgcaaaaattagtcgggcatggtggtgagc

SEQ ID NO: 804 - DNA, 2456 bp, Homo Sapiens
catttgtatacaatgtaagacatggatacaatatgcagtgctagcctgtattttcctatttgaatatcccacataaattactacagataggataaaaaagacacatatctatttaaatgacttcctagtttccattccaaaagcagaagatatgtacttaagcagcacatgctacagtgtcttctctttcaaactatctgttcctagcctctagggattttgttttgttatgtttcattccactgcctaagaaactaagattttgccagcaagagggccaatatgacaaatcatcgatgattcttagcatggagccaagaagcctgcctccttgatcagattttcagctggaaagatatccacaccttgcctagtccaatatttgttaagtgagaatataaaattcaaagatgttctgtcacactctagatttgtattaatgtccacaaatattaaagattcacatgatacatatttaggaaacacatgctactttgttactgtttgaactctcaggaaacaatgttcccattggtgctccgaattgttactattctctgccatcctgaagataactaatacgtacctatctgtgttcaatctcagctttagattatggcactggtgtgtgagaaacaactggttcaactaactataagcaatatattaactctgcttttttttttttttttttgagacggagtctcactctgttgcccaggctggagtgcagtggcacagtctcagctcaccgcgacctccacccccggggttcaattctcccagatactcctgcctcagcctcctgagtagctgggattacaggcgcccaccaccccacccagctaatttttgtatttttagtagagacagggtttcaccatgttggtcaggctggtctctaactcctgacctcgtgatctgcccgcctcagcctcccaaagtcctgggattataggcgtgagccaccgcgcccagcccaactctgcttttacaggtattggctctcattccctagccattggttctccccttcctgtaattcaggcctgcaatataatttcttagtcccccaaggaaaacagaactaaagacttctaacagaagatctcagtctactaacatagctaatagctattaaagctactcaggcatcggcttaataaaaaactaaagggctgcagcaagtgatcagattttcaccactcatctttgtgagatgggtctcagagggccccgtccctgctgacaccaaccattcttaccggtagcctgccaacacacaagcagttcacagtagaacactgcagactgcagggcattttcaggctacatagcctcaagttcctagaacaggaactgaggcttggaagaaggtcagtgcagcgcactcagcgaatggataaactgaatcatcatttcacaaggctgcaagcccatgtactaatggaatcaacatggaaccagagttaaattactgccttaaatatctaatgcatgtcaagaaatccatctaattactaagtaccgaaattataatactttcaaatgaattcacaaagcaaaacagctgaactaatgatctgtaaggatctcctggcagataaatcctactgggaatcaatacaccactgctaccaagaaagcaggtccaacaaatgaataaaagaaacccagccaggcagagaggttcttgtctgtaatcccagcactttgggaggctgaggcaggaggatcgcccgcggccaggagtttgagacaagcctgggcaacacagcaaagccttaaaaaaaatcacctaggctcggtggcctatgcctttactcctaacactctgggaggctgaggtgggaagatcacttgagctcaggattttgagtctgcagtgaactacgatcagaccactgaactcgagcctgggagcaggccgagaccctgagaccctgtctcaaaaagtaaaaaacagaaatgccagtttcctttactcagagctaaaagccttcacctactacccaatcccatcatggctccctcccaaaagttcactggcataccatatcaagtcagcaagcccccttttttgtagcagggtctcactctgttgccaaggctggaacaagccctcttcaacaaagctaagatggtccatattactcatgtggatgagggtgttgaaggacatttactgccttccttcatggtctcacttcatgatcaaaccaagatgcacaggaaataggtttgacaatttacctttaccaagaaagacgattcagcaacagtggtagagctgcctgtttgaacttaaccttggtcatctcagtttgaaatacaaatggcagcatggagagcaggctgcccgctttttggttggacatttctttcactcttgagtttgaggtacagcaaatttcccaaatcattcagatgtaaatattccaatactcagaccaggg

SEQ ID NO: 805 - DNA, 2488 bp, Homo Sapiens
tagaagtccccttaggtgcaagcgctagggaaggatgctgagataagagggagccagtgaagactgaaggaagagtgccagacagaggggtcagcagatgcagagctctagggtgactggtggaagaaaggccagtgtggctggagcttggagggtgacagggagaggggcagaacctgaggccagagctgtgacctggggttgatggaacaaggcctcatgggccaaggtaaggaatttggcttttattgttagtaagccaaagacctgttagaatgttgagagctctgatttgtgtttgcagagatggatgagactgggtttagtgtaggctcaggatcgggggatgtgtggcttgtgacagggtggcagagagggcatttaggagctgtggaaagattctggatacactttggaggccctcaaccactctcatattctgccttccacagtagagcttttctgtcagtgactcatgtttggttctttcatactgtggcttgagcattagagagtaatattgtaaagttcaacctcccacagttcactgcaggaatgaccccattcttgcctccaaggccagcatggtggagggattccatggcatgagtttctatgatgacatcagacattggacatcaaggagtgcgatgctcacccctggtttttagtgatccttgggcacagtctggacacaaaagccagaacttgtttgatggttttttttttaagaaaaaaaaaaaaaaaagcaagcaagttcagggaagcagtctcctttttcctggtcaacatgaagccaagtgtttcactattgcccagttttcccccaaatacaaaaacattaattttaaaaagatactgtaaaaagcccaagaaacatgtatattgaatttgatttatgtatactattgtagctaatattttcagggaaatttctaaatgtctgtcataggagcttgtcagaaaaagaaagatttatttttggaaaagtatgtttcctggtgttcattgagcttggaaattatggaaagtcattgtcagaagggaggcagctgctccagaggcggagtggaagtcaggactggagaaggttgtcctactgtgggctccagcgtgcctcttgctgctagctggtcaagagtctcgcagcagccactttatacctcactagctccaccatcgcaattatttctgtcaaaacgaaacacaaaagaatggcatgtctatgaatattcttcacagaaaatatattcgtttgactattttccataaaatgtgaagtcaatttctttttctatttttaatcatgaaagtgaagcccggaagcctcaatttctttgtaatggaaagatctgagtttgtggccttgtttccattttccacttctcctttgctaagtcaggaacatgatactcacataatatcccccgggcagtggctctgttcaggaattgcatggctgtttgactgcagagggagggcaaaggctattattaaccattcgtgtcattgttgggtcatgaaaccttcaggggataagtataagttctataaaatttcattttgaaatccagaccagatctggccttatgctctgaggatttttttttttttttaagtttcatgttgtccctttgccccccttcattttctcttgggaagagtctcttattatcataattactacttgaaaaaaaattccaagcaagaaagcagtgtattaactggaaagtaacaatttagaaatgttattttttaatagtaagcttttatagtattcctgggtagaaaggtatttttatagaaacagttattttcctatcttttttctcatgagtccataaaatagcatttttatatcaatttttgttatatctaatacataaaatcagtattcttttaagaatttagaagtttaagatacactaaaaatatttttgacaataactctcattctcagaggtagcgccgttaataagttctatgtatttacttccagacttaacaaaaatatgtttacccacatttacacatggtatctctgggtgggtatatgtcagaagatttttttaaattgtgtttaattatacataacctaaaatttttaggtatacagtttcgtggcattagtatattcacattgttatgcaacttttattatcaccatctatctgcagaatttttttttttttttttttaagacggagtctcgctctgtcacccaggctggagtacagtggagtgatctcagctcactgcaacctccatctcccagattcaagcaattctcctgcctcagcctcccgagtagctgggattacaggcatgcgtcaccgtgcctgactaatttttgtatttttagtagagatgaggtttcaccatgttggccaggctgatctcaaactcctgacctcaagtgatctacccgcttcggcctcccaaagtgctgggattacaggtgtgagccactgctcccagcctatctaca

SEQ ID NO: 806 - DNA, 2471 bp, Homo Sapiens
tgcaaatgaagccatctgtcaaaccaggggccaggcgcccagccctcactcacctgggctgtgcctctggccaatggctgaggtgacctcccaggcatccatagtggagtatgtttctactttattgaacagccttgaaaatcagagaagctgaggaaaccatgtcaaaatttcctgagaaatttctctcctgcacttggtaaaggtgaactagaatttgccatgtgagtgaggaggacattttttaatgaggcaagagctccacaattcccacagctgctcagaaagttctcttgcgtgtcttgagagagactgaaataaagggaagtcgaggacagcctggctttgttctttgaaactacttatcaaagtaagatcatcctaacccaatatgagaagtatatgtgcaactgtgtgagtgtgtgtttgtgtgtgggggtacacactgaaagaaaataaataaggatgaaggaaagaggaaaacagaactgtttcatggaatacattgtgtaccccaattaatgcttcctatacttttattattttgtttgtaattttatttattattaatgaaactgccaacttgggaataacgttttaggtgctaggcgccacattcaataagaacccaaagagtgaaaggacaaatggagggctatcagtgttcaagatggcttcctgctggttgtcctggtgaagaacagtaacataaagggtaagagaaggattaatggaaactattgaacaaagtgaggcttccgagtcatctccagattgccttgtgcgctgctgtatctgtaccgtagcgtggataatcgtggcaggctatcgttctagccctgctgcgagacagattccaattcattatttcattccccagcatgagccagccaagggaaaaggatattcccagaaccagagtgttccaagttttctgaaaggtcattgccacttttttttttttttggtagctcccagcaaagcagaaacacttggaagtcaaccctgtccctttaacactgctgtgagctgactccatttgtctgagataaaacttccctcttgatccagtagcgttcacggctgagttggccacgagacagaggaccctgtgttcctaattatttctggatgaaaagtcctgcaggcgagtggagattcggggcaaagacggccaggtggagccgtcaccagcgagcagtggattgtagaaatggagagataattaaattaaaagtgccaggtgcaggcattgaaaaataaccctgggtgttaattatgcagttcagtgttagcagaggaaatgccaccggcctgtccatcacgtggcagttgaaaagcttgggaaagacacattcatggtttctagagaatttgccagggctgcctacttgggattctggtgaagcagagattatttattagttggagtgtgtacatttcccccattttccactcagccaagttgggcatttggtgggtacttggtgtgtgggggattaactttgatccacatgaaaatttgaacgttggagtgtgtcacttccaatttaggcacttaggagtatttcttctctttctgatttgaaatgaatttgattttaggggtcagaggtagtgtgtccctgtcatgaagatggaaggataaatggtggcgtgttcagacaatggaatagagcacagtaatcaaaaggaggggaccccagtagcataatagcagcatgactgtgttacaagcacagttgaatgaatgaaagaagccagacctcaagacccattctgcatgaatttattttggtgacgttctagaacaggttaaactaagctatggaggtggatgtcaggtctgtggctgcatcagggaacttttggggtaatggggtaactttcttgggctgaagggcacatgaatgtaaacatttttcaaaatctgttgaatgcacgcttaaaatctgtgcatattcttgcatggaaattatccctcaatgaaaggaatgtgaaaagatcttcccatgttttgtccttccatggattttgaaccctggtcagtcagttcatttcaaaaggtgataaggattaatctgtttgtggtccttcctgaccacccagccttttcctgttcacagacctgttcagaaaaggctttcattccaaggaagcagaatggaaaacagggtggcccactacagcctttgggccaaatctgctcaatcacatttttgtaagtaaagttgtattgggacacagccacatggccagtcatttatgtgtcttctgtggctgctttcatgccacagtgacagccgaggagcttttacagagactgatccaccacctaaagtgtttactctctatccctttacagaaaaggtttcctggcccttggtctaaacattcatttctttttggaacttctcccttcagatctgtgtgggtggaggttttggatggagagtgctctccaggaacga

SEQ ID NO: 807 - DNA, 2495 bp, Homo Sapiens
ttcccccacgttctttctctctcttgccgtatgtttcacactttcagtgtgtgtaaacatcagagcaaagctgtaggctgaaaactgcagttccaaccctgcaagaatcctttggtgtctcgaaagaggcagagggcatccagccccatctccttccagaggccgtgctgcctcaagcatcagaggctttgtgttctgtggaggggagaccacagacctcgatcttaaaatggaagggcagaaacaagactgtgagccgggatctgggaggggacgtctaatctgaagtgagccatgtctgatgtctgaagccttttggggttcaagatcaatgctgttgctaccctttttcctgcctccctagggggcttttaggcaatggtgtgctggagccagcttgctctggctctcaagggctgattgttaaatcctcaggaactctgcaaactgcttgttaaacacagctattattaaaaattaaattatagaaacctacagtgtaataaattatattaaaacaaagttaataaatacttgaaattcatcaccttccatttttttttactattctccatgttcttgagggtttttttttaaatgtctgggtctctatacagtagatataagaaataatggctagctactgcgcattccctcccaactacatgtttagtgagatcacactgttcacttgacattgaccatgatgacagcgcttacacctcagaaatcggcaaatgctacagatctgggcttttcccccgcaaatgctgattaggcatttacaggcacacgttactttaaggcaaccactgtcaaccagaggaaacagaaagaagtccatcaagtttgtctttctgaacagccatggcagttccaggccaggcatgcagcatgcctgagggcaaggctgtgccctgtgggaaacccttactactgaaagggtttttagttacaaggactttctttggcttgatagctagtttggaggagtttggggccatcacttcatacaagttccttgtcataactgtaccctggcttaccttgacatctggtgtttactccaagctgaggttttagggaagggtagttggaggccagcggcggctcctagtgacagatgggcagagcgtctgctttggcatcatccagggtgtgggcagcagtggtccgagtaggcaccactgacctgcaggcagggaaagcctgccaggtcagccatgcgcttggcatcaggaggagaggatcagagccagcagtggtcacaatgagggcaaaaccctcacagtggaatattgtcacccaaaagggatgggtggctgtagggctttttggatggaagcataaatgagaaaatacacacgtttctgtaaatggacctgtttgggaagacaaggccacagtacacatagttttctagcaatctaaaccttatgtgtcatgatgtagatatttacaggacaagcaagaacaacaaaaccttcagttttgttctccagtataagataattgaagacacttgtggtgaaaagtacttctgtcaccaggaagatagataacagccagcaatcaatgcctttctgttgtacaagttaaaaagtccattaaatccatttttttttcagtgcatacacaagaatacatttggatactcctgcaaattcatatttaagaatagtgtttctcaaatcggttatttgaaagaaactcaaaggaaaaagcagacacttccacaatatgtccttgctctgttgtagtctgtaattgtgaacttttgtaaattgttacaaccctggatgaatgatgggaatataacaggttgtagaattggagaacgttaaatctttgttcctaatggcaaaacatgtttttctcattttcatcagaatgtgtgatccatgccatttgaaatcaaattccaaacacaatgagccattagtgtaatagctcattactaacagcggtcttataaataatacattcttatcatacacatgcagctcgctgtgaagccagcaaaaggtatttcaggccatcgaagttttgttgcgccagcgcggctgtagattagaaggacatctccatgtgaaccaagatggatgccaattttccctgccgagagtcaggctggccgtctctttctgcacatatggtagatggattggttaatcagcgtctgctgagtcttgggcctgaaattacagagaagctagacaactgcggctatgcagcctttgttcacgagtgcaaacaagacaaacaatcacttgttatttgggaaaaaaattaaaatgtttattttggacttttattaaagtgtcaatggctttataaaacagctgtgtaaatccaggctttttcagcaagtatcattttagggggcctgtaaagaaaggaatatacatgaaaaaattaatttttaaaaattcccctcatatttcagtattgagaagaaaatagaggaggtctcacttttattttgcaaacacgtt

SEQ ID NO: 808 - DNA, 2364 bp, Homo Sapiens
catttggaaaataaatgtcaaagagaagatcataatggcctagaaggttggaaactgagtagctagcaagtgtgagagagggaccatgagacataggacccagattgtgctctatcacccactcattgggtgttcccagtcaagctatttctctttgcatcctccatatccccatctgtaaaaatgagttaggcattgtattctccaagtgcctcttcagggctttctgaaatttcattggccccttttttctggctcttgtgtttgtactctagcttttgcctttggtactgaggatttcatttatgagaaggctttttaaccagccaggctttgtctagccctagagtatttagaatgctcctgaaactatgatttcaggccattcaatttgcatctagaaatgccttggttcacctgatcctactccctcatttaacattgagagataatgcaacagagaagaaagactacaggcttgacaaatgacccccaattcagattcctgccagtactagcttaatctttctgaaccatatcaccatcatttaaaagtgcaataatgggctgggcgcggtggctcatgcctgtaatcccagcactttgggaggccaaggaggaaggatcacgaggtcaagagattgagaccgtcctggccaacgtggtgaaaccccgtctctactaaaaatacaaaaattagttgggcatggtggcgtgtgccagtaatcctagctacttgggaggctgaggcaggagaatcgcttgaacccaggaggcggaggttgcagtgagcagagatcccaccactgcactccagcctgggcgacagagtgagaccccatctcaaaaaaaaaaaagtgcaataatgataatagattcagcacacagagaattatttagaagaggaaagaaaaaactgaggcccaagaggtgaagtcacctgttcaggttcaggttcacacccgaatccagatctcttgtgtctcattccagagtttttttcccctctagagccaaggtcagttgtgcccatatggatatggtagcaaagattggaactgaaagcatgtcagcttttttaacatctccgccaacagccctctcaattcccctgtggcacgtgtcaataacacagcccgtacttgttttagaaacaagcgctccataagcactcctgtttgatttgctttggctggtacaggatccagatgctcttagaatagcacaacagactctccaaatcagcctattcccattccgagccactcacagctctgatctgctgctggctggggttcatccccgagtcttccctacctatcatgtgaatcacgttcagacttttgctagtttgtcctttccctcttgagtagaagtaacatttattgtgtgcatactgtgtgccaggtattgtgacaggtactttaaatagattatctcccttaatctttataactcattaagctattaatagctccaaaggggaaagctgaggctcagtgaagtgaatgaatttactgaagccacatatctagtctctgaaagagctagagtttgaactgagtcctgaccccattgactaagctgtaaggtaagctgtttcctgagtatcatactgcctccctgtcctctggccacggcccttccaggagggtagagtgtttgggagtacccaagaataggcgtttggtgccctgagtgtaataggaatgtcttccatgccttcagtgtattttcctgagagtttctgcactctgtgcctcaaaccaacttctctagaactcagatatagagcccagagatccaagcactgagttagaagctatgtttccatcgtgatcatggaacagagtccctagtgaaaagtatatttgtccttttcaaagttgaatagagagagtatttcaagcaataacccctacttgtatgaccaactccaaagtacagggaaggaaagggaaagggtctgtactcctcaaccgtgataagtctcctccagggacctggcaggagtggagacatgcacacacaaaagattttaggactaagattgttctgataggttctcaaatctgtactcaacagtttgcaaagcagtttaccttcaagaaaccgtactgtgaagaaactgaaggaatctgcctttatgtgacagagccaggggctagagtccaaatctttagtcttgataatgccagtgaggctaagtcttccctgagagggttttctctctggcgttgggcgtacccagtctccacttgcaaaaggagcaggcccttagtctctgtctttttctcagccttcctctgccctcttgtccccctcctcactcattcatactcaattgctagggacttatttcaa

SEQ ID NO: 809 - DNA, 2472 bp, Homo Sapiens
aggagtagaaaaataatcatcagccagatggaagaaattattagttcacaaatgcagtgtgctcagtaataaaatctttcaaaatgtggatgacataggtgcaatagaatataaagaggccttcagtggaaagcttgggaagctctgcagagatgcagtggaccttgaaggttaagaatatggagtcagacaaaactaaattttaatctctattttgtgaccttgggcaagtaacttaacctcttttggactcagattcctcatctgtaaagtggagagaatgatgcagggaagggaggggagtgggtcaccgtgcagattcatggaaataaaggatagacagtggacacggtcagtttggctgttactatcatctgccagtagcctcagttacaataagccagaggcaagattaacatctcttcctttttctttctaattcttctgctccccacattgccataactactcccattttctctatctctgtttactcaatggcggccttctatcagtcagtcacataaaagtattcttattgcagtcatttacactttagtatgaatgagtcagcacttttttgcagcaattttcattggaagccagtgggaagtgaaaggctttggccacccctcataatatatgacttaaagcctgcttgcaatagagagcccttgcagagtctctaaaagaaaaggacctgccccctgaagaacttctgagaccatagacctcatggtgcccagcttttcctggttgccatgtgtcatctctaaagacagccatgaatatctgttttggttgacttgagccatttgaatgtctaaaacccatcttaataacaaaagctctttggagggaccctaattaacttctttaaattgctttctctaaacttttggaattaatacaatctgttcccttgttattaaaaaaaaaaaacaaaaccctaggatacttcgcaaaacttcccccaagttacttggcagctaacattttgtcaaggaggcatggtggccaaccttcccctgaatgggattggtttctatatagtcattccttccggctcatgactttcttctccatttgctgcccacggacgccgaaaataacttgttttctggcaagcttgggatgagattccttatgatttaatcagatccataatgaagctctcccagctttcaggagaaaacatcctgaactgcagggctggttaagggcagggccctggtgaagaggaggagccccctgcctgagcagcacatttggagccaggagagctgcaacagggccatgccacccacccagtggggtgcccccattgtggctgagactcctggcagtgctccaaggtgtgtaccatgtaagctgtgccttcccactccctgcagcccagactaaaggcctcaaagataataggcaggacatcgcatctgtaaataccagctgcttggtccaggaagagacagtttcctacatatatatatatatatatatatatatatatatatatagagagagagagagagagagagagagagagagagagagaaggaggaggagagagaccaggacagacttgccctggctgaaaccaggattcccttgatggttccaaactgatgttaaattagaggataactccagatatgataacaagctgggggtggcaaagtaggtgggtaatcagggagcatctgagtaggtgacagagaattggataatgaagaagcaggtaaggtgatgggaagtagctggggcaagagggagtagccaggcaataaggcaaagtagctggagaatgggagagtaacttgatgatgaaggccaggcacaaagtgggagttactgcagtggggcaacagaagacagccccagacctggggtagaggctaccctgacctgttccagttgccttcattttgccacttccttaggtcttgctgctgagaagtaaactcagcctaagtctgtaccagttagctggaatctgggctgttgtaaactgttgtggtgaagctccctgggagtgaggctgaggttgtagcagtagcaggtaggtgtggtgagtttatttccttgagggaggggctctctcttctctcagcccctcaaaggatgggtgaggttgcctgccagaggtcctggcacaactcacatctgagcccccaatttccccatcatcaccttcatccttctctcaaccagatttttattggataacttaagcaccaggcattgtgctaaaaatctttctatgcatcaactcattgcatcctctcaacaactctataaaataggaaccgttagtaaccccatcttacaggtggataaactgaggcttaaaaagtctaacaacttgcccacataagaggcgtagccaggactgtctgacttcagaatctgtcctctaagccttatgccacagtcatggttacttctacatggagcatttctccttcaaaagct

SEQ ID NO: 810 - DNA, 2397 bp, Homo Sapiens
tattcattcatccattcatccattcattcaaactttgtagagtgctttttttttggcggggtgggtgctaaatactggcaagttattagatgattccaaagctcatgttcttcacctggaaaacggaaatcataaatccaaaggaatgatgtcacacagattgaatgagatttacgtgtgaaaaggccagcaaacaagagccggaacgtaagcctactggcagggcagaaacacccctgactttgttttacgtccttggcactggtattgtcgctggcacatgctagacagtgccactccagtgaataaaacaataaattcagtcccgtgttgcagatagggaaacagaggcccagagaaaatggcctgggcggggggggggggggtggggtggtctggcagcttcatccagggccctatttattttctccccaccctgaagtcatgtatttgaaaagattgggaagattctccacttcatcagtggctcatgtgcttgatatgttttctcaagagatgatgatggtttctgtgggagttacagctgttttcagtgcagttacaagcaagagggaagagggcaaagaccctggaaaaagcaggacaaagccttgcaaacatggatatcatgcgtgcattggctgggggggcccttcttccgagggccttttcctggccagtagaatgttcagaagaggggtctgggtgggcataggcaaataatttattttccaaaagccaaactctctagctgtagacagcatcaactttgagccatttccagacatggaaaaacattgaggctttgagagttaacagacttggggctccaatccttggctcccatttctgagctacttgaccttgagcaagtgatgaatgaaaatactctgaccccgaggacctcatcagaaaatggggatgagaatacccacatgcaaaatgggacagtgcaagtccagggcccgacatggtgcccaacactcagtgaatgttagttttcttttctttttccctgtctctgtgataaacgctctattaggccagcacgcctgacaaagccttatctgaaaatatgttcgagatccgtgctcctgccgggtttcagggatcagccggcaatccatttcatggataacatcatcctttaccaggggaaacattaaaaattaacccagaggacttcatatttttctgctaggagcaaagctgctatggttaccagataatgcactgactgggctggaatacagataaggacgacttttttttgtttttaatatcagaaaggcaaaggccccagtgatggctcacaggagaaatgccctgtggacaaagagaatacaatcagcatcagagcttggcagaaggcatttgactccaggcagtatctaacctattaagtagaggccaggagcttatttgatctttgcctggatgaggaaggcagggagggggtgttgggagaagtgggagacaaagctaggaggaaattggaagtatgggcgcacccctaggctccatttctcatcacactcacacacataatgcacacctacatgcacacatacacatacatgcgctcattgactttagaaggctctaagctataagctaatgccaaaggtcttctctccacctctagctacttgctatgaccaagccaagactccctgattctgaacccagagctagggtttttacagaggatatgggcactctgtggacagaggccagggcaggcccctagagagctgggataggcattgaccttccatcatcaccctcctgcctctaacacccagacccttgggagaaacttcaagaggattagaggtcagagaagttgttggccttgaccccaggagaaagcatcccatgtttctgtctattctgagtgagataggagggccacatgggctagatggatgtgaactcagatgggctggggaggggaagctggaagggctcattatatcaggcaatggtgttcttggttttgagcctcaggaggtgagatgtttgcctcttattggatccaccaaattgcagggaggctcaagaaatgaattccagagtgtgacccaggagctctgtgtgtgggctgtgccactagctccctgggtgaccttgagcaagtctctttctctgtctggcctctgttttctctgctgaaaagtgcatggctggtagtagatggtccatagttccttcctactgcaaacacctgtacaccttggaggggaagtgatgataatcagaagtatccgaaaaacgcaggggagaagcttaggctcgctggaccaggaacatgaccctaatcccaaaccagggtagggtgaagccccttcctggacctgatgacaagaaagtggggggcagtggccctcacaggac

SEQ ID NO: 811 - DNA, 2466 bp, Homo Sapiens
tctagatgccagtagttccccctactcccaggcatgtcaataaaaatgtctctagacattgcaaaatggttttctttttgggtaggcagaattgcccctactactggcatagttaggtaaatgtaacagtttaacatttagcagatactaccatgtgcttagtattttaaacatagctccgattttcacaacactaacaaggtagtgattatttcttttgttttataggtgaggaattcagggcccagaaaggttaatcctaaactcgtaaaacaggtaaagggaacaggtgggatttgagcctagctcttcagcctgctgagagcatgctctcctcctcacccaacttggctgcctttctttaatagcaaatgatcggttaaagcctcgtaaatgtctaacaatagggaactggttcagtaaattatagtgcatcccctggatggaatattatgcagccattaaaatgatggagggccattaaaaatgaaaaccatgtaacgacatggaaaaatgctaactggattacattaagttaaaaaaactagaaaataaaaatgtgtctacattgtgattacaacgatgaagaagtatatctatgtgcggatggctcatgtgttggattgaggatattaaggataattttcctttcttctttgatatccattattgttatcagagtgtcttcatgatcctaatttctaagtagtagcagagtaatgataagattcaagatgttaggtttgccctaggcccttcttccacctgaattagaatgaagacttctctaaactctgactatagcaaggggttgatttacccttactttccctcctattagcactgttgcatgtatgtttgtgaccccaggcccctctccttgcactgaccagcttctcccaagcacagaaagctggaagcatagaagaaaacaactctgaaggcattggtgtgaatcactctgggagccagggctattaggaacatacagtcttagagtagcagatggcatctgtctgtcacagggtactgagcggtgcactgtctcatgcattatgcatcaagagtggcctagcaccctggcccggctgtgtgggacaagtcttgcaaaagaaacatctgatgaactgatcgggatgtcaaaatgtcattaaggataaattaatggatgtgttactttggctgtaagaggcagtgccagcaagacaacagacagccggtgggctgttctccagcccaagacagacggcgtttgcaatggagattcatggtctttatgcaacgtgaggtgctttgcagggagaagaataaacagaaatgctccagcacttaagcgccataaaatcacaagcatgagattaattaattagtgtacactaggaaggcggctggtctgtctgcgctcctggggaaagctagaatggatggcactgggttagagatgacgggtccctgcaccagcctcctaaagaaaagcaattgaatttaatgtgcaatcataaactgccgctgatggaaagataagtctggtcggtgtttgttttttcagggatactatttctgcctactgcttcaaacactttgtgtctgtgggtcaagtatctgagaggactggggagacctggaaactagttctgcttataacgccatgtgggctatgaagggtgttataatctcaacacatagagcaactctcagggaagcctgactccccctgcgcctttctagatagggggttgtccattcttctgtgataggaggctcaccacttccctttcaacctgacccagtgttagataagcattgttagagagttcttccttagacttccctagcctcttcctccttataacttaacaacaacaaagacaagaaggagaatagctaatgcttactgagtgcttgctgggtgccaggcactgggctctggtcaagttacaatgttatcatgtattatctccattttgcagtgtaggaaaaagaagaccagagggtgtgaaagacatgctgaagatcgcacagctagtatatggtagggccaagatccaaacccggggctgcctgaggccagggcttgacagcttaactatcacatggttctaagtcctgtaactaccattaattggatggagcctggcttttagagcaatacagaatatgacaaggcaagacagatgagaactcacatgtagcacatattgggcactgctaagcacctggcctgggtcagcctaacacatcgttcatgcagtagccttttttgagtaacgaaattatttccccatctgagatatctattttcttatctttttaaaaaagttatatatatatatatttttcaacatataaaaatcggtttcacttctgtgtatttataatgaacaattagaatctgaattttcataaatagtacaatttacagtagcacccaaaaaagaaacattcagatataaatccaccaaaata

SEQ ID NO: 812 - DNA, 2496 bp, Homo Sapiens
taatcatcatggaatctcagaatcactggaggagcaggatcccccaaaacccatctctgtgatcgctattggatgccaaaatcctccgcacatcttcatctagtggtcacccagcctctgatagcctccaggcttgaaactctactctgaaatattaagaagggaagctgtgttcaccactcagacacccactcctatttcacctccctgaagaaaccttccctgtctgccctctcagtcactctctaataccttgtctgactttgccttcttaatagatgtgttaggtgctgacccaggcatggaggttctgactgtgatgtcatgtagcttacttattgccatttagactgagctggcgagctcatttatctaatctgttaaaaccagatttggtggaaagtgaggacctcaatatttccacatttgctgacaaccttaaactctcatcgaagagtgggaagttgttgcttggaatcacattaagattaataatgacaatagagataatgacaactgcaaatatagcaactctcccactcacaatggcagtcccgattgcacaaagaatccagtaccaggaagggacacattttaagctatcttggaactgtttcctaatctgtgggataaagatagatcaaacaccactttgcattttttaaaccttgaataaataggtaaatagcccctttgttaagtaggagaaaatattgggaggagacgagtttaggcttctcaatatgtttccatctcattggccagcaggtctatggttcagagagaggttgaagctggagacagggatttcagaattatctgtagagtctcttggttgaggccttgggaattaatgaaattgcagtaccagagagtaccggaggagaagggaagtggggagctgtcctagagaacaagctagaatagaaacagtcaagacagccaaagcaggagtatccggagaccaacgtgaagggaaagaagtgagagacatgtggaagaggtggcaactcctgccaaaggggattaagaacaaggagttctaagaactttctgcagggctgttggttggagacgctgcctccatgcaaatctcatttgccgctgtcaatccagatcctgtcccaccacgaccatttctgagaaacagactcaagacatgaaaaaaaaccctctttctgtaaaattggttcgtgaaacagactacaggcattaatatcctttatgagtgacaatttagggccaatatttacactttgtaatgttcgttctctttctctcgggacagaaaagaatgttgccaatatcaatgaataaacattaataaaatcaaatataatcttgttccatctggaatcaacctttaaaaaaattcttaacatctgtatataatatacatacacctctatgtacaatagggaaatcagattttgcctgagagatgtgcacagtatttaatgccaatttatttggttccaccttttctccagactgctttagaagggtagcgtccctagaattgagattctgaattagtttcctctgactctcaggtacagaatgtccagctcaagccaagacatatcaaatatttatccactcccagattttcaaaaatccagctttctgtctcctcctgcagctgacctcctctggcagaaattcagcctcaaactgggagaaatgagtggatcaccagaatcaaagctgacgtcagtggtactgtgggttggtgtatgacgtgggaaccctgacaaacagaaatgaatgtttataaatgttagatctcaggtctgcaaggaaagatcttgctgtacttcacaaatggacttgctttttaatatgtctcctgtttcaggacaagtaatgttggtcagaactctgggggtgaacctaggggctcgtaccacttggggctgcgttgtcactcctgtcctcagcatcgcagaggccaaactgtacccagatgagaccccagggaaagagaaaagaatcttgggcacgggggtcattattcaaagaacctggtgtagtgcgtgggagatactgcatgcacctctaactcagacatatcattaattcacaccatccctcttgtgcctactaaaccaggatttctcagcctcaccaccattgacattttgggccagaaaattcttttcttgtggaactgctcagtgcactgtaggatgtttagaagcatccctggcctctacccagaagatgccagtagtactgtcccggttgtgacaagcagaaatgggtccagatacggtcaaatgtcctctggtgagagggtagcaaaatggcccctggttaagaactactgcagtgaattattcaagggaccatgagtgaagttttgaataatccacacctgagctaagtggtgccagagagatacttgcaggacctcagctttgttagtctgacatctctcctataagcccaccgactggagaccccaagcatgctgcagcccctacctaacagatc

SEQ ID NO: 813 - DNA, 2474 bp, Homo Sapiens
tttggaattggatgctattaatacaaagagaaaaatgcaaaatggcaagcagtaagtatacttcagagtgataatgaaacaagggtcctcatctttgcagcattggtcagcctgccctcattctcacctcttccaacctctcctctatagggatccttccaaaccccaaatctgaccaagcttgccctatttggacccatcccaggctccctgttgctctgagaacagaatctaatctttaatctggccctcaggctctttctggaccagactcccccatctgtctggcctctttcctgccttgcacccaacagccttgcacaacttttcaattcctccagcctggccaagctaattcatacctcagggcctttgcacaggccaaaccttcagccaagaatgtcttctgctcccctagatctttatcctgccacctaccaacccaatttatttgcctgctcagaaaggcctttatttatcctccctagttccctgcaaataggatcaatttggtctcccacagagcacaagccttcacttcactgtattgcaatttttaaatatatttacatgtttgtgggccacctcactcttccctgaaccctttgataacaaggactggaatctaactatgtttttccagtcccgagcatggtgccgggcacaaagtaggcatacagtgagtgtttcctggtctattgattgattgattgactaaactcacctcccccaaacccttcaatgtgagaatacattttcttcaaagtttttagccattataaatgacagacaagatgtctctttgaatttccaaacgcttatctcaaagcttttagttttgtctaccagctcatgccaccaaccggatgagcctcagcaaggttcctgtcaaagcatccctctttttgttgatttactttaaaatgcaactcagtggcttcaagtcagaagaagaagaggccacgtcttcagcctctccttaagcatctatcaccagccagctgagaagatgtgactgtcatcctcccaacccgacaagatgatttttctcaaccataatacaagcccagtgagccatacaatcatggtgaatcccctatcagctcaacatcctatgcaatttttcagagaatatgattctatctgaaaatacatgcaacagtctggaactcatttttccccagtgcctaactttcagattcctataaataccagatggccttccaggcagtgacacacgttggaattatcgaacaagcatcgcttatgactttgccttgggcagtgtcaaaaggtactgagaatttacccatctcattacggcgttgctaacagggtctcaggcagtttgctgggcctggaggtgtgtcaaattgcagtgccatgaatgcctcaaacgagagacagagaaagagaaagagaaggaatatgtgaatgtgtgtctgtagctgagggaaacaacaagagtaaagggaattaaactcttttaataaaggaaaatagttttcaaacaaagaaaaagaagtctaatggttagctactgctgcataacaaaatttccctaaaactgagcagtttaaaacagtatacatttattatctcacattttctgtgggtcaggaatccaggcagagctcagctgggtcctctctgtcagcatctcacaaggctgtaatcaagatgtaggccagggtgtggtcccatctgaaggcatcactggggaataatatgcttctaagctcactctcagggttgttggcaggactcagtttctcaggggttgttggacagagatattagctctgaactattgaccagaggcatccttcagtcccttgccttgtgagtgtcgctatagagtgtctcacaacacaccagcttgcttcatcagcaagtaaatgagagggtaagagaaagcaccagcaaagagagaatgctagcaagatgaaagccatagccaagcatggtggctcacatctgtaatcccagcactttgggagaccaaggcaagtggatcacctgaggttaggagtttaagaccagcctggccaacatggtggaaccacgtctctattaaaaatataaaaaaagaaaaaaaaatctgggcatagtggcggtgcctgtaatcccagctattcaggaggctgaggcaagagaatcacttgaacccaggaggtggaggttgcagtgagccaagattgcaccactgcactccagcctgggcaacagagcaagacttcatctcaaaaaaaaaaaaaaaagccacaaccttttgcaacctaatcttggaagggcgtctcattgcttttgccataatttttttttttttttttttttttttttttttgcccaagctggagtgcagtggcatgatcatagctcactgtaacctcatattcctgggcacaagcaatcctcctaccttagcctcctgagaagctgggactacaggcacgcaccagcacacccggcta

SEQ ID NO: 814 - DNA, 2460 bp, Homo Sapiens
ccttgggggatttatgttttatagaaagcactcagcacaatgcctggcatattgtaagctttaagtaaatagaagctgctattattattaattattttttgagatggagtctcggtctgtctcccaggctggagtgcagtggtgcaatctcggcccactgcaacctccacctcctgggttcaagcaattctcctgcctcagcctcccaagtagttggaattacaggtgcccaccaccacacccggctaattttcgtacttttagtagagatggggtttcaccatgttggccaggctgctcttgaactcctgacctcaggtgatccgcctgcctcggcctcccaaagtgctaggattacaggcgtgaaccaccgtgcccagccaggagctgctattattaatagttaccattgtcacagctatctggtaaactaagtatgattgtcaccattttgtagatgacaaaaccaaggtaacaagatgggagtgacctgtccaggcccacccaactgggaaccatgcgactagaagcatttcttctccatcatgcattcctgtttttccaactgggcatgcaagcccattcattcatccattcggtaaacacacatgcctactgtgtgcctggcctgtgtgtgctgcaggtatagactgggccctgccctcatggaaggtacagtttcccagggaagagcgatcttcactgaatactcacacagacccatctaaaaatcataacacgtgctctgtggcatgaagggaaaagcagggtgctgtgagacgtgacttggcctggggtgacccagatggggaagcttctggcgagtctggttaaccctttgctgtcctggacatctagctattacccctccagatcagcttagggctggatgactcttgagagtgtggctgggtgccccccttggcactcccgcctcccagtgttggttttccaagtctcccctagaccccccccccacccagtctctttgaagactgtccctttacaactgccctttccaccgaaggattcagacacaaattgtactttaaattcaatatcagtcattaatatttcatgattacaaaacgttaaagataatgtcagtggaaggagcgtctgcatgggcagaatggatgactcagaagttcggggagaggggagccggcatactaagtggctcgggagtctttgaggtaatccagtatgacaggcggtggctcctggctgagtgcaacattctccgaggtgctcaccaagcgccgccgctgtgtataaatatttcccctctgattcttgtcacctcatgtttattatgaccaggagcaggtggggccaccatgaccctctgagtttcccttctgtttttgaggaagccaaatggacgctttggcaggagggcatggggctgggtgggcagacccgatggccatgcacctggggctctggctggctcctgggaagccggaggtcttgggtcaagcctgcccctgccaggacttgctctgtgatcttggggccatccctgttcttccctgagcctctgtttcctcatctgtaaaatggggataataagtttgttcccatctcatggagatggtgaaaaggaagagtgggtcagttatttgtggcagctttttttttttgagacagagtcttgcctgttgcccaggctggagcgcaggggcatgatcttggctcattgcaacctctgcctttgggttcaagcgattctcgtgccttagcctccccagcagctgggagtatatgcacacgccaccatgcccagttaatttttgtatttttagtagacatggggtttcgccatgttggccaggctggtctcgaactcttgaactcaagtgatctgacccctttggcctcccaaagtactgggattacaggcgtgagccactgtgcctggcctgtgagagctcttgattttgtgccagcaccagggaaacaggactggaggggcagctgaggagagccgggctctggagtcaggcaggctggggttgggaacctggacaaatgacttcgccttgctgagtcaggttcctcatccccacagtgaagatggcagtagaatggacaccccttaggggtgaagatttcatgagctcatcacaagaaagggcccggaacagagtcaagacctacagataccatcaactgagcacttactaagcaccaaccactaggctaagttcttcccatgagctatgctgtttgatcctcccaccagctctctgaagcaaaaccattccttttcccattaattaatatcctgggtgaggagtgggcaggggctggggatcacagctcagagaaggggggtctcgagcccagtggctagtcttctcctttcagagatacatctccttccccacagtcagttactggggttgatggatgggatgggggtggggctcagacagcagagagtgcccagaaaag

SEQ ID NO: 815 - DNA, 2410 bp, Homo Sapiens
tttttatggtataaagctatttaaaaaaaaaaaaagaacagaggggagtcagagggaggggacaaggggtggagggtggagttgttagagcttcatggggcataggagataaatggatatgtactggctggaaaggatagaagctgtgattttcttagtcacctaactggggaaatcccagaacaggaggcctctgagttcctactagctgacaagtgataaaagctgagagtaataatgacaagtgctaacactgattaagtgccaggcacatgccaggcaactatacagagcatgttacaggtatgaacccatctgctcctccaagaagccctttgaagtggtattgggagataattctccatgggtctctccaaggtctgcatgtcttcagctcaaaagacactgagacctttgttctagactatcatctcaaggacatctgtgtagcaaacacacttggaggacagagacaatatctctctctggagcagaaagaagaggatagagttgtttcccaaccagtacaataatgtctctatctgaggcaaaggctagacaggtttggcaatagcccctttataagattgcaggtttcctaagctctgggatcctccattgagacacagatctgctgctgtgtgtgcagaatccatttgggttgttttcattgctctcatggaacttgggagacaattagaactgacgcaaatatgaagcttgtgctgcttgctatactgtgactaataaagtcctttgtctctgacctgggatctcgtgtcttctgccgtcatgtatggcattgtggcaggctaactcattagcttgtgagcagtgcaaaatctcggacccttcgtagttcttccgtcatactcacatcacccctgttttacagatgaggactttgaggcccagagaattgaagcttcttgttcaagatcacacagctaacaagtaacaaagctaggactgttacccagaccgattgggaaaggaaggagagatgagtaggggattggagaagagaaccgctggaaatgacaggagctgaaggccccaaaggtacacagaaggtcatgcctctcagcttcccaaacccacacacccccagatgctgcctgtccctacatccggctgctggggctgagcagccaatttgggacgaccgtgatatatttaacggtgagtcatgctctcccccagcaatcagcagtggcaggctcgggaggatgcagggagcatctctggaaatccgtgcctgagggtcgccatgacaacgccatctgagtcgcttgccagcagctgggatgccagtgcctgaaccaaggcacaaaatagtctcacaggctgagtgcggccgaggacaggagcaggccccctgcacggcatccccaatgggtttgccagggattgatgggagggatgtgaggacttggtgacaagggagattcatgggctcactgtccaggtcacagtactctatggaagcctggggtccctggctggtgggaatgagcacacttggcgtgatgggtattttggtgagcaccatctcttcctgccttggttcttcttggtttgtctgtctcatagttgctctcccagaggccctgcccaatttgaggcttctatccaagtgtcacaacctctgaagactgacagcaacttgggaaggtaaccaagatcatcttccaggataattctgaagacttcagaacctagggcgaatcagccacacccacacactaacaccaaatacgaatatcccatgaaagcagcttggaatccattcattcattcataaatccattcatcaccttgtcctctcagttgttcattttaattagaacctgggtcctacaggccctatgtagaagtggatttggttatcccgtcctcatcccctttcactccccctctcttattctactctagctcactagtcttactgctgttcctcaaacatacagttgcttttctgcctcagagcctttgcacttgctcctccatctgcctggaaagctcttcccccagaagggaagctctccctttaggtttctgctcatatgtcaccttctcagagacacactaccaagaccaccctaggagaaagcacctaattcagcctcagtgataaggccaaatatatatatatatatatattatgtataatatgacatatatctgtgacttagtttcccccatccgtacgaagcaaagagagacaagctgaaaattggtggcctgtaagttgaatctaactcacagacctgttttgtttggtttacatagtgtttcaagaactgagcaagttgctaacagttataaagttgagagattttgttttagaatgcaaattttcaatttatctcgaaaaactaaggttgggtgtggtggctcatgcctgtaa

SEQ ID NO: 816 - DNA, 2489 bp, Homo Sapiens
aaatggctaccaaactgcccaacccaaatggccggttcatggacacgttttgtttggtccatgtttgtttaattcttaaaaaaaaattattatttgcattctttgccaacaataaaaataattgggacagtgtgccttaatccaaatttcccacttctcttcggtaatcagaaggtttgacagcattgtgcccatttttctgcatggcagctatttacaggagttgggcagtggctgctccttttgtcaggatacaagtgccccatttcatcccagtgccctcctggctatatcactcttgtacagggctgcctggccccagcccagctgatgggacacaggcgtgagtagtgaggccatgcagggaccacaagcaggacactctccctctctcttggaaggaagcaccttggttaccatagcaacatgctgctgtttgtaacacatcttccacctgaaaaggagaggagatgacaagtacatctctcttctcagcccaggcaacatcagctcctggcaccccccaaaacctaagagcgagaagggggagtgtgatctgtcttctccaatctgggccccaaatgcagatgccccaaacacccccatttgttcaaccaacccagagatgaggcgttgggaggggttgatttagattccatcttatataaaaagaccagaacatttttgattagtgatggaggaaggtgtgggagtctgagacagtgctttgtttctgggcaaatgtacacattccctgatgcctctcttctctccacgtcctctaaagtagaagcatagactccctctccttactactcctcacagccaaattcccctcagccaggaccccagacctttcccaatacccaggagcccctagggcagcaggcctgtttctaggctacctacagaacctgaaggaaataagggaatgaaataagagaatcagccagaaataaggcagggcaccgtgcggtattttcctttgaaactaagaggctgagagctggaacagcagcagaaatcagaagaaatctcattgagaaaagaggcacagagaggagtgccaattagcacccaggtcccctcctgggagtgtcaatccataaatattaataaccgtaatcatccagtattagttataatgccttgtaaattaaggtcattttccgtggagtaaatagctgcgttaatggcagcaaaaggtaacggcgttgctggctgcatgccagttgatgcctgccaggatgacagtataaatcaggaaggacacgtccaatctgtgaagacaggcagtggcatgggggcaggtggagtgacggggcagagtgtggccgcagacacacatcccacgcaaggcccttgggccgatctgatctaacagggacctgctttagacaggtgatgtctggggcagatgaagctcccagggtcactaggtgtaggtaggaggggagagaaggggccgggtgggtagggagagggtgtctcagagggaggtggcaccaagacttcagacacttgggttaagagcagagggccacgctttgagctgctgcctgtggcatttcactgcagaccttggcgcctttgctaagcgacacagacattctcttcttcctctacctcctttccctcctctccatcttccttctcttcctctcctctcctcctgccagggctgacttctccattaggcccaatagacacagcctggggttcacactacctctagggccccttctccaatgttttaatttcttttataattagaagaaaaaaagaactttcagcaggaagaaaatgttgtaatactgtatgtgatattaatatattcatctttataccaatgtagccataatatagcatgtttgtttttttttcatggagagaggcctaagtgcccgggggccacaaaattcatcacatggccctactttctgctccccacccctcctcccactaaccacggggccctaagcaattagcattgccttatggagtctcggtttcatcctttgcaaatgggctaataatggtgatgccttcccaagcaggatgaagtaaaataatattagaaaaagctttggccacaaagtggtgtttgcctccttttcaggaggctctgggatcctgggagttaggcgggtgatgtatttgaaaatctcagtggatggagtccctggtaatgctccctatgggctccccaagctaaatgcaccgtcagacccttctctcgggtctgacccatcatcttcctgggctccctggtttctctaaagagcaaatgcttttcttgaccctctgagaaaactcacaaggcacttgagtatactagatggatcaaataatgcctttaaattccaacggaaagaaagcagccattatgacgggctccagcaaggggagggagttgggggcctccttgttcctttactgctgggactggacacactggggtttgcaatacccagtgcagatgaaaatgt

SEQ ID NO: 817 - DNA, 2494 bp, Homo Sapiens
gcagcctgtttctcagccaaatgggtcggagctggatatgggaaaggtgcaaccaacaccttgctgtgggggccaggtgtgaaggggcccacccggccacaccctctcccgggtccgccccctccctagccagacaggatgttgtcagaccccccgcctggctctgaatccttctttgagaactttctcaaaacttaggctgatgtttctcttctgtgagcctcattttctctatctttcagatgggcatgagaacagcttttggggtttctatacaggctaaatgcaggaatgcatatgggaagcacctggcaaagtgccggtacctgctaaactctcacaaaaatggttccttggcatttgctctgcttccttgctgtgtgactttgggcaagcaacttaacctctctgagccttaggggaaaactatgatagcatatgttttagagagtggctgtaaaggtggctaatcactttatagtaatttattatacccgaacggttctcaggtcggcttccccacccccactgaatcctagcacacagaccaggaaacggcatctttggggcagaaaacacaatcacgtcttttgaaaatttactaaatgtgtaaaaaactttctggacatggagaaaaggtagaactttttagaacttgaatggtggcagccactgtgcctggagctgctctttggagagtgacagttgagggagaagattccacagggttcaagctggccaggttctgccatttcctggcctggcgcctgacctctgagcggtgagggttagtgaggtgtctgggaggactggcaattcgcgggctttattggcatcttattcgactaaggctacccatttctcttccttcgtgcaccaattgctctgattttaacatgtaaaggtccaactgcctggcctcctgggtgcctgcccagctcacagggctctattttgggacagttgaacccctcagggtgctgcagtcctgcctgcctctctcacctcccatctggacattattttaatgtaaaggcatggctgagacacagaaatccccttgaaatgtatcattgcggtcctcattgactcccattgtgtgccttaatggtgggcccagtgggtgggggctgggaggggtggagcaggtgcatggggcagcggtgcccagcacctgttccagtcacagctgctggcccactgcatggcaggcccctttaatccggggatatcgcatgtacagtgcccccctcggcgccctttgtccccgccggcctggtgccgatttcacacttgccaggagtaccatgaaggcgtctggggggcgagggatccaaggagtgggggtctgtgcctcctgcgtgtgcacacagcccccgcccccagcccatcatgtcctagaatgtctccttccccttttgtttgggttcaggtctcatcacactttgggcacttactgtacaggagggtagtgctcaggacttcaccaacagccctgggaagggaagggaggtgctgtcctaactctggtcttacaaatggactccagccccttttccagatctccagagtcagcccttagttcacaagggtgaacttacccttctcattcacatgaagacttagaatgcaatcaacaaacccttcaggcgtggcgtgtggaggctgctgagtaatggcagagtggagtagtgctcaggcacccctcccccaatcctctatgtcccccaccctttggagtggcgagtttccatttctgccccatgagactgagtccagctctcaggcgctccataagtccctattgaatgcatgggtcccattggagccatcctctggactctctcctaccctggtagctcagtgtggcaccctaggcacccaggaggtgatggaatgaattcactctcagctcttaaattccatccagcgctgggatttcacaggcgggccctgaccttgcgggcatatcagactgggcgtgaggggattggagaattgcatgttttttaaaaagactattcagtattatggaatagtgtctagcacttagtaggagctcagtagattaaaaaaaaaattatagacagggtcttgctttatcgcctaggcttgtctcaaactcctggcttcaagcaatcctgcctcactcggcctcccagagtgatgggattacaagcgtgagccaccacacccagcctcaatagatttttgtttaatgggttactgttatgaccttttatttggaaaatgctgcatcccccagaaaaaaacaaatcaacattattggtgtttttggaactatatagctttttggttggagcagggattgttatgaggcatgagtgagggggcagactcctctgaggcctctttaatttttaaaacagacttatttattctctaagggcttgttgaggatttactgggcacccagctccatgtgcaagacttttcccaacacagccttggccaggcagatggtgtgtcaggg

SEQ ID NO: 818 - DNA, 2472 bp, Homo Sapiens
attaaaggcatgagccacaacacccagcctatgatggattctgagttaatttatgtttgatgtgcgtgaagggtcaatgttcttctgttttttaaattttttccgtatggttatccaattgttggtgcaccatttgttcaaaagagttcctttccctgtgaaattacctcggcggttttgtcgggtatcaatcagccgtctgtgtgtggccctgcctcctgtcaccctgctctgacgccttccttctgtcgacaccaccctgtcttgattcctgtgcgtttcaagtgaatcttgaaatctggtagcgtcagccattcgactttactccttccaaaattgctttggctcttctaggtcatttgcattttcctatgaattttagaatccacttgtcatgtaaaaaaaaaaaacctgctagaattttgactgggattgtcaaaatcactctcaaaaatcactgaagttgactctgaaatgcagcatgcaagggtttgggtgtgcaacttgtacgtgagttctagtgcacaaaagaaagtgagagccagcaagccgggctagaggggataaaggagagagtggtggcgcatgtgcccaggctcccgtcggtccctgagagctttcctttccctagagtgaccacagggtgggtaggaggttccctaggatccctggagggtgtgtccctttattaataatgataaagggtgtgatgtagactccttaaccttactacatgtgaaaagagtgtttattgctgaaaggattaaataagataagacgctgagtagttgagctgcaaatgcttgtggattgaagtctaaagccagcttacatagacccacccacctgcccatttcctgccgtggcctcctgtgtcccagccaccaccatcgtcccatggcgcatggctgacgtgctgtcctgcaaagggccaggcgttaccctctagcatgtaccactctccactggcttcgttcttggggctcatgatacatattatttggttacttccaccttggagtatcacaggtcaaatcagccagtaactcgtggaactaacccacgagtggtgtttacccctggataatggcccagtggaggggctggcctgcagctcacacccaccatggttttgctgaatggtgctcgttagactttgcataatcgaatttagcccagctctatgaaggctctgcacaagctagtcccctctctccgctatttgatggaataatagatccataggagaattcatttgcaactctaagccccgagttaaagacgtctcaagggatgaacgtgggtgatttgtggaacactgcgatgcatttatgagatagattgcacgttcaccgcggcgctcaaagaaaccagatcgggttgcattagaggcggtgctgtaatccggctgtcctctgggaaagaatgcaagcttccagtgtgcgaagtatgaggggctgcagaggaaattgctttggtggctctggtcctgggagcaagtacctgcttctcgttcatttaagcacattagcgagcttcataaacacttaagtggctcacgagatgcttcacttccaggcctcgccccacctcctccgctgtcacacagaggccaccagaaaccacggtcttctgggtttgacagccaggcagacaggaccaggccaggctgcagctgctaacccctgcgctggcaacttccagaccccctgcacaatgtcaccgtccagtcattcctccctgggctgcctgccttcatggggcccctgcaattaaaaaaaacaacaacttattctcactcctttcttttaatatgtcttattaataactgtgtaaatttgtttactttttaggactccatcatgatgtaaagtagataaaacaaccaatttgtctttctttttcttggtacatgggtgtcctgcagccttcattccttccaacccccgcttcacgttcacgagtatgaagttgaattaactcatgctttgctgaagccggattgtgagattgtgtaggcagacgtggcttttcttctgagcctgcaaagcagcagaattcatgacaatgggttccgtagtaacagggactgactgcgccatgctgtctctgtccatccttacagcgctcaggagtttgcatgccattactgggaccattttacagaaaacagaggctcccaggggcaacgtaacctgccccaggacaggcagccacaaggcagagaaaggagggttggacctgcacctgtgaaaccacagccctggggcatggcttctgagactcatagctggggctgaagatccctaggggggctctgctgggctcactgctctccagagtggtccagcccggctgcagggtgctgcttccagcttggtgcactgcggccggaggaggtggaggatggaaagtaagattcaaagacagggagtgcaaggggacagtgatacttgaggactccgaggagga

SEQ ID NO: 819 - DNA, 2474 bp, Homo Sapiens
ggatttgatcagtctttgctaaattgagcacataagcgaggatgtatttaaaggagtgttagtgcactttttataaatcccaaacgcagggcaagctggctcatgccactgttgaaaagcagtgtgtgtccgaggaagggccgcatcacaccgggtgtggatggaaccatgcctccctgacgtgcagaccctccgaatactccacttgcagaacctgtttttaaacaaacatcattattatcaggtcagtgaaacatccccatatcgcttatgctcatcatctgctgtgcaaatatttgtggctttaaaagaataacagatcgtgagaactccagtaaaatgattgcagaactaaccacccttttaagtagaagtgacatttctaacaggcccactcagacggttccagccttcgctttggggttctacattaaactccacttaggctgcctgcagtgaggggcagaaggctgcgttacagagactcaaaggcaaaacgtggggtgcttgcctgcacccagtggagcctcatccacgatcagtgacttccagagacaggcaagggtgtcaggaggctcccgggatgcactgaagcagctccttttaggaaacaagcggcaaagaagaattttaaccctctttatgctgataaaaaaatacacacgtgtgggaatgcatgtcttgggtttgagcactgatcctttttctgcagtcccccggccttggcactgttggcctcaggggctgaatcaccccatggtgggggctgccttgtgcattgaaggttgtttaacagtgtccctggccgccaccctttagatgacccctaggtgcaccccttcttccttcctccacccccaggtatgtgaatcacaatgtctttagacgttgccagtgtgtcttggagaccaaagcaacccctgattgagaaccgctgcctaggaagacacacttttcatttgtttgttgttttttaatgtaatctatagttgagagacaccctgccccacctaggtgtgaagcacctcgctttacctggaaggctgggcatatttaaataccactcccctgcacgcttatttgtcgcagagtggttaatgctctttaattggtgcagtaaatattccagagtcttccttgttatgccggagtcatttagaaatcagccctgaaatgtggctgctattttagggatcatcacacatcatctgctgtttggtgttaaaccctgagccgctgttatttaacactgattaataaatggcaggttgtcagtaccggcagtgaagacacttcaaggagccattgttcttttaaattaaaacatttaaacatttaaatccagggctggttctcatggctcgttttaattattccttttgtcttggcatacctttcttctcctgatcacacagctgtcacgccagcagtacctggagtcggaacacgacagccctttccctattagctgccattattttcgcaaggaaagctggaagctgctggagcagatgttaattttgagagaagactgctggctaagttattaaaatgagcgcatccgaaggctgcgactcatatgatttatacgcgggcagggcctgcaggaccgggtcttgcttggctctgtatgtgtgtgtgtgtgtggatctgtgtatgtgtgtctctctgtgtggtgtgtctgtgtatctgtctgtctctgtgtgtgtgattgtgtgtatctctctatgtgtctatatctctgtgtgtctgtgtatgtgtctgtgtgtgtgtatgtctgtatctctgtgtgtgtgtctttgtggatatctgtgtgtgtgtctgtgtgtgtatctgtgtgtgtgattgtgcgtatctgtatatgtgtctatatctgtgtgtgtctgtatctatgtgtgtgtatctttgtggatatctctggttgtctgtgtgtgtgtctgtgtgtgtatctgtctgtgtgattctgtgtgtgattgtgtgtatctctatatgtgtctctgtatgtctgtgtgtgtatgtctgtatctatgtgtgtgtgtctttgtggatctctctatgtgggtgtctgtgtatctgtatatggctgtgtctctctttgtgtattttgtgtgtgttcatgtgtatctatgtgtgtgtgtgtatgtgtatgtatgtgtgggtttctttgtgtatgtatttttgtgtatctgcacgtgtgtttctctgtgtgtgtctgtgtatatttttgtgtttctgcatgtgtgtgtctatgtgtgtctgtgtgtgtatttgtgtgtatctgtatatatgtgtatgtgtgtgtgggtttctttgtgtgtgtatttgtgtgtatctgcatgagtgtttctctgtgtgtgtctgtgtatatttgtgtgtttctgcgtgtgtttttgtgtatccgtatgtatgtgtatctttgtgtgtctttgtgtacatctgtgtctgtgtgtatatctgtgtgtatatgtatgtgt

SEQ ID NO: 820 - DNA, 2481 bp, Homo Sapiens
caccctgatcatgctctgttcccagcagagacaacagtctcagagaggtcaggattctcactcaaggtcacacagctcaaagtacagaactgggctttgaaccccaaaagtcagactaaagagcccaccctgcagccaccctgctgtgtgtagccgagaacctcgtgggggtcagttgtgcctgagaaagtatgtgaggaaactgaagctcccccaaaatcgtgggggtggccccatcgtccctgttttcactgtctctgagttagttgtaaagaaaggaatttctctgcagagcatcgctttgaaggaaaacttacttggggaaaaaaaaaacaactgtctccgttgggagcaatttccaaacgggagtccacgcgtgggtttttcgcttgctgcttcaagcaaatcagccattttcactgcagaatggctgcaaaggaaatggagaaaaggcagagcgcagccctgggagctgcctcccagcctgggggccgggcagggggaaacaggtgccacctgggcctagacggggcgatgcctgggaggagaggctggaggaaccgggccttcccaccacggggccctgtctgtggccaccgccgtccacagaggcttcacaggtgcatgcagcgttcctccccgtcctcctggctgctgccttttgcgggatagtcgcaggctggctctcgctggaggggcttctccgaattctgtttatcctgggtctggctctctccaacatggcagctggggaggcagaggaggcggcgtgtctaccttgtcactgccggggcctgatttaccaacaggtctggacagcgctcccctccttcccacgcccccactgctaattgcctgcctgtagagcggccagccctgtctcagcagcgcggcgagtcgcagctccgtcgttgacggtgtgtccgcgatgtgctgtggggtcccgtcgtggcggctgtggacgggctgaggtcttcctctggatgctctcagagtggcagggagcagcctgggtactctccacgctcggcacaatccgcccgggctggcagttagagaagccaggcagagaagtgcggccagagaggctgtccaacccaatttccccgggctgggttatttgaaagtctaaaactccctaataccaagagacgggcggtatttaaatttaagtctggctcccaaatgaaatcttttcgttcaactgttcaactttatttggaaatatgaaatggtaacttgattacatgttaaggtagctttggtcgggggattagagccgaaatctctgcccctctgagttcatcctccagcgaatggaatccatccaaattaggaatcagttctgctaccgcgggcgagccgcaggcctggtggcctggagggtggggcatcttgaggctgcgggattccagttactctgcatggccaggataagggggcgcccagagctctgcgttccccaagggaggttggaaggaaacgttcaactgtgtgcttcccagagccctagcaaatcactcgatgtttataaactgtcagtgaaagtcatttgtaagaaaagctccatttccagtggctctgcagcttagaaaactcaaaactgaaaaacacacgccacccaggaaggacaggagaaacgagaacaggctccatcgctgcagagcgtgaggccggcccccgctgcgtctgcttccaggaggcggtgccgagacggcggaggtaatggaagcagaaacgagtgaaacttttttgttgtgtttagcaagtatctcttgtcaaggaagttgccaaactcacaaatgttcttgccaagagagaggcgcctgctctccacacgagcttgttgttggtaaggaggcacgacagaaaacgtgtcaagctgggacccggagcaggtggtggaaacagcagtttgcaggatgtcggtcctgcctgcatggcggcctgagagccgcccgaactgctgtgctgaggacggggctggagattcgccctcaggtgaggggctggcctctgcaggttctgttttgtctctgaggcatcaccagacgggtgtcaccagccacatggtgcaggtgaggagacagaggaccgaggcgggtagaagtgacaggagaggcaaagagctgtcccctgcacagccactgtccatgctgtctgaccacccctctccgccgtccagcctctgcatctggcctcggcctcacccactgctggccaccagtcacctggaggtcagccacacccggggggcagctctgctgtctggacctctgagccacaccgaaagcactcagtcccccttcctcctgaagcctccaggtcctgccctctccttaccatatgggttcccctctgagcatccctcctgtctcctctgtggacctgcccagctctcgcctggtgggtgtgtcaggtttctgctgcctcagtgtggggatcctccaggggagggagtggccgtagcctcagaagtgc

SEQ ID NO: 821 - DNA, 2425 bp, Homo Sapiens
gctaccaagaagaagaagaggggcccagaggcatgcagaacccagctgaaaaagaacaacccacttatgtctgaagttctaaaccagctttaactactcttgttaagagctgaggaagggacttaggagaaaggggaccaaactcattcctcctctccttacgaatttcagtataacttgttctaagctaacttttattgaatgttgtgggctgactgctattctaagtcatttgcttctctcaaacaccctaagaagtgctttgacccattttacagatgaagaaactgagacccaaagaggttaagtaactttccaagtggcgaacacaggtggcagagaagattgaagattcaaactctggctgtcagcctccaaaacctgaatttaccactgatctccatggcattggtttggattagattacctttaacatcttttccaactctgagattctaggattctctgatgtcaggacattataaacctattataactctcctaaatttgtcaaaccaattctagatctctatgattacagacatgatacttttagaatcaatatttaaatcaaggtaggattattacacagaaaacacaactgagtagaatctacctttgccatgttgttcttttcagaattgaccctaaaacacagcgctatgtttgtcagagccagtcatttgtaatgtgtcagaatttcgactctaggcaagtgctaggagctaaaatgcaggttccttcaaacttccaagtagctgcggtgccaagctgatttcgatgagttgagttcttactgagcagttcaaatgaccagactgtaaccaggggcttcattctctcacccacgaagcactagggcagtcaaggggaaagactgacgcagaaggaatgaggttcccatgggctgggtccaaaagacctagagcgagtgcttagttgaaacatttgccaaaacctcaaggaacacccacacaaaaataagaagttgctcggcacagaagtcagggtaggggatgttcttcgaaggccacactccatggcaggcatacagcagcacgcttaaacatggttcctgttaaggctagagaggcaccattcacatagaagaagtcatcatcgtgactctacccaccccgcgcccccaccgcgtaattgaatgctgagtgtggacggcacttcttccagcacttggctgcgttaccgtgctcagttggcaagccttgggggagaagagaggttcagaaggaagaccatctgagtccatcagaacaatgtgtgcttttaacaaggcaggggcgcccaaactcagtaggtccaacagaccaagttatgctatgaaggtcttgtggaccacctacccccgccaaccagtcaccacttaaaagatgagaaaacgccagctcacaggccaaatgggaggcatttagaagagacaccaatgaagagatgtctggctttgtattaattactgtaggtaaattaataccaaatgccaggaagtaaagtagaggcattttcctattataaacccttgggacaagcccagagaccaccagcagtccagggcttgtgtacgctgagaactgaggggataacagaattgtgcaacaccttggtgccccaccgcccccgttaccaaatctcacagttcacagtatcgccttggcacactgggcttgtgtaatactcatggacttgacctggaatcacaaagcggactcagcttctgttacattcattcaccccagtgactctgggcacacactgtgcctctgaaggaggcacagtggccataaatggaaatagcatttgcctgcttctggggaccttggtcatagacttctgaggctttcctgggagccagtctaagataatgggtaagagtatggactctgaaggcagagtcctctgcttggaatcctagccctgccatttcccaactgtgtggccttaacaagctacttagcctgcctgtgactcaggctcctcatctataaaatgggcataatagttcctacctcatagggttgtcatggtgattcgtgggctaatattaaaggagatttctcaacctcagtaccattgacatttggggccggataattctttgttctgggggctgtcctgagtattatgggatgtttagcaacctccctaccctctacgaactgttgtgacaaccaaaattgtctccagacattgccacatgtcccaaatatttcctaggggggcaaaattgcctccagttgagaaccactgtattagattatgtcgtagatacaaatagccaaatatcagcaatttcacgtggttcaatctaacaattataaagtatttaacagttaaaactctttgaactttgtagatacatttatgtgcttcatctgggataaacgaacccaatgctttcaccagacgctca

SEQ ID NO: 822 - DNA, 2492 bp, Homo Sapiens
aactaatccttaagtgtatttttaaatgcatttctctagctgctaggcagatgagcatttttcctctgtgaacttacccccaaccccttctccccagctacccactgcacggtaccaccaataccctttagcatttctgtcctggagcctaaagtgacacagctggtaagaagctgcgtaggggctggagtttacatctgctgggcaccagagcctctgtcctgagccacctgcccgtgctgggaccggcaggctactcccacagcagaccattcccatccattcccagtgttctagcacgcagctctctgggaactcagactatgacaccttttttgggaagtggtatggagaatcctggccaggtgccctaagccaagcccatgccaatgataccagggcacagagaagttttctgtggtttatggggaggtgggaacatctgcaacacggcttctttaactccattccgttaggactggagagcacgaaggagcccgtctccctgcaaaaatgggcagttagagggttctgggggccaaatggacacccttctgcctgcagccttctgcagtctccccatgtagacaggcatggccaagctctgtggagttgataggtgtattctgacctcagagcactgtgtgggctcccaggggctgcaggtcactgctgcctcctcctcccctcccatcacaaaaggcaggtttcccgagaagcactgggcgcatgcctccgagtgaggggccttggctcacagggcagcggctggggcagagctgctggattggtgagtccattgggagcccccagccttgggtcaggcccatacagagcttggggtgggggttaatgccactgttgaatgtgctttctcctagtgaccttcaaagggagatgaaagttaaaaataattttggtgggggaaatagctggtggatagcgggccagtgatgggggtgggcaggaggatgtggcactgtcggggggaggaagcagaccaaatgctccttttccctcaagccgcaagggacggacagcactatctgtggcctttgtggttggcatttcccctgcagtgtcttcctgttaggagttctctcagataataagctgcagaagagagcaggagatggagcaggcactgtgtgcatcggattgaaactcctaagtgtctcttgcacctgccccagtgccagccacagcccaggccttcaacgccctccggcctcttatgctggaagtctccttagcagatggcctcatggccagagctggcctcctgtgagctctgttgctgccctaactgcagtgcctatcatctgagccccctctcgcgagccaccttcactcgctaaagtgaatttaggccgactttgtttttgctgtgtctggcttgctatctattctttgttatgagtgatctcaaatatgccctatgatcgaagagttctgagcagagagaattcagcagcccttcaggagccacatctgtccttactttaattacccctctgtgacactgtgggcctgcttttcacttgccatccctgacctaggtcctaagatatatgtgatctattttatcccagcctgacaactagagataattcggtgtaatcacatgcttcctgacagcaactggggcatgagagcacaggtggtcagggagtgtgggtggtgccaggctttcacagggcacacactgtggtccacgtcggcccctctcccagatgatatgccacttttactgtcttgtgatacttggaaatagtatcacaagacagcctttttaaggcttcaaagtctccttttgccaaggatggtgattagcttatcttagtcctctgagaacaaagcaaaaggaaatgactactattaaaatagaatataagaatgatgtaaaaaaaaaagggcttcttgcagcaaaattataaaagggctgcaaagttctagaatttcttttattgatgctctgcaaaacacaggcactgggctcatgcctcccagcgaggggccttggctcacagggcagtggctccccaggcggagtgttcacaggtggcccagatgtctcattggccctgcccttcctcagcctgcgctccggacagactgggcagtgtgcgggaaccaccctgcgttttactgcctcttgttcacactgctcctgcatccacctgaactgccccagatcatcttggccggctgccttcttcagggtccctgcgaatattcctcctttaggaaaccaagctagaagatgtctccttctccttggaactccctctgcacttgacccgtacacttcttaggccctggccgctgtccttgttggatggactgcagcccctcagggaaggttttcattccagtcctccctgtgttaattgagcacctgctacattcaagcaccgggctcggtactggggattccttgagtgaaacaaaggttccttgccctcacagagcttacgttctctactagaaag

SEQ ID NO: 823 - DNA, 2489 bp, Homo Sapiens
cccatggctagggacagtgacatcagtgtgtttaccaagtatttgatttacttgctcaggcaaaattccagaagagacactgggacctgtgtggagagtttcttcactgcagctatcctgccaagctcattgtaaagtgacgaattttgtggacacttacagagaaaaaatagcttcaaatgctatagaccaatgctgcacgctgcagagacacagtctttgggttctgtgagctgtatttgggcattacgcagagttcagctgccatctgtccctttgaaggccagctaagaagttggtcccagcctgggcatggtaccactgtcctacattccagccatttgggatatcctgggttcaagcattccctcccattgctggatcaagcacttcccacctcctgctctgggaaatcagatctcagtaggtcatcaaccatcccagaaagtccagcagagttggttttggtttgggggtgttttttgagttgggtggaagaagagaccttatataatcttttaactttttctctaaggctgaattccctataagcaaaattttaaaattttttttaaagaagaaaaacacccagacaatccttaaaatcccctttcagctccaagactgtgtaattctgtgataccagtattgaaagcccctgcatttccctaactatatattcccctatgccagggaaaggtgcatgtaagtgagagaacaaaaaatttcacaatcgtggggacctcttctttcggctttggagcccccttccctctgtctctgtacggggcagctttttccttctgtcttctcccttccttcttgtctactaaactctctgcgccttagaaccaaaaataaaaaataaaaattcaaaatcatgatcttaggggtgaaagaacactgagaaaccatagaaagcaaaaatgaaaagccaacatagaaaaagtctgacttgaattagaagcagcacttaaaattacaggttcagaaaaagcttgaacagaatccagggctgaggtcagccctgagtctgcaggctctgccctctcacaaaggtgagtagatgggtctggagagggctgttcatgctatggaagggcctctatgccatcgaggctaaaaccaaagcaggagcaaatcagccctgctagtgtgtacagtcggcatcaaagaggcaacaacggtagagaatattttctgaaagacacacatgaaaccagtaacggcgatggtctctggaagaattaggtcagaagcagacttaatttgcactgtgtacattctttggtatcctttttaattgaacgcatgtgaatgcattacctattcaaaaataaatgtgtaaaaacacgtgccacgacaaagcaaaatgaggagacagtataaaaaagacaaggataattttaaatttctcctaataaaacgctgtttaaaaatctaagaggaaaaaagggtaggctccagctagtggagagaacaactgaaaaacaagagccacgtgttcccatggtcctggccaaccccacttctttcccatcctcactcgttcacatctgccttggagcacccacagcaagcctggcttcatgcccagaacatcgcctggctttcctcctctctccctgcccacatctcctcagtcactcgctgcctcctctcttgcttctctcccagttctcagtttgcccatcaaatctcaggtggtactctccattctctgctatgagggagttcatttgttcatgcaatttccccaccggagacaaaatgtatttcccaaagttggcttgcaatgacatctcccatgcctgctctgcttacccatgactttgacactccttccatcgagagggcagaacctgtgtttcctctctctgaatctaggtgggctacagctctggtagaagtgacactctgtgaccttaaggctaggtcacaaaaagggaatgcagcttctgccagcaatcctgggacacacacttggagcccgagctgctgtgtaagccatctgcctgctctgagcccaccacactataaggaagcccaagctagcccacaggagagacgaggtgaagagaatgagatgccagtctccactgctccagctctctagtgtcccagccccagccactatctgactgcaaccccatgaaagactgagccagaaccacgagcccagcccttcctgatgttgacatacagacttcatgaaagagaataaactaatttttgctttaagccactatgatttgggatgatttgttatgcagcactggataactgcaacacctgcttctaaacagtagaatcccaaacgtctaggccccatctctaacttacttcatgttcctgttctcactgattttttgccactgagcttgaccaagcccttgagtcaccaattccagatatttgtttaaacaaattcactgtgactgtctacactatccattcctccaaaacaatccctgttatagttggccttc

SEQ ID NO: 824 - DNA, 2417 bp, Homo Sapiens
gttgcccaggctggagtgcaatggcacgatctcggctcactgcaacctccgcccgcaccgaggttcaagcgattctcttgcctcagcctccctagtagctgggattacagtcacccgccaccatgcccagctaatttttttgtgtatttttagtagagagggggtttcaccatgttggccaggctggtctcaaactcctgacctcaggtgatccacctgcctcagcctcccaaaatgctgggattacaggcgtgagccaccgcggccaaccaggaatgaacatttttaaggctcttgatatatattgccaaacactttccaagattgtgctggtctattcccctcccccagaatcctgggtgtgggagcccagaggctgctggcccgttcccagcaggcaaagatgttacccatctcctaggaaggaagtgtagcagcctctgagcgccacaggtctcgtttctgtgggtgctggagtgcgtttggtgctgttctcctctaggtccagacatcatctgtcggtggtggacgtctgcaatcactgtggccatcagctggctccagggagacgatgcagctgtgcgctctcattttaccaaagtggaacgcatccccaaggccctggaagtgacagagtgcgtaaccctccttggccactcacttgcttctctccaggggaatcttgtttgagttagcaggagcaaactggactgggtgggcgtgttggggtgaagggtcaggactgcatgacaggtgggcggctagaaaagtcgggggtgagggcaccatggagaactcaagttgggccagcaggtcctctgtgcaagtgtcctgctctgcacaacacgacagttgtcccagcagctgtcagcactgtgtccgggtcctcctccctgcagccttcatggcgccacaggctgaaaagaagagacgagagcagtgtggcccccagcatcttcagaagctttgtggtggaggcaggcactggtggttcacaatcagtgcagagaggccactgttgcccccaaaactcatgtgcactggagcatcttgcccctgtgtgctagcattttatccactttccttccagccacctccacccccaccatcaaccctggcaactttgtcctgtaactaaaatagcctttagcacatggcataaccggagagcttttgacattcctctttggagattcatgtctgcgtcttgggggcattcggcactagtgatgggcagccctgcctgctgactccccggctgtttctaattggatctgagtattctaagagaaactgtaaaatgctccaagacagaaaggccccacgaggtcctatccttagagccaaggctgtagcatttcctatcaagcagacccttaaccggcgcacaggaaggagctgagaagagtgagtatacacaggcttgaagtcctttgttccctgaagtagatgtgacaccctaatttcattgaagtagccccatttgtaagcactctgactaggtaagcacccagcccggtatagcattccacctgtatgtgtgtctcccccagtcgatgtgcctgaggacactgagactcagcaggtaagttgtccaaagtcacctcgctccagagcagcagagcttccatggacagccaagacacccctgcaggcactgctgcctgctggattcacttacccctgggtccctctgcttttcagggactaggatgctatgagaaccctcccccatccctagcctccccttccactcccagtctcctctacagaaagaagctaactaagtatctccagagagtttaataccacatctctgggggggtggtcccttaaagaacgggtacaacaccttattgtggccactttataggtaaggaaactgaggcacacgttggaatgactatcttgggtggcttcttagcagcagacgtgatggtgaagcctgtgtctctgacttccagcattgaatgaaggtgctaaagggtggggcgctaaccctagctcagggctggcatttcagatctggagctggtggcatggtgccatagtggcagcattggagtcaacagatgcacatgtcatatcagtgtggggcgtggcagtcactggcttgggcccctctgcctgtcacgcaggtgacacatagtgacctgcctctcgactccctgtcactgctgcaggagccccctggtgaaggccatcttccatgcctgcagagccatgcatgcctcactccctgggaaagcagatgggcagcagagttccttctgccattgcgagagggccagtggccacctatggagcagcctcaacgtcagtggggccacctctgaccctgccctcaaccacgtgagtgggagctgagttggcccctgggggaggtgctctgcactggtttacgagaacactcccac

SEQ ID NO: 825 - DNA, 444 bp, Artificial Sequence
  chemically treated genomic DNA (Homo sapiens)
ttgttgattggatagatggatggatggatggacggacggacggatcgatggatggaaatttggttattattgacgtttgagttttttatttttttgggttttttattttcggagtttttattcgtttgtgatagttgtacgagaaatatatgttttttttaggagtaaatttttaatttaaataggtagtatagagttagtttagtattttatattggaggtatttagggtggagtttaggtcgatgagacggcgtaggatgaggttttttggtttagttgggaattatttttttttagatttttcgtttagagtttaattttttttttttttagcgttattttttttgttagtttgtttagttttttagggtgtttggatttttaggttttattttgtgtttagtatagtagggtttagcgttttagtaattgggaaggtttg

SEQ ID NO: 826 - DNA, 444 bp, Artificial Sequence
  chemically treated genomic DNA (Homo sapiens)
tagatttttttagttgttggggcgttggattttgttatattggatataaggtgaggtttgaaagtttaggtattttgaggagttgggtaaattagtagaaaagatggcgttgggagaaaggaaagttagattttggacgggaaatttggaaagaagtggtttttagttgggttaaaaagttttattttacgtcgttttatcgatttgggttttattttgagtgtttttagtgtgaggtgttggattggttttgtgttgtttgtttgggttgagggtttgtttttaggagaggtatgtatttttcgtatagttgttataagcgagtgagggtttcggaggtggagggtttaagagggtggggagtttaggcgttagtgatagttagatttttatttatcggttcgttcgttcgtttatttatttatttatttatttaattaataa

SEQ ID NO: 827 - DNA, 457 bp, Artificial Sequence
  chemically treated genomic DNA (Homo sapiens)
gggataggatttattgtaaggttttcgggtttatttatggtaggtgtaggtttgtgcgtataagggtatttaatttcgatatatattcggaggagggaagagggttttggttgggggtttttgagcgggattgttggttgtttttcgttaaatttttgattttagtattttttttcgttacgttttttttttagggttcgtgtatttttagtttttgatttcgttgttgggcgttgggttggtgttcggattgggagttttgggtttggtttggtggttgtataggtgagtaggagggattcggtttcgttaaatggggagtgattagaggtggaaggggtaggattagaattttcgtaaaagaaagagttagatttagagttttggttttggtttggcgaagaatgggagaggttaaaggtgggagcgaggtcgttggttggtgagtagagtttta

SEQ ID NO: 828 - DNA, 457 bp, Artificial Sequence
  chemically treated genomic DNA (Homo sapiens)
tggggttttatttattagttagcggtttcgtttttatttttgattttttttatttttcgttaagttaggattagagttttaggtttagtttttttttttgcgaaggttttggttttgttttttttatttttggttattttttatttaacgaggtcgggttttttttgtttatttgtgtagttattagattaggtttaaagtttttagttcgagtattaatttagcgtttagtagcgggattaggagttggggatatacggattttgggggaaaggcgtggcggggagggatgttgaggttaggggtttgacgagggatagttagtagtttcgtttaagaatttttagttaaggtttttttttttttttcgggtatgtgtcggagttaagtatttttgtgcgtataggtttgtatttattatgggtaggttcgggggttttgtaataggttttgtttt

SEQ ID NO: 829 - DNA, 498 bp, Artificial Sequence
  chemically treated genomic DNA (Homo sapiens)
aagttgtaggtggatggagtagcgattagaagttagagttatagcgtaattttggggggcgggagtttttagggttagaatagttattatatttgcgttggttagggtttgtacgtagttcgatatcgtcgatgttagggcgttcgtggttttattcgttatttttaggaaatttgttagggagggagaaaggtgaggtttagttttatggagataggaaattaagtagttattgtcggatattgggttttagagtaggttgaggggatagtgggatggggcggatatgggggtttgaggtttatagttaggtcggattcgggtgaggttgtagtcggttcgtagggagcgtacggttcgcgtgatgtttagcgttagtttaagggcggtttttgtttcggggtttttttaggagtattgtggggtggaggagggggtgagggggtttggagggtaggttagatttttttttttaggttatgttatatttttgagggt

SEQ ID NO: 830 - DNA, 498 bp, Artificial Sequence
  chemically treated genomic DNA (Homo sapiens)
gtttttagaggtatggtatggtttggagaggggagtttgatttgttttttaggtttttttatttttttttttattttatagtgtttttggaaggatttcgaggtagaagtcgtttttgagttggcgttaagtattacgcgagtcgtgcgttttttgcgggtcgattataattttattcggattcggtttgattgtgagttttaggtttttatgttcgttttattttattgtttttttagtttattttgggatttagtgttcggtagtgattgtttggttttttgtttttatggagttaggttttatttttttttttttttggtaggttttttggaagtggcggatgaggttacgggcgttttggtatcggcggtgtcgggttacgtgtaggttttggttagcgtaggtgtggtggttgttttggttttgggggttttcgttttttagggttgcgttgtggttttggtttttgatcgttgttttatttatttgtagttt

SEQ ID NO: 831 - DNA, 482 bp, Artificial Sequence
  chemically treated genomic DNA (Homo sapiens)
gggagaaagaggattagatgagagtggcgttttcgtttatgttcgtttttttttcgtagagaattattttttttagggacggtaggaatgttacgcgtttaatgggatatagcgttttttggagagatatatttataatcgggaggagttcgcgcgtttcgatagcgacgtgggggagtttcgggcggtgacggagttggggcggtttgttgcggagtattggaatagttagaaggatattttggaggagaagcgggtagtgtcggataggatgtgtagatataattacgagttgggcgggtttatgattttgtagcgtcgaggtgagtgagggttttgggtcggcggttttagggtagtttcgcgggttcgtgtttagggcgtaggagtagtcgggttggtttaagggattttagtgtcgggcggaaaggggattttgggttggggatttatggggggagtttatttggagtttgttaggg

SEQ ID NO: 832 - DNA, 482 bp, Artificial Sequence
  chemically treated genomic DNA (Homo sapiens)
ttttgataagttttagatgggttttttttatgaatttttaatttaaagtttttttttcgttcggtattaaggttttttaggttaattcggttgtttttgcgttttgggtacgggttcgcggggttgttttgggatcgtcggtttaaagtttttatttatttcggcgttgtagggttatgggttcgtttagttcgtagttgtgtttgtatattttgttcggtattgttcgttttttttttaggatgtttttttggttgttttagtatttcgtagtaggtcgttttagtttcgttatcgttcggaatttttttacgtcgttgtcgaagcgcgcgaatttttttcggttgtagatgtatttttttaggaagcgttgtgttttattaaacgcgtagtatttttgtcgtttttggaaaaggtaattttttgcggggagggggcggatatgagcggaggcgttatttttatttaattttttttttttt

SEQ ID NO: 833 - DNA, 497 bp, Artificial Sequence
  chemically treated genomic DNA (Homo sapiens)
agggatatggtttgggtataatgttaatataattttttatatttttttattttatagtagtttagtatttttaatgtgtttttacgtcgggtgtttttagcgaaagttagtcgggagtttagtattattagtgttattgttaacgttgttaagttggagtttttagggagttttagatatattatgttggagaagaggataggattaggggttagaggagtaggtaagttttatttagggagaattatgatttttttttatttatattttaaattatagggaggaagttattgatttttttgtttttggattgggtaatttcgtgtcggagaattaattagtatttgagtttaatagtattattagttgttgtttagagatgttgtatgaaggtttttttttgaaataattttattttttaaaggattgttttaatttagtatttgaaaggtttgaattagttgtatgtaaaatattttaattggggagttattgtg

SEQ ID NO: 834 - DNA, 497 bp, Artificial Sequence
  chemically treated genomic DNA (Homo sapiens)
tataatagttttttaattaaagtgttttatatgtaattggtttaaattttttaagtattaaattaaaataattttttaaagaatgaaattattttagaagaggatttttatatagtatttttgagtagtaattgatgatgttgttgaatttagatgttgattggtttttcgatacgagattatttaatttaggagtaaggaaattagtaattttttttttataatttggaatgtgggtggaggggggttatagttttttttgagtgagatttgtttgtttttttggtttttggttttgtttttttttttagtatggtgtgtttgaagttttttggaggttttagtttggtagcgttgatagtgatattgatggtgttgagttttcgattggttttcgttggggatattcgacgtaagagtatattgagggtgttgagttattatggggtgggggaatatagggagttgtgttaatattgtgtttaggttatgttttt

SEQ ID NO: 835 - DNA, 484 bp, Artificial Sequence
  chemically treated genomic DNA (Homo sapiens)
taataggatgttggtagggatttcgggggataagaatgggggtgggattttttatttattatttattaagttttttttggggttttggggattatttatgtttcggacgttttgaaatataagatgggtgtgagtagtttgaaggtggttcggagggatttgtggtttttagaggttcggttattttcgagggtgtgacggttagatttttaatttattttaaatttaagtaaatatagttggtttaggtttgtagtgtgtgggattgtggatttgtgggtttgtgggttttggttttgttttttttgaagatttattttttatgtttagagtttttagggtattacgttatatggttttttttgtgtacggggagcgaatgttgaggtagggtagtgtggggttagagtagggggagtttatagggaatgggaagtatgtcgagagaggagagggagtaggaaggtagttagaaaggtggaga

SEQ ID NO: 836 - DNA, 484 bp, Artificial Sequence
  chemically treated genomic DNA (Homo sapiens)
tttttatttttttagttgtttttttgtttttttttttttttcggtatgttttttattttttgtgagttttttttgttttggttttatattgttttgttttagtattcgtttttcgtgtatagggagggttatgtggcgtggtgttttgagggttttgggtataggaaataaatttttaagaaaaataaaattaaagtttataagtttatagatttatagttttatatattgtaggtttgggttagttgtgtttgtttgggtttgggatggattggaggtttgatcgttatattttcgggaatggtcgggtttttgaaaattataggttttttcgggttatttttaggttgtttatatttattttgtgttttagggcgttcgaggtatggatggtttttagggttttaaagggagtttggtgagtgatggataggagattttatttttatttttatttttcgaggtttttgttagtattttgttg

SEQ ID NO: 837 - DNA, 476 bp, Artificial Sequence
  chemically treated genomic DNA (Homo sapiens)
atgtttttgtttttggttgggtaatttttggatttatttattgtttgtaatttttcgggttgaagagattatttttcgggagttaattaatttattttttggagcgcgcgtttttttttgtttttaggagtcggttttttaaaattttttgaggttcgcgtatgtttttttcgatttttcgtgtttttattttttatagaaatttacgtatttacgttttttttttttttcgagtttgtagaggatttcgttttgttttttttatatttagggttgttttttttgtcgttaatataaatttgttgataggttacgtttgggaagcgggtggggtgtttcggagcggtgttgaggcgttgtaggttcggtttttggttgcgggggagttgtattttgaagtttcgtcggaattcgcgtttggggttagtagggggtattagagttaatagggattgtatgtaaaatttatttttttt

SEQ ID NO: 838 - DNA, 476 bp, Artificial Sequence
  chemically treated genomic DNA (Homo sapiens)
ggaggaagtgggttttgtatatagtttttgttgattttagtgttttttgttggttttagacgcgagtttcggcgaggttttagggtatagttttttcgtagttagaagtcgggtttgtagcgttttagtatcgtttcgggatattttattcgttttttaggcgtgatttgttaataggtttgtattggcgataaaaggagtagttttgaatgtagggaaagtagggcggagttttttgtaggttcgggggaggggaggggcgtgaatgcgtggatttttgtggagagtggaaatacggggagtcgaggggagtatgcgcgggttttagaaagttttgggaaatcgatttttgggagtagggaggaacgcgcgttttagagagtaagttaattgattttcggggggtggtttttttagttcggggggttatagatagtaggtaaatttagagattatttagttaagggtaggggtat

SEQ ID NO: 839 - DNA, 391 bp, Artificial Sequence
  chemically treated genomic DNA (Homo sapiens)
tttttgtgggtaggagaataaggattatttgggttttttagttttgaacgagaattttatttttattagaatgttttttttaattttagcgtatgatgaggaaatttatttatttttagttaggatttgataaattttaatattaaatgattaaaatatttgttattgaggttttattggtgagattcgtttttcgttttcgggtgtagttttttgggggttgtttttcggattgcgtttcgtatatttgttatcgagggtgtgagaagcgtttaagttggtgatatgtgatttgggacgtttttatttttcgggttaggagtagtagttgttaaggatagtagtttgtattgcgtggttttagggaagtagggtttggtttttaatatga

SEQ ID NO: 840 - DNA, 391 bp, Artificial Sequence
  chemically treated genomic DNA (Homo sapiens)
ttatattaaaagttagattttgtttttttaaaattacgtaatgtaagttgttgtttttagtagttgttatttttggttcgagaaatgaaggcgttttagattatatgttattagtttaggcgttttttatattttcgataataggtgtgcggggcgtagttcgaggagtagtttttaagggattgtattcgaggacggagaacggattttattagtgaagttttagtggtaaatgttttgattatttgatgttggaatttgttaaattttagttagagataagtaaatttttttattatacgttgaggttaagaaaaatattttgataagagtgagattttcgtttaagattggagaatttaggtggtttttgtttttttatttatagggg

SEQ ID NO: 841 - DNA, 483 bp, Artificial Sequence
  chemically treated genomic DNA (Homo sapiens)
gttgtgttttaattggtaagggattgtgttaaagatttgaatggacgatgttacgattttagattatatgattttttttaattttatagattttgtataaatgaagtgttggattttatttgaaagttgtaaaaattaatggtttagatatatttataataaattgatttaaattttttttataagaagaaaaattaagattatttatttgaaaagaaagatggagagggaggaggaagaagagaaaacggtcgggcggcggcggttgtaggttgtgtagcggtagcggttttttttcgcggcggacgatggatagttaggataggaaggtggtggtgtataataatagtatcgggtttgtgaagtgtggttatatgtaggttttaattttttagaagatatttttttagttttggttggaagatttattattagattaattattaaagtgggaaatattgaataaggattttatggttggtg

SEQ ID NO: 842 - DNA, 483 bp, Artificial Sequence
  chemically treated genomic DNA (Homo sapiens)
tattaattataagatttttgtttaatgttttttattttggtggttgatttgataataggttttttaattaaagttgggaagatgttttttggaaagttagagtttgtatataattatattttataagttcggtgttgttgttgtatattattatttttttgttttggttgtttatcgttcgtcgcgggggagagtcgttatcgttgtataatttatagtcgtcgtcgttcggtcgttttttttttttttttttttttttttatttttttttttaaataagtggttttaatttttttttttatagaaaaagtttaaattagtttattataaatatatttaaattattaatttttgtagtttttaggtaaagtttagtattttatttatataaagtttatgaggttagaagagattatgtaatttaaagtcgtgatatcgtttatttaagtttttggtataattttttgttagttagagtatagt

SEQ ID NO: 843 - DNA, 431 bp, Artificial Sequence
  chemically treated genomic DNA (Homo sapiens)
aatatgtttttattttatttggttttgttaggtaagtaagggattttgtgtgttggaaaaagaattattttggtgtagtcgtttaagaggagtttggggaggacgttggttcgcgaggttcgtcgtagataaggtggcggcgatgttcgggagttaggttagtgtcgcggcggtagcgtcggggtttttcgcgcggtagggcggtttgggtttcggtttttcgtcggttttttggaagcgggttcgcggttagcgcgggagtagtagtagagatggaggttttagcgtttttttttttttttcgttcgtttgagttaggggaggttaggcggttcgggtgtttggagtcgggggtttgttgttcgagaatgagaattttttttttttagaacgtggagattgttcgattattaggagtataaagttattat

SEQ ID NO: 844 - DNA, 431 bp, Artificial Sequence
  chemically treated genomic DNA (Homo sapiens)
atgataattttgtgtttttggtgatcgaatagtttttacgttttgggggaagaaaatttttattttcggatagtagattttcggttttagatattcgggtcgtttggttttttttggtttaggcggacggggaagagagagaggcgttggagtttttatttttgttgttgttttcgcgttagtcgcgggttcgtttttagggaatcggcgggaggtcgaagtttaggtcgttttgtcgcgcgaaaggtttcgacgttgtcgtcgcggtattggtttggttttcggatatcgtcgttattttgtttgcgacgagtttcgcgggttagcgttttttttaagttttttttgggcggttgtattaaagtaattttttttttaatatataagattttttgtttatttaataggattaaatgaagtgaaagtatgtt

SEQ ID NO: 845 - DNA, 412 bp, Artificial Sequence
  chemically treated genomic DNA (Homo sapiens)
tgtggtttaggtagttatttggttatagatagatagtggcggttatatatattttcgtttttgtattcgtggttaggttggggtattcgcgcgttaggcggaatgtaggggcgttttgggttcgtatatttttttatgttcgatacgtcgttgttgttagagtttgtttcgtcgcgttttcgttttcggatatttgcgttttcgtttgtttttgggtttgagttcgttttagttttcgttttcgtaggatttgttgtaatttatttgttgttgtcgtagtcgttgttttcgttttgagtattgagttcgtttagttcgtcggcgtcgagcgtagggttcgtttttattttaggtttttcgcgcggttttattcgttgttatatatttagatattttattttgtttattttgt

SEQ ID NO: 846 - DNA, 412 bp, Artificial Sequence
  chemically treated genomic DNA (Homo sapiens)
gtagagtgggtagggtgaaatatttgggtgtgtggtagcgggtggggtcgcgcggggggtttgggatgggggcgggttttgcgttcggcgtcggcgaattgggcgggtttagtgtttagagcggaggtagcggttgcggtagtagtaggtgggttgtagtagattttgcggggacggggattgggacgggtttaggtttaagaataggcgaaggcgtaggtgttcggggacgggggcgcggcggagtaggttttagtagtagcggcgtgtcggatatggggaggtgtgcgggtttagggcgtttttgtatttcgtttggcgcgcggatattttagtttggttacgggtgtaggggcgggggtgtatgtagtcgttattgtttgtttgtggttaggtggttgtttgggttata

SEQ ID NO: 847 - DNA, 475 bp, Artificial Sequence
  chemically treated genomic DNA (Homo sapiens)
tagttgttgttattatattggtttagaaggagggtggggggaggacgggtcggggaggggtagtaaggggaagggatgtgtgtcggtgtgtgtggagagggtgttttttcgtttttgttttttcggttcggtggggttttttcgcggttattcggggagacgttttagatagtcgtggtttttgtgatttgtgttttttttgtagaaggtattattgggttgggttttagacgggtattttgcgagcggatcggcgagttttaatttttcggaatgcgttgttgggggttgcggtggtaggttttcggttttttggtttattttaggtttttttggtgttgagagttttcgaggtttgatttttttgtttgttgttcgtgttgtttattttgaaaataagagtgtttcggtggaaggatttgagaataaaatgttggggtaaatggatattcgtaagaattattttttttaggtt

SEQ ID NO: 848 - DNA, 475 bp, Artificial Sequence
  chemically treated genomic DNA (Homo sapiens)
ggtttgaggagagtgatttttacgaatgtttatttgttttagtattttgtttttaaatttttttatcgaaatatttttgtttttaaagtgagtagtacgggtaataggtaaaggaattaggtttcggaagtttttaatattagaaaggtttaaaatagattaaaagatcggaggtttgttatcgtagtttttagtagcgtatttcggaaaattaaaattcgtcgattcgttcgtaaggtgttcgtttaaaatttagtttaatagtattttttgtaaagaggatatagattataggaattacgattgtttaagacgttttttcgggtggtcgcgaagggattttatcgagtcgggaaagtaggagcgaaggagtattttttttatatatatcgatatatattttttttttttattgttttttttcgattcgttttttttttattttttttttgggttaatgtgatagtagtagttg

SEQ ID NO: 849 - DNA, 443 bp, Artificial Sequence
  chemically treated genomic DNA (Homo sapiens)
ggtagtttttttttattatagggattttgtgtgttaggttttagttgcgttgtcgttgaattatggatttaatagtagagaagttttgtaggtcgtttgtgttggttcgggaaatcggggtttagtcggggtttgttacggttttggtgtcgttttgttttttgtcggcgttacggagtaagcggagagatttattttttcggttttaagaggtattaacggaggaggttgagaggtaggagttgaataattgatggttttttttggtttaggatttgttgaaaatgatacggtgtaaggtagaggggttgagagtgttgattataaaatgttgagaagttattttagggcggttacggttagaaggaggatttttatttaggacggggttataggtatttggggcgggtgttagaggtttttgttttgggttattttagggg

SEQ ID NO: 850 - DNA, 443 bp, Artificial Sequence
  chemically treated genomic DNA (Homo sapiens)
tttttggaatgatttagggtaggagtttttgatattcgttttaaatgtttgtgatttcgttttgagtgggggttttttttttggtcgtgatcgttttggagtggttttttagtattttgtggttagtatttttagtttttttgttttgtatcgtgttatttttagtagattttgagttagagaaggttattaattatttagtttttgttttttagtttttttcgttagtattttttaaagtcgggaagataaattttttcgtttgtttcgtggcgtcgataggaagtagggcggtattaggatcgtgataggtttcggttgggtttcggtttttcgagttagtataggcggtttgtaaggtttttttgttattaaatttataatttagcggtaacgtagttggggtttggtatatagggtttttgtgatgaggaggggttgtt

SEQ ID NO: 851 - DNA, 270 bp, Artificial Sequence
  chemically treated genomic DNA (Homo sapiens)
tatttttatttgtattattttattttttttttttggaaaataaatttatttgtggttttaaagtttaatttatttttagtaatttcggtagttatgaatttttatataagaggttttcgtaggtttagcgttaaagttgttttttttgtagtttcggtgatttttcgggttttttttttcggttttggtgtttcgggtgagtttagtatacgttgggattttggttgtttgttggtttggttcgattgtttttgtttttgagggtagagt

SEQ ID NO: 852 - DNA, 270 bp, Artificial Sequence
  chemically treated genomic DNA (Homo sapiens)
attttgtttttagagatagggatagtcgggttaggttaataaataattaaaattttaacgtgtgttgggtttattcgggatattagggtcggagggagagattcgggaagttatcgaggttgtaggggaggtagttttggcgttgggtttgcgggagttttttgtataggaatttatagttatcggggttattgaggatgagttaggttttggaattataagtagatttattttttaaagaagaagaataaaatggtgtaggtgaagatg

SEQ ID NO: 853 - DNA, 382 bp, Artificial Sequence
  chemically treated genomic DNA (Homo sapiens)
ggtggttttttggtttattgtttttagtttattcgttggtttttatttttgttttacgtttaggattttacgttttgtcggcgttgtttgggttacggttattgtttattcggggtttacggaaacgcggtttttgttttttatcgtcgtttgttttgggaacgcggttcgaagtttaggatttggtagatgggcgtaggcgggcggtcggtcgtgttttcgtcgcgggttattatcgtttcgcgtacggtcgttagtttattgagtacgattatcggcgtttaggttagttgtaggttgaatacgttttcgaagcggcgtcgtaattgtagagggagggttagggttttttgttaagttaggattattttagattataggt

SEQ ID NO: 854 - DNA, 382 bp, Artificial Sequence
  chemically treated genomic DNA (Homo sapiens)
atttgtagtttggggtgattttggtttgataagaggttttgattttttttttgtagttgcggcgtcgtttcggggacgtgtttagtttgtagttggtttggacgtcggtggtcgtgtttaatgggttggcggtcgtgcgcgaggcgatggtgattcgcggcgaggatacggtcgatcgttcgtttgcgtttatttattaggttttgggtttcgggtcgcgtttttaaggtaagcggcggtgggggatagagatcgcgttttcgtgggtttcgggtggatagtgatcgtagtttaagtagcgtcgatagggcgtggggttttggacgtgaaatagagataaaggttagcgagtgggttgaggatagtgggttaggaaattatt

SEQ ID NO: 855 - DNA, 282 bp, Artificial Sequence
  chemically treated genomic DNA (Homo sapiens)
gttttttattgtttttaggagcggttatttgggtattttgtgttttttttttttgttcgggtttaggtcgaggatttgttagtagggtttagttgtttggagttcgtttagtttattttttagtttattttgtttgtgggattttttcgttgtttttgttcgtggattgagtggtaggttattttataagtattcggatatttgatattcgtggtgttaagataattttaagaaggtttttcgtgattttgtaagttttgtttttttttttgggattttgtt

SEQ ID NO: 856 - DNA, 282 bp, Artificial Sequence
  chemically treated genomic DNA (Homo sapiens)
ggtaggattttagaaaggaaggtagggtttgtaggattacggaaaatttttttagagttgttttgatattacggatgttaagtgttcgggtgtttgtaggatggtttgttatttagtttacgggtaggagtaacggggagattttataggtaaagtgaattgggggatgggttgaacgggttttaggtaattgagttttattggtaggttttcggtttgggttcgaataggaaggaggggtatagagtgtttaggtaatcgtttttgggagtagtggggaat

SEQ ID NO: 857 - DNA, 493 bp, Artificial Sequence
  chemically treated genomic DNA (Homo sapiens)
ttttgttttggtgataggagaataatgttggtgaacgtcgtagcgggtgttcgagtgtttcgtgtgtttttgagagcgggtgggagcggaagtttgagcggtttgcggttttcggcgatagtgtgttatttgtcgttgtagcgcgcgttcgcgcggtttttgggttatttttggttaggtcgtagtattgtggtcggtgcgggcgtggtaggggcggggcggttttatcgttcggttttttcgtttacgtttttcgttgtagagtaagtcgggttgtcgttttttcgttatgggtttcggtgagtttggagttcggtcgggttttcggttgttttttaggtcgattcgggttgagaggagttttggtcgtttggttgtagttgggagagatttgggttagatttagaggggatttttagtcggcgtgcggggtggttagggtggagaggttggcgggttatcgggacgtcgggtattaggggttggatggagt

SEQ ID NO: 858 - DNA, 493 bp, Artificial Sequence
  chemically treated genomic DNA (Homo sapiens)
gttttatttagtttttgatgttcggcgtttcggtagttcgttagtttttttattttgattatttcgtacgtcggttggaagttttttttaagtttgatttaagttttttttagttgtagttaaacgattagagttttttttaattcgggtcggtttagggagtagtcgggggttcgatcggattttagatttatcggagtttatggcgagaagacggtagttcggtttattttgtagcgggaggcgtaggcgggagagtcgagcgataaggtcgtttcgtttttgttacgttcgtatcgattatagtgttgcggtttggttagaaatagtttagaggtcgcgcggacgcgcgttgtagcggtagatagtatattatcgtcggaggtcgtaggtcgtttaggttttcgtttttattcgtttttaggggtatacggagtattcggatattcgttgcgacgtttattaatattgtttttttgttattaggatagga

SEQ ID NO: 859 - DNA, 284 bp, Artificial Sequence
  chemically treated genomic DNA (Homo sapiens)
ttaggttgtaggaggagtttgtagttttggaggtttttggttttttttttatttcgttgttcgttttttagtgattagttggaatttaagatagtaatataagatgtgtcgttggtgggagtgatggagtgtttgttgagtgggtcgtagataagtatcgtgatttcggaggacgttttattatttcgtcgtaagaatatgttaacgggtgattgtttgaatgtttttagttaataggatattatttataatattttggttagttggaatggaagatgataaga

SEQ ID NO: 860 - DNA, 284 bp, Artificial Sequence
  chemically treated genomic DNA (Homo sapiens)
ttttattattttttattttaattagttagagtgttatgaataatattttattagttggagatatttaaataattattcgttaatatgtttttacggcgaaatgatgaagcgtttttcgaaattacggtgtttatttgcggtttatttagtaggtattttattatttttattaacgatatattttgtattgttgttttggattttaattaattattgaggggcgggtagcggggtgagaggagagttagaagtttttaggattgtaagttttttttgtagtttgg

SEQ ID NO: 861 - DNA, 457 bp, Artificial Sequence
  chemically treated genomic DNA (Homo sapiens)
gtagggatatgggggttgtagtttatagtgaaggtgggggagatagggcgagagggcgttgttggaggtggggtgtgagggacggtttgcgatattttgggattgcggggtagaaagcgtagttttaggggaggtcggggttagaggtgaagttcgtggggagggcgagattcgggcgtaggtgtttataggcgagggcggggtttaggttttagttgggttttgagtttcggtttaggtttttatttgtggtttcggttttaatttgaggtggagtttgggattaaagtttagacgaggtttttcgtttagggtttgcgttggggattggggtggggatttgtattttgggttagtttgggtgtattttatcgggattatcggggcgggggatatgggtcgggtggttttttgggagaagagggatagggagcgtagttggtggagaggataagaa

SEQ ID NO: 862 - DNA, 457 bp, Artificial Sequence
  chemically treated genomic DNA (Homo sapiens)
tttttgttttttttattagttgcgttttttgtttttttttttttaaggagttattcggtttatgtttttcgtttcggtggtttcgatgagatgtatttaggttgatttagggtgtaaatttttattttaatttttaacgtaaattttgaacgagaggtttcgtttaaattttaattttaaattttattttaaattggaatcggaattatagatggaagtttgaatcggaatttaaagtttagttggaatttgaatttcgttttcgtttgtgagtatttgcgttcgggtttcgttttttttacgagttttatttttgatttcgattttttttagaattgcgttttttatttcgtagttttagggtatcgtaagtcgttttttatattttatttttagtaacgttttttcgttttgttttttttatttttattgtgagttgtagtttttatgtttttgt

SEQ ID NO: 863 - DNA, 452 bp, Artificial Sequence
  chemically treated genomic DNA (Homo sapiens)
ggtttgtttatttttttttttggtgtgatttttttaagtttaatttttagggattttttttaggaatgttgagagtattagttgtttcggttatgttaggtatttggttattaggtttttttttattttaggggtaattatcgttagagggaaaaacggaaatattaggttatttgtgatttgtatatttatttttcgtttagagagataagtaggaggttaggggaatagatgggattgtgggaatagttaagggtagagggtgaagggcggcgattagaaggaaagacggaatgtttatatattttttgtcgttttcggttttagtcgtggaggaagcggggttcggaggatattgtattagataggttttgtttagaaaattggaaaagaataaatattgattataagagtgtaggagaatgggtttttttattattaaaaataggtat

SEQ ID NO: 864 - DNA, 452 bp, Artificial Sequence
  chemically treated genomic DNA (Homo sapiens)
atatttgtttttgatgatggaagggtttatttttttgtatttttgtaattaatatttgtttttttttaattttttaaataagatttgtttggtgtaatgtttttcgagtttcgttttttttacggttggagtcgggagcggtagggaatgtgtgggtatttcgtttttttttttgatcgtcgttttttattttttgtttttggttgtttttatagttttatttatttttttggttttttgtttgtttttttaaacgaggagtgagtatgtagattataaataatttggtgttttcgtttttttttttggcggtggttgtttttggagtggaaggagatttggtggttagatgtttgatatggtcgggatagttggtgtttttagtatttttggggaaggtttttggggattggatttgaggggattatattaagaagaggggtgagtaggtt

SEQ ID NO: 865 - DNA, 410 bp, Artificial Sequence
  chemically treated genomic DNA (Homo sapiens)
gaaattttttgttgtttattttggttcgaggaggtttaggggtttcggagggggattagtagaggtaggtttttggttgagggagagtgagggtgtgtttaggattttgcgggtgtggttagtatttggtgaatgtatagtcgattcgtaggtttagtttttggcgagtatttattgagagcgtttcgttgtggttaggttcgtttaggtaggttatggtattatagatgtttgtgttcgtgatggagttaaatttggttcggaatacggttttttcgttattatgggttttgtttatgacgggtagaatagtattaagaatttgggggtggggagtggttagttgtgatttattttttagatttttgttatagttttttattttattgtgaagtttggttttttttagg

SEQ ID NO: 866 - DNA, 410 bp, Artificial Sequence
  chemically treated genomic DNA (Homo sapiens)
tttggaaggaattaggttttatagtggggtggggagttgtggtagggatttgggaggtgggttatagttggttattttttatttttaggtttttgatgttgttttgttcgttatgaataaggtttatggtggcgagaagatcgtgtttcgggttaggtttagttttattacggatatagatatttgtaatgttatggtttgtttaggcgagtttgattataacgaggcgtttttagtggatgttcgttaggagttggatttgcgaatcggttgtgtatttattaggtgttggttatattcgtagagttttgggtatatttttatttttttttagttagagatttgtttttattggttttttttcggggtttttaggttttttcgagttaggatgagtaataggggatttt

SEQ ID NO: 867 - DNA, 424 bp, Artificial Sequence
  chemically treated genomic DNA (Homo sapiens)
aggatattaaggagaatttggaatttcggcgtttttaggtggtggattttcgagttattggtaggtttcgcggtatcgagttcgagtttcgagacggtaacgcgggggaagggggtaggaggtcgtcgggggcgcggtttttacgttttgagtagtgttttggatttgattttttttttatttttttaatttattttgtttttattttttttttttttttttttttttttttttttttttttttttttttttttttttttttttttatttttgttttttttttatagggtttggttttatcgtttaggttggagtgtagtggtataattatggtttattgtagttttaattttttgggtttaggtgatttttttcgtttagtttgattttgtttttaaaggttattgtatgaggtggggaagga

SEQ ID NO: 868 - DNA, 424 bp, Artificial Sequence
  chemically treated genomic DNA (Homo sapiens)
tttttttttattttatgtagtggtttttaaaggtaaggttaggttgagcggggagggttatttgagtttaggaggttgaggttgtagtgagttatgattgtgttattgtattttagtttgggcggtagagttagattttgtgaaaagaaggtaagggtagggaaaagggggaaaggagggaagggaaagggaaggaaaggaaagaaaaaaggaaaggaaatgaaagtaagataaattaaaaaaataaaagaaaggttaagtttagggtattgtttagggcgtagaggtcgcgttttcgacgattttttgtttttttttttcgcgttatcgtttcggggttcgggttcggtgtcgcggaatttgttagtggttcgggagtttattatttggaagcgtcgggattttaggttttttttgatgtttt

SEQ ID NO: 869 - DNA, 313 bp, Artificial Sequence
  chemically treated genomic DNA (Homo sapiens)
taggggagttgttaggattaagttggatggagttaggtcgttttgtggtttttggggagggtttttagagggttgtcgggcgaagggagttttttttaaaacggttttttgagttttgatgtatatatatgtagtttatttttaagtttagcgttttattagtttatcgtttcgttttttttagtatattcggtgcgtagtcgcgattagtttaatcgtggtatttttttatcggttttgagttttggcgtgtttttttacgatattttttgggtacggagttgtgtcgataggtttttgtgattggttgggt

SEQ ID NO: 870 - DNA, 313 bp, Artificial Sequence
  chemically treated genomic DNA (Homo sapiens)
gtttagttagttatagagatttgtcgatataatttcgtgtttaggggatgtcgtggaggggtacgttagggtttagggtcggtggaaaggtgttacggttagattggtcgcggttgcgtatcgaatgtgttgggaagaacggaacggtagattaatggaacgttagatttgggggtgagttgtatgtgtgtgtattagagtttaggaaatcgttttggaaaggatttttttcgttcggtagttttttgggaattttttttaggagttatagggcggtttggttttatttagtttggttttggtagtttttttg

SEQ ID NO: 871 - DNA, 410 bp, Artificial Sequence
  chemically treated genomic DNA (Homo sapiens)
ttagtaatagtgaagggagggagaatggtgggagaggattttagatgaacggtgggtcgttggaggttgagtatgttagtaggatgttagtttttagagtaaagtttatgttaaatagttaacgtttgttttttttgtttttaggattattttttcgtacggggagtattttttatattaatattattatgttttcggtgttcggtattatttgttttttgggtattatcgggaattttacggttattttcgcggtcgtgaagaagtttaagttgtattggtgtaataacgttttcgatatttttattattaatttttcggtagtagatttttttttttttttgggtatgttttttatgatttattagtttatgggtaatggggtgtggtattttggggagattatgtgt

SEQ ID NO: 872 - DNA, 410 bp, Artificial Sequence
  chemically treated genomic DNA (Homo sapiens)
gtatatggtttttttaaagtgttatattttattgtttatgagttggtggattatgaagggtatgtttaggagaaagaggagatttattatcgagaggttgatgatgaagatgtcggggacgttgttgtattagtgtagtttggatttttttacgatcgcgaagatgatcgtggagttttcgatgatgtttaggaggtagatggtgtcgaatatcgaaggtatgatgatgttgatgtaggagatgtttttcgtgcgaggaggtgattttggggatagaaggagtaagcgttggttgtttgatatgggttttgttttgagaattgatattttgttggtatgtttagtttttagcgatttatcgtttatttggaatttttttttattattttttttttttttattgttgttaa

SEQ ID NO: 873 - DNA, 494 bp, Artificial Sequence
  chemically treated genomic DNA (Homo sapiens)
ttttgaaggagtattaggtggaagcgacgttttatttttaggatgtgtttttgtatttgcgggttgttggggtttaggttgttgttatagtttaggtcgaagaagagtaggtttcggaggtagtgggtattgaagtcgttggggtcgtagtagcgattcgggttttgtaggaattcggttagtttgtcgtcggtcgagagtttttacgtgaggggtattatcggttcgaagtagtggaaggaggattcgaataagcgggcggggtcgcggagtatcgtgatgaagatggcgttggtcggtattaggtcgcgtatttcgtcgtagtggaagcgtatgtggttgtagatgatgttgaagtaggtttcgggtcgatagttttgtattaggttgcgggcgaagaaggtcgggtagtcgaagttattgcggtcgttagggaaggcgaatttgagtcggtgtttttggtcgaagcggaataggatgttgagtagggtgtt

SEQ ID NO: 874 - DNA, 494 bp, Artificial Sequence
  chemically treated genomic DNA (Homo sapiens)
agtattttgtttaatattttgtttcgtttcggttagaagtatcggtttaagttcgttttttttaacggtcgtaatgatttcgattattcgatttttttcgttcgtagtttggtgtaggattatcggttcggggtttgttttaatattatttgtaattatatgcgtttttattacgacgaggtgcgcggtttggtgtcgattaacgttatttttattacggtgtttcgcgatttcgttcgtttgttcgagttttttttttattatttcgggtcggtggtgttttttacgtggaagttttcggtcggcgataagttgatcgagtttttgtaagattcggatcgttattacgattttaacggttttaatgtttattattttcgaaatttgttttttttcgatttgggttatgataatagtttggattttagtagttcgtaggtgtaggagtatattttggaggtggagcgtcgtttttatttggtgtttttttaaga

SEQ ID NO: 875 - DNA, 449 bp, Artificial Sequence
  chemically treated genomic DNA (Homo sapiens)
gttttttgggtttttgttagttaagggacgttcgtcgcgcgttaattgttaagttttttattgtttttgtaaatttgttgacgtttttttagcgtatagggagattgcgtacgtgagttcgttttcgcgcgtattgcggagaggtagaggtacgaatgtagtataaggtataaaatgattattttagagagggttagatgattaagttagtaaatatttagggaatacgattgtgttcgttgcgcgtttttcggagtagatataagggtgaatgaataaagaatggatttcggttattgaaagtggagaggtagtcgatttcgttcgtggaggtttttagtagagttggatttggtagtttttcggttatgaggggagattttgttggaggaaagaggtttttatttttatcgtttgaaatgtgtaggatgtttttagattttttggtt

SEQ ID NO: 876 - DNA, 449 bp, Artificial Sequence
  chemically treated genomic DNA (Homo sapiens)
ggttaaagaatttgagggtattttatatattttaaacggtgggaatggagattttttttttttagtagaatttttttttatgatcgggggattattagatttagttttgttaagggtttttacggacggagtcggttatttttttatttttagtgatcgaaatttattttttgtttatttatttttgtgtttatttcgggaaacgcgtagcggatatagtcgtgttttttaagtgtttgttgatttagttatttggttttttttggagtagttattttgtattttgtattatattcgtgtttttattttttcgtagtgcgcgcgggggcggatttacgtgcgtagtttttttatgcgttgggagggcgttagtaggtttatagaaataatgaaagatttaataattggcgcgcgacgagcgttttttgattggtaggggtttagaggat

SEQ ID NO: 877 - DNA, 424 bp, Artificial Sequence
  chemically treated genomic DNA (Homo sapiens)
tttttgttttgtatatttatgaagtttagcgaggtcggtcgtttaggttagtcgtggacgggttatgaattatttatgaggaaatttttggtttcgtttagaaaggtttcgttgattatttatgagtcgaggagcgggtttgggtcggaaaaggtcgttgattttcggtgggagggaagcgtcgacgagttgaggtgagggttgttgagacgcgaggtttcggtttagagagggtattcgggcgttgttagttttgtttttatgttaaaaaataatttttttttttttttttattatttaaggttttaagttggatttgaaagtattatatttcgtgagggtttaaagtattgtgaagagaatcgggagggtagggggttgaggaggaaggtaaaagggaggcgattttttttagaattggata

SEQ ID NO: 878 - DNA, 424 bp, Artificial Sequence
  chemically treated genomic DNA (Homo sapiens)
tgtttagttttgggggaaatcgttttttttttgtttttttttttagttttttgttttttcgattttttttatagtattttaggtttttacgaaatatgatatttttaaatttaatttaaagttttaagtaataagaaaagaaaaaaaaattgttttttgatataaagatagaattaataacgttcgagtgttttttttgggtcgagatttcgcgttttaatagtttttattttagttcgtcgacgttttttttttatcgggggttaacggtttttttcggtttaaattcgtttttcggtttatgaatagttaacgaggtttttttgggcgggattagaggtttttttatgaataatttatgattcgtttacggttagtttgggcgatcggtttcgttagattttatgaatatgtaaagtagggg

SEQ ID NO: 879 - DNA, 371 bp, Artificial Sequence
  chemically treated genomic DNA (Homo sapiens)
atttttagagatatttttttgggaagatagttggaaggtagggttgagtcggggttatttgtgatttagcggtgaggtgatgaggtattgacgaaagtattgtattttttttttttgagaaacgttttggtattagatgagttttgggggagggaggagaggaatttggtagggatttggttataagttatttggagggtggcgtgaggatcggaaaagtcgttgttcgttttgtttggttttattttttgaatgaggttattgaatgtgtacgggaggtttagcgttgttttattttagtttgatggagaaattttattcgaaattttaaagtagggtagggatatttttattagatatttttgtagttt

SEQ ID NO: 880 - DNA, 371 bp, Artificial Sequence
  chemically treated genomic DNA (Homo sapiens)
aggttgtaaaagtatttggtgggaatgtttttgttttgttttgggatttcgggtaggatttttttattaggttggagtggggtagcgttgagtttttcgtgtatatttagtgattttatttaggggatgagattaaatagaacgggtagcggttttttcggtttttacgttattttttagatggtttataattagatttttgttaaatttttttttttttttttttaagatttatttgatgttaaagcgttttttaaaagggggaaatatagtattttcgttagtattttattattttatcgttgggttataaatgatttcggtttagttttgttttttagttgtttttttaaggggatgtttttgaagat

SEQ ID NO: 881 - DNA, 500 bp, Artificial Sequence
  chemically treated genomic DNA (Homo sapiens)
tttttttttatagggttttagggttggtggttgttttgggtttatagttacgttttattcgttttttgttttaatagtttgtgtggtggtaaagtcggtgtggggttggggaacgtagcgttttttaggaggggattcggttttttttttgtagtgtaggcgaaggtttagatgttagtgtgattttttataaggcgtggtttttagatttttcggtcggaagtgatgtttttttgtcgcgggttttgggtttgaagtagtttggtttttttttggtaagtggttggtgttttagtagttgtaatttgagtttagttatttatatattatcgtggtcgatatttttattaaaaagttttttgagacgatttgcgtgtatgttgattttatgattagcgtcgttgggaagaattttagagtcggtggggtggggttggaagtagtaggtgtagtgatagggttgggtgtttaggaggttttagtgtttaattaggttaagg

SEQ ID NO: 882 - DNA, 500 bp, Artificial Sequence
  chemically treated genomic DNA (Homo sapiens)
ttttggtttgattgagtattgaggttttttgggtatttagttttattattgtatttgttgtttttagttttattttatcggttttggggttttttttagcggcgttgattatgaagttaatatgtacgtaagtcgttttaggaaattttttaatgaaagtgtcggttacggtggtgtgtaggtggttgagtttagattgtagttgttaagatattagttatttattaagagaaagttaggttgttttaaatttagggttcgcggtaaaaaagtattattttcggtcggggagtttggaagttacgttttgtgggaggttatattggtatttaggttttcgtttgtattgtagaaggagagtcgggtttttttttggagaacgttgcgttttttagttttatatcggttttgttattatataggttgttgaggtaggaggcgggtaagacgtagttgtagatttaaagtaattattagttttgggattttgtgggagagga

SEQ ID NO: 883 - DNA, 431 bp, Artificial Sequence; identical to SEQ ID NO: 843
  chemically treated genomic DNA (Homo sapiens)

SEQ ID NO: 884 - DNA, 431 bp, Artificial Sequence; identical to SEQ ID NO: 844
  chemically treated genomic DNA (Homo sapiens)

SEQ ID NO: 885 - DNA, 451 bp, Artificial Sequence
  chemically treated genomic DNA (Homo sapiens)
ttgagggtagatttttaaggttggaggaagaagtcgtttttgggagtaggaggagttgttggattttttttttttaggtttttttttttgttttttagcgttttttgtaggtaggtaaataattttagtaggagtagtagtaggttttttagtcgtagggttgtagttttgttgaatgagagaagtttttttttggcgagttagaggagcgtaggttatatattcgggtttttatttttatgttttttattgtgtttaggattgagtttagcgtgggagatgcgggttggggtcgtgttggttatttttttttttttattttttgttttagttatgtttttagttttagggttgaggttagtggttagagtagattttatgatgttaggtagttttttattgggttggtttttggtaggattaggataggggtaggagggatttggagttg

SEQ ID NO: 886 - DNA, 451 bp, Artificial Sequence
  chemically treated genomic DNA (Homo sapiens)
tagttttagattttttttgtttttgttttggttttgttaaggattagtttagtgaggagttatttgatattatgagatttgttttagttattggttttagttttggagttgaaagtatggttggagtaagaggtggaagagagggggtggttagtacggttttagttcgtattttttacgttgggtttagttttgggtatagtgggagatatggaggtagagattcgggtatatggtttgcgtttttttgattcgttagagagaggttttttttatttagtagagttgtagttttgcggttgaagggtttgttgttgtttttgttggggttgtttgtttgtttgtaagaggcgttggggggtaggaaaagaaatttgggaggaggggatttagtagttttttttgtttttagaggcggtttttttttttaattttggaggtttgtttttaa

SEQ ID NO: 887 - DNA, 402 bp, Artificial Sequence
  chemically treated genomic DNA (Homo sapiens)
atttgggtttaggattttgtattttggaattttttgtttttttttgtgttgttataaggttaggaagtttgtaatttttatagtattaaggattttaaggaggtttaggagtaggttggtagaggttcgtggtaaaggtgtggtagtcgtgattttatttttttttttttacgtgtgtttgtgtttcgtggcgttattttatagatattttgtttgagaagggattatgtttgggaatttttagggtcggattttgattgtagaatttgacgaaaggggttttgtagggtttagaatgaggaggaggtaatgagaattatttttggaggattttagaagtagaggttgggagtatttataggtgaatggagtttgaattatgattagaaaggaattgggaga

SEQ ID NO: 888 - DNA, 402 bp, Artificial Sequence
  chemically treated genomic DNA (Homo sapiens)
ttttttaatttttttttagttatagtttaggttttatttatttgtggatgtttttagtttttatttttagaattttttagggataatttttattgttttttttttattttggattttgtaaagtttttttcgttaggttttgtaattaaagttcggttttgggaatttttaggtataatttttttttagatagggtgtttgtgaggtggcgttacgggatatagatatacgtgagagggggagagtagggttacggttgttatatttttgttacgggtttttgttagtttatttttgggtttttttagaatttttgatgttgtgagaattgtaggttttttggttttatgataatataaagggaaataagaggttttagaatgtagggttttgggtttagat

SEQ ID NO: 889 - DNA, 500 bp, Artificial Sequence
  chemically treated genomic DNA (Homo sapiens)
taaagtttgatagagaaggatgatttataggagtagttttgttgtgtttgaggattgtttgatatttgaaatgagtttcggattagtttttggttgaagtttatttaggtttttttcgcgaaggttaagttattagagttaattattatttttgttttattttgtttaaatatcgtcgtcggggttgataattgtatttagtgaatatttgtattggaattcggagtatttatttttttttatttgtagtttgaggaattttgattttttggtgatttttagaagtttttggacgtagttgttcgtgaggcggatttgttcgtcgtcggtttcggggttggacgatacgttcggagttttagggaggtcgcgaggagtttgtttttcggttaggaagtgatcgttgtttgcgtcgcggtttttaaggataatttttgggcggtaattatttttttttatttaggagattaatttttttgttgaggttttatttaaggttg

SEQ ID NO: 890 - DNA, 500 bp, Artificial Sequence
  chemically treated genomic DNA (Homo sapiens)
tagttttaggtggaattttaataaagaaattgattttttgggtggaggaagatggttgtcgtttaggggttgtttttaagggtcgcgacgtagatagcggttattttttggtcgaggggtaggtttttcgcggtttttttgggatttcgggcgtgtcgtttagtttcgaggtcggcgacgggtagattcgttttacggatagttgcgtttagaggtttttggaaattattaaaggattagaattttttaggttgtaggtggagggaggtagatgtttcggattttagtatagatgtttattggatatagttattaatttcgacgacggtatttgaatagggtggggtaagagtggtggttgattttgatagtttagttttcgcgaaaggggtttaggtggattttagttaagaattgattcgaagtttattttaagtgttaaataatttttaagtatagtaaggttgtttttgtgggttatttttttttgttaaattttg

SEQ ID NO: 891 - DNA, 480 bp, Artificial Sequence
  chemically treated genomic DNA (Homo sapiens)
gtttttatttattatagttgttagttttttttaattttaggaattttcgttttaagggaaataggatagatagcgttcgtgttttattttgtttatttttagatgaggaaatagttattaaggtttcgtgtaaattcgtcgtttatttaatagtttatattatttgttttgttttagtttttcgttcgttagttggtgtttttggtagttagtaggttcgcgggggtttcgttttagttaggttgggggtcgggggttgggttttaggaattttgttgttgttgttggggttgttttaagttagcgtggatagaagtttagagtttaggggtattttagggttgaggggtttaggttggtttttgggtttcgggtttagggtagttatttagggtgtgtgtttgtagttaattagggttgtggggaggaaggttttcggtattgttatagtttgtaggttttatgagtttggttttgggg

SEQ ID NO: 892 - DNA, 480 bp, Artificial Sequence
  chemically treated genomic DNA (Homo sapiens)
ttttaggattaggtttatgggatttgtagattgtggtagtgtcggggatttttttttttataattttgattggttgtaggtatatattttgggtgattgttttgagttcgagatttaagggttagtttgagttttttagttttgaggtgtttttgagttttgggtttttgtttacgttagtttggggtagttttaatagtagtagtagagtttttgaggtttagttttcggtttttagtttggttgagacggggttttcgcggatttgttggttgttaggaatattagttggcgagcgggaagttggagtaaggtaagtgatgtgggttgttgggtgggcggcgagtttgtacgggattttggtgattgtttttttatttgaaaatgagtagagtgggatacgggcgttgtttgttttgttttttttggggcgggggtttttaggattaggggaaattgatagttgtggtaggtggaggt

SEQ ID NO: 893 - DNA, 364 bp, Artificial Sequence
  chemically treated genomic DNA (Homo sapiens)
gggttaggggttttataggtgagtggagttttagtagtttttttagttttgcgtgtttatgtattggttttttttttggttttatatttagtgtttaaggggttgtagtgagacggggtttgggtcgcggagttgcgtttggttttgttgttttataagggtatcgtggttgttagtttgtttttgtaattgttgtagagttacgtagggttataggtggtggttggttgtgggatttattttttgtgtatgatatttttaggtattcggttgggtgcggttttggtagttagtagggtttttgtattagttggtttagtttgtgttagagggtatggtggttggtatttttttttatattatt

SEQ ID NO: 894 - DNA, 364 bp, Artificial Sequence
  chemically treated genomic DNA (Homo sapiens)
ggtggtatagaggaaggtgttagttattatgttttttagtatagattgggttagttggtgtagaggttttgttgattgttagagtcgtatttagtcggatgtttagaagtgttatgtataagaagtggattttatagttagttattatttgtaattttacgtggttttgtagtagttgtagggataggttgatagttacggtgtttttgtggagtagtaaagttaggcgtagtttcgcggtttaagtttcgttttattgtaattttttgaatattgagtatagagttagggagaagattagtatatgggtacgtagagttgagggggttgttggggttttatttatttgtgggatttttggttt

SEQ ID NO: 895 - DNA, 467 bp, Artificial Sequence
  chemically treated genomic DNA (Homo sapiens)
tgtttttattgggtagggtaaattatatcgtggttcgattataaaagttattttttaaaaaaagaagttttaaggttttcgagagacgtagttgagttttttatttggtagtgtttgatttaggaggtgatgtttgggttatgagttatagagtttggtgtttttttaagtagggagtataaatttttattttttttttttgttttttttgacgttagttggaaggcgtgtgagtgagtgaggggttgaggtatcgttcgcgcgagtatatatagatatatatatatatatatatatatatatatatatatattttttagatttattttttgtttgttagttttacgagttagagagagatagagcgcggacgtcgtaggaggtagtgtttggattttagttgtttaggagaggtgaggggttagatggggtttgaggatattgtgttagaaattgtggttttggtt

SEQ ID NO: 896 - DNA, 467 bp, Artificial Sequence
  chemically treated genomic DNA (Homo sapiens)
ggttaaagttatagtttttggtatagtgtttttaggttttatttagttttttattttttttgggtagttggggtttaggtattgttttttgcggcgttcgcgttttgtttttttttggttcgtggagttggtaggtaggggatgggtttggaagatgtgtgtgtgtgtgtgtgtgtgtgtgtgtgtgtgtgtttgtgtgtgttcgcgcgggcggtattttagttttttatttatttatacgttttttagttgacgttagggagagtaggagggagggatgagaatttgtattttttgtttaaagggatattaggttttgtggtttatggtttagatattattttttgagttaggtattgttaggtgagaggtttagttgcgtttttcgggggttttaaagtttttttttttggaaagtggtttttatggtcgggttacggtataatttgttttgtttagtgagggta

SEQ ID NO: 897 - DNA, 366 bp, Artificial Sequence
  chemically treated genomic DNA (Homo sapiens)
ggggagaaatgaaagtattgagtttaagtggtttgtagaatttcgggggtttaggcggtacggcgggcgttggggtttcgggtagagttttttggaggtttgtggtagttttatttttacggtatttatttttttcgggttttgtcgtagagaggaggaagtttttgtcggttgagcgggtttggaggaagtgagtagcggggtttttgtttttcggtttggttttcgaagattttagaagaattcggaatttgtttttattcggaatttagggattattttttgtatttagtaggtttttgtttttttgcgtggaaagcggttgggtgagttttggtatcggggttattatatttgagtgttggg

SEQ ID NO: 898 - DNA, 366 bp, Artificial Sequence
  chemically treated genomic DNA (Homo sapiens)
tttaatatttaagtatggtggtttcgatgttagaatttatttaatcgttttttacgtaggaaaataaaggtttattgagtgtaaagggtggtttttggatttcgaatggaagtaagtttcgggtttttttggggttttcggggattaggtcgggaggtaggagtttcgttgtttattttttttaggttcgtttagtcggtaggagtttttttttttttgcggtagggttcgaggggggtggatgtcgtgaaagtgaagttgttataaatttttagaaagttttgttcggagttttagcgttcgtcgtgtcgtttgggttttcggggttttgtaggttatttaaatttaatgtttttattttttttt

SEQ ID NO: 899 - DNA, 333 bp, Artificial Sequence
  chemically treated genomic DNA (Homo sapiens)
tttatatgatttagtggatgggtatcgtgaggaggtttttttaggaagtttttaatttggtgattattacggtgggttacgaacggacgagtgtagagtcggttagtcggattttttttaagcgtatttttttttttcgatatttggtttttcggagtcgggaattttttcgtcgtttttttgttcgtagttaatagagattttttttattgaggaaaaggtatatagattcggaatcgttagatattgtaagtttattatgttttaaaaaatattaaaataatattgaaagttttttttttttagtttttttagggagggggttttagatat

SEQ ID NO: 900 - DNA, 333 bp, Artificial Sequence
  chemically treated genomic DNA (Homo sapiens)
atgtttgggattttttttttgggaggattggaggggaggagtttttagtgttgttttaatattttttaaaatataataagtttataatatttggcggtttcgaatttgtatgttttttttttagtgaagaaaatttttgttggttgcgagtagagaagcggcggaaggattttcgatttcgggaagttaggtgtcggaaggaggaagtacgtttgaagggggttcggttggtcgattttgtattcgttcgttcgtggtttatcgtggtggttattaaattgagggttttttggaaggatttttttacggtgtttatttattgggttatgtggg

SEQ ID NO: 901 - DNA, 378 bp, Artificial Sequence
  chemically treated genomic DNA (Homo sapiens)
gttgtgagtttgttagaaggtgttgggggcgggtatagttatcgtttattattatttttaacggggtatcggtagttacgtggtcggaaggggtttatggcgtaatggttcggaaggtagtgatattatcgttttcgttttaagaattattcggttttttggggaagattggttgttggggagggttaaggggttaggtatttaggtttagcgattttacggtattttcgtcgtttttttaggtatttgttgtcgggttttggtaggggtttgtgtttgtggtagcgtacgtgggattggggtttttgtgtggttgtgtatttgggtttgtgtgcggcgtgagggagatttgtttcgtttattatggggattttggtt

SEQ ID NO: 902 - DNA, 378 bp, Artificial Sequence
  chemically treated genomic DNA (Homo sapiens)
gattagagtttttatggtgaacggaataggttttttttacgtcgtatatagatttagatgtatagttatatagaaattttagttttacgtgcgttgttataggtataggtttttgttagagttcggtagtagatatttggggaggcggcgagggtgtcgtggggtcgttaagtttgggtgtttggttttttggttttttttaatagttagttttttttaaagggtcggatggtttttaggacgggaacgatggtgttattgtttttcgggttattgcgttataggtttttttcgattacgtggttgtcggtgtttcgttgggggtggtggtgagcggtaattgtattcgtttttaatattttttgataggtttatagt

SEQ ID NO: 903 - DNA, 269 bp, Artificial Sequence
  chemically treated genomic DNA (Homo sapiens)
tttttggggaagattggttgttggggagggttaaggggttaggtatttaggtttagcgattttacggtattttcgtcgtttttttaggtatttgttgtcgggttttggtaggggtttgtgtttgtggtagcgtacgtgggattggggtttttgtgtggttgtgtatttgggtttgtgtgcggcgtgagggagatttgtttcgtttattatggggattttggtttgtatgtgggggtttttgggttggtgagatttagggttgtagatga

SEQ ID NO: 904 - DNA, 269 bp, Artificial Sequence
  chemically treated genomic DNA (Homo sapiens)
ttatttatagttttggattttattagtttaggaatttttatatgtagattagagtttttatggtgaacggaataggttttttttacgtcgtatatagatttagatgtatagttatatagaaattttagttttacgtgcgttgttataggtataggtttttgttagagttcggtagtagatatttggggaggcggcgagggtgtcgtggggtcgttaagtttgggtgtttggttttttggttttttttaatagttagttttttttaaagg

SEQ ID NO: 905 - DNA, 496 bp, Artificial Sequence
  chemically treated genomic DNA (Homo sapiens)
tttttggttagatttggagtttataagttaattttagaaatgattggtcgatttagttgttgttattatattggtttagaaggagggtggggggaggacgggtcggggaggggtagtaaggggaagggatgtgtgtcggtgtgtgtggagagggtgttttttcgtttttgttttttcggttcggtggggttttttcgcggttattcggggagacgttttagatagtcgtggtttttgtgatttgtgttttttttgtagaaggtattattgggttgggttttagacgggtattttgcgagcggatcggcgagttttaatttttcggaatgcgttgttgggggttgcggtggtaggttttcggttttttggtttattttaggtttttttggtgttgagagttttcgaggtttgatttttttgtttgttgttcgtgttgtttattttgaaaataagagtgtttcggtggaaggatttgagaataaaatgttggggtaaa

SEQ ID NO: 906 - DNA, 496 bp, Artificial Sequence
  chemically treated genomic DNA (Homo sapiens)
tttgttttagtattttgtttttaaatttttttatcgaaatatttttgtttttaaagtgagtagtacgggtaataggtaaaggaattaggtttcggaagtttttaatattagaaaggtttaaaatagattaaaagatcggaggtttgttatcgtagtttttagtagcgtatttcggaaaattaaaattcgtcgattcgttcgtaaggtgttcgtttaaaatttagtttaatagtattttttgtaaagaggatatagattataggaattacgattgtttaagacgttttttcgggtggtcgcgaagggattttatcgagtcgggaaagtaggagcgaaggagtattttttttatatatatcgatatatattttttttttttattgttttttttcgattcgttttttttttattttttttttgggttaatgtgatagtagtagttgagtcgattagttatttttaaaattagtttgtgagttttaggtttggttaggag

SEQ ID NO: 907 - DNA, 285 bp, Artificial Sequence
  chemically treated genomic DNA (Homo sapiens)
aggggtagtttttttttattatagggattttgtgtgttaggttttagttgcgttgtcgttgaattatggatttaatagtagagaagttttgtaggtcgtttgtgttggttcgggaaatcggggtttagtcggggtttgttacggttttggtgtcgttttgttttttgtcggcgttacggagtaagcggagagatttattttttcggttttaagaggtattaacggaggaggttgagaggtaggagttgaataattgatggttttttttggtttaggatttgttga

SEQ ID NO: 908 - DNA, 285 bp, Artificial Sequence
  chemically treated genomic DNA (Homo sapiens)
ttagtagattttgagttagagaaggttattaattatttagtttttgttttttagtttttttcgttagtattttttaaagtcgggaagataaattttttcgtttgtttcgtggcgtcgataggaagtagggcggtattaggatcgtgataggtttcggttgggtttcggtttttcgagttagtataggcggtttgtaaggtttttttgttattaaatttataatttagcggtaacgtagttggggtttggtatatagggtttttgtgatgaggaggggttgttttt

SEQ ID NO: 909 - DNA, 448 bp, Artificial Sequence
  chemically treated genomic DNA (Homo sapiens)
tttttttttagttgtttgagggttggttggtgtgagtttaggtttttgtagggtatgttaggagtaagttgtgatttggtttcgggttgtggagtttatgttattttttattgaggattttgggttgttttgtttcgcgtacgggtattcgggttttgatagttcgtcgggttttgggttattagaggttttgaattgcgttttggtgatagttagttttttgtatggggtacgtatagatttgggtttaggttggggtatcgagatttttatatttagtagtcgcggtgaggttggtttgtttgtttttcggggttatttttgtcgtgtcgtttttttttttttttttgttttttttgttggttgtttttttttcgttttttttgggtaggtacggtcgggtgggggtgaggttttggtaaagttttttttgttttttagtttagtg

SEQ ID NO: 910 - DNA, 448 bp, Artificial Sequence
  chemically treated genomic DNA (Homo sapiens)
tattgggttggaaaatagagggggttttgttagaattttatttttattcggtcgtgtttgtttagagagggcgggggaggagtaattaatagagggggtaggggagagggaggagacggtacggtagaggtggtttcgggaagtaggtaggttagttttatcgcggttgttggatgtggggatttcggtgttttagtttaggtttaggtttgtgcgtgttttatgtaaggggttgattgttattaggacgtaatttaaggtttttggtggtttagggttcggcgggttattagaattcggatgttcgtacgcgggatagagtagtttaggatttttagtggagagtagtatgggttttatagttcggggttaggttatagtttgtttttggtatattttataggagtttgggtttatattagttagtttttaggtagttgaggaagga

SEQ ID NO: 911 - DNA, 374 bp, Artificial Sequence
  chemically treated genomic DNA (Homo sapiens)
tttgttgggtatagtgggtaatgggttggtgttggtagtgtttttgtagtttggttcgagtgtttggtaggagtttggtagtattacggatttgtttatttttaatttggcggtggttgatttttgttttattttgtgttgcgtgtttttttaggttattatttatacgttggatgtttggttttttggggttttcgtttgtaaggtcgtgtatttgtttatttattttattatgtacgttagtagttttacgttggttgttgttttcgtggataggtgcgttgtgtttggggtttggttgggtagggttgtgggggcgggggttgggggaggagttttgaatagatttttattggttttaggaaggagagagt

SEQ ID NO: 912 - DNA, 374 bp, Artificial Sequence
  chemically treated genomic DNA (Homo sapiens)
atttttttttttttaaggttagtgaggatttgtttaggattttttttttaattttcgtttttatagttttgtttagttaggttttaggtatagcgtatttgtttacggagatagtagttagcgtaaagttgttggcgtatatggtgaggtagatgagtaggtgtacggttttgtagacgagggttttaaagagttaggtatttagcgtgtagatggtggtttggaagggtacgtagtataggatgaagtagaggttagttatcgttaggttgaggatgaataggttcgtggtgttgttaggtttttgttaggtattcgggttaggttgtaggagtattgttagtattagtttattgtttattgtgtttagtagg

SEQ ID NO: 913 - DNA, 500 bp, Artificial Sequence
  chemically treated genomic DNA (Homo sapiens)
ggagatggttgatgtttagaatattttattggatagtttagggagtgtgggggtcgtggtagtgtttgtggtttttgttttaatttttttgttgggtatagtgggtaatgggttggtgttggtagtgtttttgtagtttggttcgagtgtttggtaggagtttggtagtattacggatttgtttatttttaatttggcggtggttgatttttgttttattttgtgttgcgtgtttttttaggttattatttatacgttggatgtttggttttttggggttttcgtttgtaaggtcgtgtatttgtttatttattttattatgtacgttagtagttttacgttggttgttgttttcgtggataggtgcgttgtgtttggggtttggttgggtagggttgtgggggcgggggttgggggaggagttttgaatagatttttattggttttaggaaggagagagtgggggattagaaagggaggtgggtgggaggaaataaaag

SEQ ID NO: 914 - DNA, 500 bp, Artificial Sequence
  chemically treated genomic DNA (Homo sapiens)
tttttgtttttttttatttatttttttttttggttttttatttttttttttttaaggttagtgaggatttgtttaggattttttttttaattttcgtttttatagttttgtttagttaggttttaggtatagcgtatttgtttacggagatagtagttagcgtaaagttgttggcgtatatggtgaggtagatgagtaggtgtacggttttgtagacgagggttttaaagagttaggtatttagcgtgtagatggtggtttggaagggtacgtagtataggatgaagtagaggttagttatcgttaggttgaggatgaataggttcgtggtgttgttaggtttttgttaggtattcgggttaggttgtaggagtattgttagtattagtttattgtttattgtgtttagtaggaagattagggtaaagattataggtattgttacggtttttatattttttgggttgtttagtgaaatgttttgggtattagttattttt

SEQ ID NO: 915 - DNA, 419 bp, Artificial Sequence
  chemically treated genomic DNA (Homo sapiens)
gttgggtttaatttttttttaggggaattttaagataaagttgggggatgggagtttaggtagaaattgttgggggaattgagttagagttgaaagttttttttgtgatttttatttttagttttttggttggtttataggggtcgggagggaggtagggggatattatttggttgagatatggggcggtggtagcgcgcgttttttagtttttttcggtgttgggatcgtggttatttttttagggttttgttgagttttggttgttggggtcgtaaagattaaaagtttagagttagtttattttttgtgtagaggatagaggggtaaggtttggggtggagaggcggggagacgaggtttatgagaaagtttgaaattttttaagtatttagggttagataaagatttgtttttta

SEQ ID NO: 916 - DNA, 419 bp, Artificial Sequence
  chemically treated genomic DNA (Homo sapiens)
taggaggtagatttttatttggttttgggtgtttgaggagttttaggtttttttataagtttcgttttttcgtttttttattttaggttttgtttttttattttttgtataggaagtgggttggttttgggtttttagtttttgcggttttagtagttagagtttagtagggttttggagagatggttacggttttagtatcggggaggattggagagcgcgcgttgttatcgttttatgttttagttaggtgatgtttttttgtttttttttcggtttttgtggattagttagagggttgggagtgaaagttatagagaagatttttagttttgatttagtttttttagtagtttttgtttgaatttttattttttaattttgttttagaatttttttagggaggggttgggtttagt

SEQ ID NO: 917 - DNA, 483 bp, Artificial Sequence
  chemically treated genomic DNA (Homo sapiens)
aggtttgtaatggtgttggtatttgttagagtaaagtagaatttttttttttttagattttagtggttgagttgggtcgttagggtagggatggtgagggtttaaatgttagggtagagtaggttacggtatttcgtttatttataaatgttttcgtagattttggtgatggttgtattgggggtgtagtttttagaattattcgaagtttacgtagattgtttttttaagtacgggggtgggggaggttggttttttgagtagggttcggtttttgtattagtgtagttttattttttttttagtttaggtttaggttgttgggggtgtagagagggcgagttgtaagtggaggtgagaagggagttcgtgggacgtaggtttagagagaagttttcgaggaatttttttgttttttttacgagcggagttttggggtagtttcgtgtttttgttatagttattttaggagatgatggttgt

SEQ ID NO: 918 - DNA, 483 bp, Artificial Sequence
  chemically treated genomic DNA (Homo sapiens)
atagttattattttttgagataattgtggtagaaatacggagttgttttaaggtttcgttcgtgaagggaatagagaggtttttcggaggtttttttttgagtttgcgttttacgagttttttttttatttttatttgtagttcgttttttttgtatttttagtagtttggatttgggttgggagggaggtggggttgtattggtgtagaggtcgggttttgtttagggggttagttttttttattttcgtgtttgggggagtagtttacgtgagtttcgagtggttttgggggttgtatttttagtatagttattattagggtttgcggagatatttgtgggtggacgggatgtcgtggtttgttttgttttggtatttgaatttttattatttttgttttgacggtttagtttagttattggagtttgggaggagggaggttttgttttgttttgatagatgttaatattattgtaggttt

SEQ ID NO: 919 - DNA, 439 bp, Artificial Sequence
  chemically treated genomic DNA (Homo sapiens)
ttgatgtttttttttagtttttattttttttttagaagttttttttttttgtttcgagaggggttgagttagtcgtggtttttttttatttcgattttagtggagataagtcggggaagtttttgggagttgcgcgggtgagtagagttgagattcggtatggttgtattggtcgggttattgtagggtgattggcggttcggtttgataatacgtttatttgagttatttttggtaaaggttattaggttttaggatggaatacgtatgggggaaatgtttttttcgtgatacgtttatttcgttttaaagtgagacgagggagggagggcgcggttgttaggtaatgaagtttagagtttattagagttgagggattgatgtgttgcgtatgggttgggttttatttttaggaagtttaggataaaattttgtttat

SEQ ID NO: 920 - DNA, 439 bp, Artificial Sequence
  chemically treated genomic DNA (Homo sapiens)
atgaatagggttttgttttgagttttttggaaatgagatttagtttatacgtaatatattaattttttaattttagtaaattttagattttattatttggtagtcgcgttttttttttttcgttttattttagagcgaggtgggcgtgttacggaagaggtattttttttatgcgtgttttattttggagtttggtaatttttgttaaagatgatttaggtaaacgtgttattaagtcgagtcgttagttattttgtagtgattcggttagtatagttatgtcgggttttagttttgtttattcgcgtagtttttagaaattttttcggtttgtttttattggaatcgggatggaagggagttacggttggtttagtttttttcggagtagaaagaggaaatttttgaaaagaagatgggggttgggggaggatattaa

SEQ ID NO: 921 - DNA, 450 bp, Artificial Sequence
  chemically treated genomic DNA (Homo sapiens)
aggtatatttgtttagtttttggttacgtgggtatttggcgttgagtatttatttgttcgtgttgattgatgtttttttttagtttttattttttttttagaagttttttttttttgtttcgagaggggttgagttagtcgtggtttttttttatttcgattttagtggagataagtcggggaagtttttgggagttgcgcgggtgagtagagttgagattcggtatggttgtattggtcgggttattgtagggtgattggcggttcggtttgataatacgtttatttgagttatttttggtaaaggttattaggttttaggatggaatacgtatgggggaaatgtttttttcgtgatacgtttatttcgttttaaagtgagacgagggagggagggcgcggttgttaggtaatgaagtttagagtttattagagttgagggattgatgt

SEQ ID NO: 922 - DNA, 450 bp, Artificial Sequence
  chemically treated genomic DNA (Homo sapiens)
atattaattttttaattttagtaaattttagattttattatttggtagtcgcgttttttttttttcgttttattttagagcgaggtgggcgtgttacggaagaggtattttttttatgcgtgttttattttggagtttggtaatttttgttaaagatgatttaggtaaacgtgttattaagtcgagtcgttagttattttgtagtgattcggttagtatagttatgtcgggttttagttttgtttattcgcgtagtttttagaaattttttcggtttgtttttattggaatcgggatggaagggagttacggttggtttagtttttttcggagtagaaagaggaaatttttgaaaagaagatgggggttgggggaggatattaattagtacggataagtaagtatttagcgttaggtgtttacgtggttaggaattaaatagatgtgttt

SEQ ID NO: 923 - DNA, 481 bp, Artificial Sequence
  chemically treated genomic DNA (Homo sapiens)
ttatttaggttatttttttgtttgtatgaattttaggttatttttagaaagggttttatagtttcggtgttttattttttgatttttgttaagtcgtttttagtagtagttggaattttttgaagtggttgttatagatgttggtaaagttcggtttgggatgtttttattttgtattaggtacggggttgtttttgttgtatatttatttggaaattatttatatgttaagtatcgtagaggtaaggggagtttgttattggattgcgtttaatacggttgtagggatatagataagtatattttttggtagaggtacgggttcggttggttggagttgtagtagttgtgtgtggttatagagtttttaaatgagggagatggatggtttcgttttatagtgtgtttagagtatgtttacggtgtttgggaagattagggatttattatgttcggttttggttttttttatagtgaagtt

SEQ ID NO: 924 - DNA, 481 bp, Artificial Sequence
  chemically treated genomic DNA (Homo sapiens)
ggttttattgtgagggaaattagagtcgggtatggtgagtttttggtttttttaggtatcgtggatatgttttgggtatattgtgaagcgaggttatttattttttttatttggaagttttgtgattatatatagttgttgtagttttagttagtcgggttcgtgtttttgttagggaatgtgtttgtttgtatttttgtagtcgtgttgaacgtagtttaatggtagattttttttgtttttgcggtgtttggtatgtggatgatttttaggtgaatatgtagtagaggtagtttcgtgtttggtgtagggtggaggtattttaggtcgggttttgttaatatttgtggtagttattttaaagagttttagttgttgttgaagacgatttggtaaaggttagagagtgagatatcggggttatgagattttttttaagggtggtttgaggtttatataagtaaagagatgatttgggtga

SEQ ID NO: 925 - DNA, 223 bp, Artificial Sequence
  chemically treated genomic DNA (Homo sapiens)
ttttgttgtttaaaattttgttagtttttaggaagtgttgttttgttaaaagtttgtatacgagattttcgtgggttaggattgattttttttttatatagggttgggcggggtaagtaggaaggagtttgttatagttaaggtgacgtatttttgtcgggttagttcgaatagtagttgggtcggtaagcgataggagtacgggttattttttttttagagg

SEQ ID NO: 926 - DNA, 223 bp, Artificial Sequence
  chemically treated genomic DNA (Homo sapiens)
tttttggggaaaagatgattcgtgtttttgtcgtttgtcgatttagttgttgttcgggttggttcggtaaggatgcgttattttgattgtaataggtttttttttgtttgtttcgtttagttttgtgtggggaggaagttagttttggtttacgggggtttcgtgtgtaggtttttgataaaatagtattttttaaaaattggtagagttttgagtagtaggg

SEQ ID NO: 927 - DNA, 495 bp, Artificial Sequence
  chemically treated genomic DNA (Homo sapiens)
tttataggtttttttttttttgggattggttagattttttttagatggttttatttttgttatggttgattggtttaggttggatacgtgatttaagtgaaatttaatgggatttttttttgtgattttgaattcggggaggagatttggagtttggaggtggtagcgatttgggagtcgcgtgggtttgtttgttttatatattgtttttttgtttttttttttaatttatggtttttttagaggataatttttttttttaaatttttcggacgaggtttttgtggtagtcgagagagttacgtagcgggggtgtttttttcgtttgtgggggagttttaggcggttcgtatagtttcgtggtggtcgggtttggttacgtgtgtttttcggtttttatgtggttttagtagggcgttcgttttttttttagggtttttttttttaggagggatagtaggaaggtaggtaaggataggatttgagtttatattt

SEQ ID NO: 928 - DNA, 495 bp, Artificial Sequence
  chemically treated genomic DNA (Homo sapiens)
aggtgtggatttaggttttgtttttgtttgtttttttgttattttttttgggggaggaagttttgggagggaggcgggcgttttgttggggttatatggggatcgaggagtatacgtggttaggttcgattattacgagattgtgcgggtcgtttggggtttttttataggcggggaaggtattttcgttgcgtgattttttcggttgttataggaatttcgttcgaggagtttaaggaaaaaggttgttttttgagggggttataggttgaaggaaggggtaagaaggtagtgtgtggaatagataggtttacgcggtttttaagtcgttgttatttttaggttttaggtttttttttcgggtttagaattataggagagaattttattgggttttatttgggttacgtgtttagtttggattaattagttatggtaggggtggggttatttggagggagtttggttagttttagagaagaaagagtttgtggg

SEQ ID NO: 929 - DNA, 390 bp, Artificial Sequence
  chemically treated genomic DNA (Homo sapiens)
tagatgggtatatttttttttttttattttatggttgttttagttttagtagttagtttgaaggatttttagggggtagttattttgtttcggttttttttaggttgggaagtgggagtttgtgtttttaaatttttagtaggttgaaatggttgatgatattattggttttcgggagcggtagagttggagtcggagttaagggagtttaggttgtcgggggttgtagatatggagggttagagtagtaggggtagtaggaggttagggattcgggttggtttgggttttttgtttatgttttagggtgttgtttaaattggggtattttttaaggtaagatttttgagatttagtgtttttcgtttttttgatttttggttttatata

SEQ ID NO: 930 - DNA, 390 bp, Artificial Sequence
  chemically treated genomic DNA (Homo sapiens)
tgtgtggaattagggattaggaaagcggggggtattgggttttaggggttttattttggagggtgttttagtttgggtaatattttggggtatgggtagggaatttaggttagttcgggtttttggttttttgttgtttttgttgttttggttttttatgtttgtagttttcggtagtttggatttttttggtttcggttttagttttatcgttttcgggaattagtgatgttattagttattttaatttgttgagaatttaaaggtataggtttttattttttagtttggaagaggtcgaagtaaggtggttattttttgggaattttttaaattggttgttgaggttggaatagttatggagtggggaggggagagtgtatttatttg

SEQ ID NO: 931 - DNA, 497 bp, Artificial Sequence
  chemically treated genomic DNA (Homo sapiens)
tagttttatttgttttgtttgtttttagtagatattgtttttttttttatttttaaagtttttattcggtttagatttttttttgagattagtattatttaatagttttttataaaaaattgtttttttgattatcgagggtaataatgaaaatacgtaattgaatttttaagaaattattatttttataatttgcgtttagttttcgagataaattaaacgttttttttgtatggtgagtcgtttattgcgtattagagaggggttgatattgttttttattatcgatgcgggatttattaagaagaatgttttatattgtttttcgggaggtttttggtatttttagtttatggttttgagcgggtagagttggttagttggaggcgtcgggcgggtggttaggtgggtttttttttgattatttttggttttgttattggttagttgcgtggtggtgtgggtggtaagtgggagggttagttagaattttagtt

SEQ ID NO: 932 - DNA, 497 bp, Artificial Sequence
  chemically treated genomic DNA (Homo sapiens)
ggttaagattttgattggtttttttatttattatttatattattacgtagttagttagtaatagggttaggagtgattaggagggggtttatttgattattcgttcggcgtttttagttggttaattttgttcgtttagggttatgagttggaggtgttaggagtttttcgggaggtagtgtgaggtattttttttagtaagtttcgtatcgatgataaagggtagtattagtttttttttgatgcgtagtgagcggtttattatataggggaggcgtttaatttatttcgggaattgggcgtaagttataaaaatggtaattttttggagatttaattacgtgtttttattgttattttcggtaattaaggaaataattttttataaaaggttgttggatgatattgattttaggagaggatttgggtcgggtgggggttttgggaatgaagaggagggtagtgtttgttgggggtaggtagggtaagtggagttg

SEQ ID NO: 933 - DNA, 349 bp, Artificial Sequence
  chemically treated genomic DNA (Homo sapiens)
taggtatggtttatttttttttttttcgttggtgttttttattagggattttattttgttttgttgttcgtttttttttggtttttgttggattttttttaagcgttcggtatgttttttattgattttgaagagtggttagtgttttttgtagttcgggttcgggggtgtggatgaaggagttttaggtagttttatgagtatagagagtatcgtaggttgcggtgagtttcggtttatttttttagttatatgattgtagttttttatgcgtattttagcgggtatggattagggttagtttttgagtatttttggttaggaagtttaggtattttagtgggttgtt

SEQ ID NO: 934 - DNA, 349 bp, Artificial Sequence
  chemically treated genomic DNA (Homo sapiens)
ggtaatttattggggtatttgagttttttggttaaggatgtttagggattggttttgatttatgttcgttgggatgcgtataggaggttgtagttatgtagttgggaggatgagtcggagtttatcgtagtttacggtgttttttgtgtttatgagattgtttggggtttttttatttatattttcggattcgagttgtagagagtattggttattttttagagttagtgggaggtatgtcgagcgtttgaggagagtttagtaggggttaggaagaagcgagtagtagggtagagtggagtttttggtggagggtattagcgagagaagagaggatggattatgtttg

SEQ ID NO: 935 - DNA, 355 bp, Artificial Sequence
  chemically treated genomic DNA (Homo sapiens)
tagaatttttaattttatattatagtgtgttaggtatggtttatttttttttttttcgttggtgttttttattagggattttattttgttttgttgttcgtttttttttggtttttgttggattttttttaagcgttcggtatgttttttattgattttgaagagtggttagtgttttttgtagttcgggttcgggggtgtggatgaaggagttttaggtagttttatgagtatagagagtatcgtaggttgcggtgagtttcggtttatttttttagttatatgattgtagttttttatgcgtattttagcgggtatggattagggttagtttttgagtatttttggttaggaa

SEQ ID NO: 936 - DNA, 355 bp, Artificial Sequence
  chemically treated genomic DNA (Homo sapiens)
tttttggttaaggatgtttagggattggttttgatttatgttcgttgggatgcgtataggaggttgtagttatgtagttgggaggatgagtcggagtttatcgtagtttacggtgttttttgtgtttatgagattgtttggggtttttttatttatattttcggattcgagttgtagagagtattggttattttttagagttagtgggaggtatgtcgagcgtttgaggagagtttagtaggggttaggaagaagcgagtagtagggtagagtggagtttttggtggagggtattagcgagagaagagaggatggattatgtttggtatattgtggtgtggagttggagattttg

SEQ ID NO: 937 - DNA, 475 bp, Artificial Sequence
  chemically treated genomic DNA (Homo sapiens)
ttattttttatttattttttttagagatatttaagatattaatagtaggattgggatgtgtttacgaaaagaatttaaattttagtttaagttataggtataaagtatagtttaatagatagggaaggggtagggtaagggagtgtgattttggcggtagttggagaaggtattgttggagtatgtttaggaggagttcgttagtgttagggtaatgggataggaagggtaagttaagttcgagtttagggaatgtaaaggaaatagtagttatgttttttttacgtcgttttggtatttttaagtagtttcgtataaaatttttgcgtatatatatatatgtatgtttattttttttttttttttttttttttttttatttgtttgatagttttttttaggtttggattttacgtttgatttttgttttggtaagtttgtttttttttttagtttgttaggggtatattttgta

SEQ ID NO: 938 - DNA, 475 bp, Artificial Sequence
  chemically treated genomic DNA (Homo sapiens)
tgtagagtgtgtttttggtaggttggaggggaggataagtttgttaggataaaggttagacgtagaatttagatttgaaggaaattattaggtagatagagagagagagagagagagagagagagtgagtatgtatgtgtgtgtgtgcgtaaagattttatgcggagttgtttggaaatattaagacgacgtaaaggaaatatggttgttgttttttttatattttttgggttcggatttggtttgttttttttgttttattgttttggtattggcgagttttttttggatatattttagtagtgttttttttagttgtcgttagggttatatttttttgttttgttttttttttgtttgttgggttgtattttgtgtttgtggtttgagttaggatttgggtttttttcgtaaatatattttagttttgttgttgatgttttaagtatttttaagaaggataaatgaggagtga

SEQ ID NO: 939 - DNA, 223 bp, Artificial Sequence
  chemically treated genomic DNA (Homo sapiens)
ttttattttttgttttgggttaggtgggtattattaggggtttttttggtaaggagtatcgggtaggtattcggttttgttaatttattattggaatagttggggggatagtagataggtacggtcggatagatttgatagattaggtattaggttttttgcgttggtttcgggttttttaagtaggaacgtgaatggttttaagatgttttatatggtttta

SEQ ID NO: 940 - DNA, 223 bp, Artificial Sequence
  chemically treated genomic DNA (Homo sapiens)
tgggattatgtgagatattttgaggttatttacgtttttgtttaaagagttcgggattagcgtagagggtttgatgtttgatttgttaagtttgttcgatcgtgtttgtttgttgtttttttagttgttttagtggtggattggtaggatcgggtgtttattcggtattttttattaaaggagtttttggtagtgtttatttagtttaggataaggagtggaa

SEQ ID NO: 941 - DNA, 448 bp, Artificial Sequence
  chemically treated genomic DNA (Homo sapiens)
gttttatgtttaggttttagtttcgtttattgtaattttgtgttcgttatgtttagtaggtttttgttttagtttagtttttagagagtagattttaggtgttggtttcgggggttttggtttgagttttagttattgtgttatgttttcggaattgggattaaggttatcgttttaggtaagtggtttttaattttttttagtttgttttattttttgttgtttttggaaaatttgttttttttttttggggtttttttttttttgtttttttagttttaagtattgatttttatttttttttatggggtttggaggaggtgtattagttttcgggtaatcggtaggaagggtttttatagtgggagtagtcggatgtagtttggtttcggggtttgagttgggattgggtagggttagggtttttttttttttttagggtagatgt

SEQ ID NO: 942 - DNA, 448 bp, Artificial Sequence
  chemically treated genomic DNA (Homo sapiens)
atatttgttttggaagagaggaggagttttgattttgtttaattttagtttaggtttcgggattaggttgtattcggttgtttttattgtggaggttttttttgtcggttattcggagattaatgtattttttttaggttttatggagaaaggtaagggttagtgtttaaggttgggaggatagaggggaggaagttttagagagagaaaatagattttttagggatagtagagggtgagataggttgggaaaggttgagagttatttatttaggacggtgattttggttttagtttcgaagatataatatagtgattgaggtttagattaaaattttcggggttagtatttggggtttgttttttgggggttgggttggagtaggagtttgttgggtatgacgggtatagggttgtagtgggcggggttgggatttagatatgaggt

SEQ ID NO: 943 - DNA, 383 bp, Artificial Sequence
  chemically treated genomic DNA (Homo sapiens)
tttaattttattttgttggtttagaagtaggacgaggggagagataaagttaaatttttgattagttttttttgttttggttaggaagttagagtgtgagagtgtgcggggttcggtattcggttttattcggttattcgtgttgaataggatgttttgaaggacgataaggttgtttcggattttgatgttacgtttgttttaaatttttgacggggagaaacgcggggcgttacgcggtatttttaggttatcggtttttattttgggatttaggtgagaagttagggtttcggggttttttgtgattttttggtttttgtttatggagggtagtcgtttgattaaaataggattttttttttttaaggtatatttttaag

SEQ ID NO: 944 - DNA, 383 bp, Artificial Sequence
  chemically treated genomic DNA (Homo sapiens)
tttggaaatgtgttttgggagagaaaggttttgttttagttaaacgattgttttttatgggtaaaggttaagaggttataggggatttcgagattttggttttttatttgaattttagagtgggaatcggtgatttggaggtgtcgcgtggcgtttcgcgttttttttcgttaaggatttgaaataagcgtggtattaggattcgaggtagttttgtcgttttttagggtattttgtttagtacggatggtcgagtggggtcggatgtcgagtttcgtatatttttatattttggttttttgattagggtagggggagttggttaagggtttggttttgttttttttttcgttttatttttgggttagtaggatgggattgga

SEQ ID NO: 945 - DNA, 293 bp, Artificial Sequence
  chemically treated genomic DNA (Homo sapiens)
gggttgttagggattgagttttgagttagtttgagatttaggaaatttcgttaggagggagaagggagaagtagattttggatattagaaagttaggggaagggttataaaaggagtggatgtgacggaagggcgggtttttgggtttttttagaatatattttttgtgtttagggggattagaggggtagagtttattgcgtgaaagttttattgttatgattaggtagtcgggacgtggggtggatgttagaaaagattttacggaataagagagagtttaggatagtagg

SEQ ID NO: 946 - DNA, 293 bp, Artificial Sequence
  chemically treated genomic DNA (Homo sapiens)
tttgttgttttgggtttttttttatttcgtggagttttttttggtatttattttacgtttcggttatttggttatagtagtggggtttttacgtagtggattttgtttttttgatttttttgggtataggggatatgttttgaagagatttaggagttcgttttttcgttatatttattttttttgtgattttttttttggttttttggtgtttagagtttgtttttttttttttttttttgacggggttttttgagttttaggttggtttagggtttagtttttggtagttt

SEQ ID NO: 947 - DNA, 388 bp, Artificial Sequence
  chemically treated genomic DNA (Homo sapiens)
ttttgaggggttgaattgttttttattttttggaagttgggaggttggaagaggggatgcgtgcgatggatttagtatatagttgggaattcgaggtatatttaagttttcgtttgtgttgtgcggagtttatatttttttttttattggggttttaaaatttttttttatttaatagggtggtgttgtttaaagttttgggtatatattagggttggggagggggtggtggagagggggttttagtttgtttaattattaggtaacggggtatttgttttttttttagttgggtttggattcgcgttttaggtttaggttgtaatgttttttttttttttttttttttttttttgtagtttcgttgggttttgtttaggatagataa

SEQ ID NO: 948 - DNA, 388 bp, Artificial Sequence
  chemically treated genomic DNA (Homo sapiens)
ttatttgttttgggtaggatttaacggaattgtaaaaagaagagaaagagaaagagaaaggtattgtagtttgagtttgggacgcgggtttagatttagttgagagaggggtaggtgtttcgttgtttggtggttgggtaggttggagttttttttttattattttttttttagttttaatgtgtgtttagagttttgagtagtattattttgttgagtgaggggaggttttgagattttagtggggaaggaagtgtggatttcgtatagtataagcgaaggtttaggtgtgtttcgagtttttagttgtgtgttgagtttatcgtacgtatttttttttttaattttttagtttttagaaggtggggggtagtttagttttttagag

SEQ ID NO: 949 - DNA, 267 bp, Artificial Sequence
  chemically treated genomic DNA (Homo sapiens)
ttttggtttgattttttttttgtaggttggggtgggaatgggagagtcgtattgtgtttagttgggttggatatcggagatttgggttttttttttttttttatattgggttttatttttttttgatttatcgatagtgatttttttcgttattttagtttttcgtttttatttaggttacgttatttgatttggaggatagtgttggtggttagaaatatgattgtttgttttagagttttttgttttggtaagttttagatgttt

SEQ ID NO: 950 - DNA, 267 bp, Artificial Sequence
  chemically treated genomic DNA (Homo sapiens)
gggtatttggggtttgttagggtaggaggttttgggataggtagttatatttttggttattagtattgttttttaggttagataacgtggtttgggtagaggcggggaattggggtggcgagagggattattgtcgataggttaggaaaggatggggtttaatgtggggaaaagaaaaagatttaggttttcgatatttaatttagttgagtatagtgcgatttttttatttttattttaatttataaagaggaagttaggttaggg

SEQ ID NO: 951 - DNA, 408 bp, Artificial Sequence
  chemically treated genomic DNA (Homo sapiens)
ttttttgttttagttaggaattttgtggggttgatgagggttaatattttattttttttttttttcgtggttgatttttgggggtggtgatttggttttttttttttttgttaaagttagagttgttgacggtttgttattggttttttagttagggttggtttttgtttttgtggtttagttgttgagtcggggttttgttttttaggggttttttttttttttttgtttataagagttcgatttcggttggttttagatttgatatgttttttgggtttatttcggtaagttttaggtttggaggaggggtgggattagagttttgagtgagtattttgggaggcgaggaatttaggtttttagttttagggatgttattgtgttattttgaatgttatttttatt

SEQ ID NO: 952 - DNA, 408 bp, Artificial Sequence
  chemically treated genomic DNA (Homo sapiens)
gatgaggatggtatttaggatgatatagtgatatttttaggattggggatttgggtttttcgttttttagaatgtttatttagaattttgattttattttttttttaaatttgggatttatcgagataggtttagggaatatgttagatttgagattagtcgaggtcgggtttttataggtagggagggaagaggggtttttgggagataaagtttcgatttagtaattgggttatagaaataaaagttagttttggttgaagagttaatggtaagtcgttagtagttttggttttagtagggagggaaaggattagattattatttttagggattagttacgaagaaggagagaggtggaatattggtttttattagttttataaggtttttgattagagtaggaga

SEQ ID NO: 953 - DNA, 432 bp, Artificial Sequence
  chemically treated genomic DNA (Homo sapiens)
aaaatagttttgttttatttattttgcgtattttattttttgttttagtttcgtcgggttcgttttgtatgtaaggcggggttgggatttagggtttgagtttcgttttttggatattcggtttatcgtttgttaaaggttttgtggttggaggtttcggtttttttatttttttatagggttttagggtcgatttaggtttgcgggttaggaatgtgttaacggggtaatttgggttttgttggtttacgtaggtatttgtggattttgagaggggattgggtggggaggggcggggaggggcggggcggggcggtgtcgtagagtgtagggcgggcggggttaggttagtagggagtgagtttgtttggtcgtttcgtttcggagttattgtattgttggttgtagatataggttgtattatgaagttag

SEQ ID NO: 954 - DNA, 432 bp, Artificial Sequence
  chemically treated genomic DNA (Homo sapiens)
ttggttttatggtgtagtttgtgtttgtagttagtagtgtagtggtttcgaggcgaggcggttagataagtttattttttgttggtttggtttcgttcgttttgtattttgcggtatcgtttcgtttcgttttttttcgtttttttttatttagtttttttttaaagtttataggtgtttgcgtggattagtaaggtttaagttgtttcgttagtatatttttggttcgtaggtttggatcggttttgggattttgtgggagggtgaggaggtcggagtttttagttataggatttttggtaggcgatgagtcggatgtttagagggcgaagtttagattttgggttttagtttcgttttgtatgtagggcgagttcggcggggttgaagtagaggatgggatgcgtagggtgaataaggtagggttgtttt

SEQ ID NO: 955 - DNA, 359 bp, Artificial Sequence
  chemically treated genomic DNA (Homo sapiens)
tttgtttttttttgaggatgagttgggtgtattttttttttgtaggaagatgagggttagagatggaggtttatgttagggttatagagtttggaattttttttggagttaaaatagttttgttttatttattttgcgtattttattttttgttttagtttcgtcgggttcgttttgtatgtaaggcggggttgggatttagggtttgagtttcgttttttggatattcggtttatcgtttgttaaaggttttgtggttggaggtttcggtttttttatttttttatagggttttagggtcgatttaggtttgcgggttaggaatgtgttaacggggtaatttgggttttgttggttta

SEQ ID NO: 956 - DNA, 359 bp, Artificial Sequence
  chemically treated genomic DNA (Homo sapiens)
tggattagtaaggtttaagttgtttcgttagtatatttttggttcgtaggtttggatcggttttgggattttgtgggagggtgaggaggtcggagtttttagttataggatttttggtaggcgatgagtcggatgtttagagggcgaagtttagattttgggttttagtttcgttttgtatgtagggcgagttcggcggggttgaagtagaggatgggatgcgtagggtgaataaggtagggttgttttagttttagggaggattttagattttgtggttttgatatagatttttatttttagtttttatttttttgtaggaaggaggtgtatttaatttatttttagggggaggtagg

SEQ ID NO: 957 - DNA, 436 bp, Artificial Sequence
  chemically treated genomic DNA (Homo sapiens)
taatttgtaaatttttttttgaaataagagagagagggtaattgaaattatttaaggtagtatttggaatacgtaggttaaagattgagttagggagggattgttattatatgggttgtggggaggtagagtttttttgtgttttcgagagtattttttttcggggttttattagtttttaattcgtttttcgaatttttatttttttttttgttttgcgtttttggaaatttagatagcggttttattttcgtgatttatttagtaggaatgtgggagttttcgaattgttttagttaaagttttttaattttttttcggtgatgaatgggtgaggtttttaaatgaaatgtggaggtttttagttttagttcgcggtttttttttttttcggcgtaattatttttgtgtagaatatgttaagtgttttgttttt

SEQ ID NO: 958 - DNA, 436 bp, Artificial Sequence
  chemically treated genomic DNA (Homo sapiens)
ggaagtagggtatttgatatgttttgtatagaaataattacgtcgaggagggggagggtcgcgggttgggattgggagtttttatattttatttgagggttttatttatttattatcgaaggggaattaaaaggttttagttggagtaattcgagaatttttatatttttgttggatgaattacgggagtggggtcgttgtttgggtttttaaaggcgtagagtaaggggagaggtgggaattcgagaggcgagttgggggttggtggggtttcggggaggggtgttttcggggatataggggagttttgtttttttatagtttatgtgataataatttttttttggtttagtttttggtttgcgtgttttaagtgttgttttagatagttttaattgtttttttttttttattttaggaggaggtttgtaaattg

SEQ ID NO: 959 - DNA, 391 bp, Artificial Sequence
  chemically treated genomic DNA (Homo sapiens)
tggggttaagtttattttatggatttttttttttgtttttttaggagtagtttattgaaatgtgtttttcgtttatagaagtatcgtgatatatagacgttttatgatatattgtatatattaggggttttgtgttttttaggaagagggtttttatttgaagcggggttcgatggtcgttacgtgtcggtttatgttttttttggttttgtcgatgtttagggatatggagcgttgtagtaggttggagaagatttttatttggttagagttgtagtatttggcgattttaaatcgttgtattaggaattgagcgaaaagaggaagacgttgtggtggtggggttgagtcgggttaattttggggtcggtagagatagttgaggaggggt

SEQ ID NO: 960 - DNA, 391 bp, Artificial Sequence
  chemically treated genomic DNA (Homo sapiens)
atttttttttagttgtttttgtcggttttagggttagttcggtttagttttattattatagcgttttttttttttcgtttagtttttggtgtagcggtttgagatcgttaagtattgtagttttgattaagtggagattttttttagtttgttgtagcgttttatgtttttgaatatcggtagggttaaggggagtatgaatcggtacgtggcggttatcgggtttcgttttaagtgagggttttttttttggggagtatagggtttttggtgtgtatagtgtgttatggggcgtttgtgtattacggtatttttgtagacggggaatatattttagtgagttgtttttggaagggtagggaagagagtttataaggtgaatttggtttta

SEQ ID NO: 961 - DNA, 258 bp, Artificial Sequence
  chemically treated genomic DNA (Homo sapiens)
gagttggttggggatttttagtgtgcgttttttggtattgatttattgaagttggagttggttggggaatggtaggaggacgtcgtagtgttattagtgcggaggatacgttgtaatttgttagtgttatttcggttgtagttggttaggaattattttgttgttaacgtttttttttttagtagttatggagtatataatttgtatagtatttgttagtgtttttatttttttttgtaggagggagagtgtggatat

SEQ ID NO: 962 - DNA, 258 bp, Artificial Sequence
  chemically treated genomic DNA (Homo sapiens)
atatttatatttttttttttataaggagaggtggaggtattggtaggtgttgtataagttgtgtgttttatggttgttgggaagggaggcgttaatagtaggatggtttttggttagttgtaatcggggtgatattgatagattatagcgtgtttttcgtattaataatattgcggcgtttttttgttattttttagttagttttaattttagtggattaatattaaaaggcgtatattgaaaatttttagttaattt

SEQ ID NO: 963 - DNA, 486 bp, Artificial Sequence
  chemically treated genomic DNA (Homo sapiens)
taggggaagtagagaatgaagattgattagaataattttttgggaatgtgttttgggttttttagagggaagagttttttttttatttagcgttgtaggatttatagaggaaggagagttttggttattagggaggagttatatgagaggattcggtgtttttataaatgggaacgtgagtttatgaaagtcggtttttgttttgggtttgattgtgatttatgaggatattgtgtagttattatttgagttttttataataaatagtgagagcgttacggatagatttattttcgaggagtttagtaaagtgggaggattgaggttatagggagaagatataggtattatttggtttggttttgatagggggtagtggatagaatagtgcggaggtagtggggtttttagaggttttggttattttgttatattatggtttgtttcggtttggatattagagggtatttggggattatttttgag

SEQ ID NO: 964 - DNA, 486 bp, Artificial Sequence
  chemically treated genomic DNA (Homo sapiens)
tttaggaatgatttttaagtgttttttagtgtttagatcgagataaattatggtatgataaggtgattagagtttttagagattttattgttttcgtattgttttgtttattgttttttgttagggttaggttaggtggtgtttgtgttttttttttgtgattttagtttttttattttattgggtttttcgggagtgaatttgttcgtggcgtttttattgtttattgtagaggatttaggtggtgattatataatgtttttataggttataattaaatttagagtagggatcgatttttatggatttacgtttttatttgtggggatatcgggtttttttatgtggtttttttttggtggttagggtttttttttttttgtggattttgtagcgttgaatagaagggaagtttttttttttaggaggtttagggtatatttttagagggttattttggttaatttttattttttattttttttg

SEQ ID NO: 965 - DNA, 411 bp, Artificial Sequence
  chemically treated genomic DNA (Homo sapiens)
tatagaggaaggagagttttggttattagggaggagttatatgagaggattcggtgtttttataaatgggaacgtgagtttatgaaagtcggtttttgttttgggtttgattgtgatttatgaggatattgtgtagttattatttgagttttttataataaatagtgagagcgttacggatagatttattttcgaggagtttagtaaagtgggaggattgaggttatagggagaagatataggtattatttggtttggttttgatagggggtagtggatagaatagtgcggaggtagtggggtttttagaggttttggttattttgttatattatggtttgtttcggtttggatattagagggtatttggggattatttttgagaagattgaggttgattagagtagaatt

SEQ ID NO: 966 - DNA, 411 bp, Artificial Sequence
  chemically treated genomic DNA (Homo sapiens)
ggttttgttttgattaattttagtttttttaggaatgatttttaagtgttttttagtgtttagatcgagataaattatggtatgataaggtgattagagtttttagagattttattgttttcgtattgttttgtttattgttttttgttagggttaggttaggtggtgtttgtgttttttttttgtgattttagtttttttattttattgggtttttcgggagtgaatttgttcgtggcgtttttattgtttattgtagaggatttaggtggtgattatataatgtttttataggttataattaaatttagagtagggatcgatttttatggatttacgtttttatttgtggggatatcgggtttttttatgtggtttttttttggtggttagggtttttttttttttgtg

SEQ ID NO: 967 - DNA, 386 bp, Artificial Sequence
  chemically treated genomic DNA (Homo sapiens)
agggttattgtgttgtaattgttattattttttggtattttaagtgatattcgagtattatttaagggaaatggtttatatttcggtaatttttttattcgttttatttttttttttgaattagggatttcggtagagatagagttttagtagtttttattcgttttttcgtgtcggttttgtttatttacggatgagttagttggaatgtttggatattttagtttagcggttgtggtattaggagttgttaggaggcgggaatgtagagaatgtggtttattgtgttttcgttcgtttaggttgaattcgtagagaggtttggaaggtgaatgatataatgtttgttaagggtttgggacgataggtgtatgtgaagatgagga

SEQ ID NO: 968 - DNA, 386 bp, Artificial Sequence
  chemically treated genomic DNA (Homo sapiens)
tttttatttttatatgtatttgtcgttttaaatttttgataaatattgtgttatttattttttaaatttttttgcggatttagtttgggcgggcgggagtatagtgagttatattttttgtattttcgttttttgatagtttttggtattatagtcgttgagttgggatgtttaaatattttaattgatttattcgtgggtgagtaaggtcgatacgaggggacgggtggaggttgttggggttttgtttttgtcgaagtttttaatttagagaagaaagtggggcgggtgggggaattgtcgggatatgggttattttttttgaatgatgttcgggtgttatttgaggtgttaggaagtggtggtagttgtagtatagtggtttt

SEQ ID NO: 969 - DNA, 500 bp, Artificial Sequence
  chemically treated genomic DNA (Homo sapiens)
tatggagttagaatttaaatttaggtatgtgaggtttgagtttaggtttttattagggttattgtgttgtaattgttattattttttggtattttaagtgatattcgagtattatttaagggaaatggtttatatttcggtaatttttttattcgttttatttttttttttgaattagggatttcggtagagatagagttttagtagtttttattcgttttttcgtgtcggttttgtttatttacggatgagttagttggaatgtttggatattttagtttagcggttgtggtattaggagttgttaggaggcgggaatgtagagaatgtggtttattgtgttttcgttcgtttaggttgaattcgtagagaggtttggaaggtgaatgatataatgtttgttaagggtttgggacgataggtgtatgtgaagatgaggataaagattgattttttttttggggttgttagtatagtttcgtattttttttatatatgtt

SEQ ID NO: 970 - DNA, 500 bp, Artificial Sequence
  chemically treated genomic DNA (Homo sapiens)
gatatgtgtgggagggatgcgaaattgtgttggtagttttaagaaaagaattagtttttgtttttatttttatatgtatttgtcgttttaaatttttgataaatattgtgttatttattttttaaatttttttgcggatttagtttgggcgggcgggagtatagtgagttatattttttgtattttcgttttttgatagtttttggtattatagtcgttgagttgggatgtttaaatattttaattgatttattcgtgggtgagtaaggtcgatacgaggggacgggtggaggttgttggggttttgtttttgtcgaagtttttaatttagagaagaaagtggggcgggtgggggaattgtcgggatatgggttattttttttgaatgatgttcgggtgttatttgaggtgttaggaagtggtggtagttgtagtatagtggttttggtggaagtttgggtttagattttatatatttagatttgagttttggttttatg

SEQ ID NO: 971 - DNA, 340 bp, Artificial Sequence
  chemically treated genomic DNA (Homo sapiens)
gggggtagattatattatttttaatttattaagggatttttttttgatagagattgagtaagatttaattgttttgagttgtgtggattttacgtttagttgtgtatttgtgtaataattagatacgtttttcggttttttagatatattttggaattcgaaagggaaagtgaaagttataattttttagtagtttatgattaagtatagtaaatacgttgttttttagtattatttgtagtttaggtttagtttttttgttgttgtatttagaggagtagtcgtagattagatattcgggttttttttatttaatttatttgttttatatttttaggat

SEQ ID NO: 972 - DNA, 340 bp, Artificial Sequence
  chemically treated genomic DNA (Homo sapiens)
attttgaggatgtgaggtaggtgggttggatgagagggattcggatgtttggtttgcggttgtttttttaagtgtagtagtaaggaggttgggtttggattgtaggtggtgttggggagtagcgtgtttattgtgtttggttatgagttgttgggaagttgtgatttttattttttttttcgaattttagggtatatttgggaggtcggaggacgtgtttggttattatatagatgtatagttggacgtgggatttatatagtttagaatagttggattttgtttagtttttgttagaggaagattttttggtaagttggggatagtgtgatttattttt

SEQ ID NO: 973 - DNA, 495 bp, Artificial Sequence
  chemically treated genomic DNA (Homo sapiens)
agagggggtagagatttatttgaggttattgagttgttttgaatttttttttgtattatcgggtttaaagatttatttttttatgtcgtttggaattgttggtttagtttggaggcgtagcgtagggataggttgttttcgtttggtaggagtttttttttacggttcgtaggtttggtagttgggatagggttgaatgggaggtattgtcggtagattaggtaagttaggtttttttaggttgaggtgaagaaggggcgggcggcgggcgggagtagcggttggagttatagggttttttgtttgttttagtcgaggattgaggtttcggtttgaatttttgggttagttcgatagggagggggtattagtagttggttcgggagttagtagttttgggtttttttttgttatgtgggttgtttttttagaggttgttttttagtttttgaaaaatatattttattaataagtagttttgaggttatagtgggg

SEQ ID NO: 974 - DNA, 495 bp, Artificial Sequence
  chemically treated genomic DNA (Homo sapiens)
ttttattgtgattttagagttatttattaatgggatgtgttttttagagattaggaagtagtttttgggagggtagtttatatggtaggagggagtttaggattgttgattttcgggttagttgttggtgttttttttttgtcgggttggtttaaggatttaggtcggggttttagttttcggttggggtaggtaggaggttttgtaattttagtcgttgttttcgttcgtcgttcgttttttttttattttagtttggggaagtttggtttgtttggtttgtcgataatgttttttatttagttttgttttagttgttaggtttgcgggtcgtggaggggggtttttgttaggcggggatagtttgtttttgcgttgcgtttttaggttggattagtagttttaggcggtatggaggggtgagtttttgggttcgatggtgtaaggggggatttagagtagtttagtggttttaggtaagtttttgtttttttt

SEQ ID NO: 975 - DNA, 492 bp, Artificial Sequence
  chemically treated genomic DNA (Homo sapiens)
tgttttagagtttattttgggagattttttttttggagaattttaggaagtttttagagtttttgttcgttagtttttgagaggtttagagggggtagagatttatttgaggttattgagttgttttgaatttttttttgtattatcgggtttaaagatttatttttttatgtcgtttggaattgttggtttagtttggaggcgtagcgtagggataggttgttttcgtttggtaggagtttttttttacggttcgtaggtttggtagttgggatagggttgaatgggaggtattgtcggtagattaggtaagttaggtttttttaggttgaggtgaagaaggggcgggcggcgggcgggagtagcggttggagttatagggttttttgtttgttttagtcgaggattgaggtttcggtttgaatttttgggttagttcgatagggagggggtattagtagttggttcgggagttagtagttttgggttttt

SEQ ID NO: 976 - DNA, 492 bp, Artificial Sequence
  chemically treated genomic DNA (Homo sapiens)
gggagtttaggattgttgattttcgggttagttgttggtgttttttttttgtcgggttggtttaaggatttaggtcggggttttagttttcggttggggtaggtaggaggttttgtaattttagtcgttgttttcgttcgtcgttcgttttttttttattttagtttggggaagtttggtttgtttggtttgtcgataatgttttttatttagttttgttttagttgttaggtttgcgggtcgtggaggggggtttttgttaggcggggatagtttgtttttgcgttgcgtttttaggttggattagtagttttaggcggtatggaggggtgagtttttgggttcgatggtgtaaggggggatttagagtagtttagtggttttaggtaagtttttgttttttttgggttttttagaggttggcgggtaggggttttggggattttttggggttttttaggaagggggttttttaaggtgggttttgagata

SEQ ID NO: 977 - DNA, 354 bp, Artificial Sequence
  chemically treated genomic DNA (Homo sapiens)
taggtttagagagtttggaggaggagtttttgttagattggagagaagtaggtttgagtttttttaaaggtagtttttggggatttttaggattataggttgagacgagacgtagggtggttggaggaagtgagaggtgaatttagtttgggattggttgggcgagattttttatttgttttttgggattatcgtttattatggttgtggtttagtagttgcgggtcgagaggtgagtgtcggggtgtggtcgttttcgggtttttttattgttttttataggttttagggataaaggttagtttttttgtagtttttgattaatatgagaggttggggttgagttagaattta

SEQ ID NO: 978 - DNA, 354 bp, Artificial Sequence
  chemically treated genomic DNA (Homo sapiens)
tgggttttgatttaattttagttttttatgttgattagggattgtagaaggattggtttttgtttttaaggtttatgaggagtagtgagaaggttcgggggcggttatatttcggtatttatttttcggttcgtagttgttgggttatagttatggtgggcgatggttttagggagtaggtggagagtttcgtttagttagttttaggttgagtttattttttattttttttagttattttgcgtttcgttttagtttgtggttttgggagtttttaggagttgtttttggggaggtttaggtttgtttttttttagtttggtagaggttttttttttaggttttttgggttta

SEQ ID NO: 979 - DNA, 282 bp, Artificial Sequence
  chemically treated genomic DNA (Homo sapiens)
ggagtttttgttagattggagagaagtaggtttgagtttttttaaaggtagtttttggggatttttaggattataggttgagacgagacgtagggtggttggaggaagtgagaggtgaatttagtttgggattggttgggcgagattttttatttgttttttgggattatcgtttattatggttgtggtttagtagttgcgggtcgagaggtgagtgtcggggtgtggtcgttttcgggtttttttattgttttttataggttttagggataaaggttagtt

SEQ ID NO: 980 - DNA, 282 bp, Artificial Sequence
  chemically treated genomic DNA (Homo sapiens)
gattggtttttgtttttaaggtttatgaggagtagtgagaaggttcgggggcggttatatttcggtatttatttttcggttcgtagttgttgggttatagttatggtgggcgatggttttagggagtaggtggagagtttcgtttagttagttttaggttgagtttattttttattttttttagttattttgcgtttcgttttagtttgtggttttgggagtttttaggagttgtttttggggaggtttaggtttgtttttttttagtttggtagaggtttt

SEQ ID NO: 981 - DNA, 398 bp, Artificial Sequence
  chemically treated genomic DNA (Homo sapiens)
agtaagtagggaggggttgagggtcggagagtaggtgtggggggtgggggcggggtgtaggttaagggaggaggttcggagagggagtaggaggggcgtagattttgttatcggggagattttagttatttacgttcgttggttttggtttttgtagggagttggagagaagaatgtgtttagtgtttaggggagtcgaggttgttagttagtagttagagtagttcgtgaggttattgcggtataggtttttcggggtagtagttgtgttttaaggtaaggttgggtgtggggttggttagttcgggagtttatagtttagttttgtagtcgggtatatcggtcgtagtacggattattggggaggtcgggtgggggttattagttttgggattggt

SEQ ID NO: 982 - DNA, 398 bp, Artificial Sequence
  chemically treated genomic DNA (Homo sapiens)
attaattttaggattaatgatttttattcggtttttttagtggttcgtgttgcggtcggtgtgttcgattgtagggttggattgtggattttcgggttggttagttttatatttagttttgttttgggatatagttgttgtttcgggggatttgtgtcgtagtggttttacgagttgttttggttattggttggtagtttcggtttttttgagtattgagtatatttttttttttaattttttgtaggagttaaggttagcgggcgtgggtggttgaaattttttcggtaatagggtttgcgttttttttgtttttttttcgggtttttttttttaatttgtatttcgtttttattttttatatttgtttttcggtttttagtttttttttgtttatt

SEQ ID NO: 983 - DNA, 479 bp, Artificial Sequence
  chemically treated genomic DNA (Homo sapiens)
tgttatagatggtgatatggagttcgtgaaggagggagtaagtagggaggggttgagggtcggagagtaggtgtggggggtgggggcggggtgtaggttaagggaggaggttcggagagggagtaggaggggcgtagattttgttatcggggagattttagttatttacgttcgttggttttggtttttgtagggagttggagagaagaatgtgtttagtgtttaggggagtcgaggttgttagttagtagttagagtagttcgtgaggttattgcggtataggtttttcggggtagtagttgtgttttaaggtaaggttgggtgtggggttggttagttcgggagtttatagtttagttttgtagtcgggtatatcggtcgtagtacggattattggggaggtcgggtgggggttattagttttgggattggttatatttggagagttttaggtagggtgaggagtggaaggatagaa

SEQ ID NO: 984 - DNA, 479 bp, Artificial Sequence
  chemically treated genomic DNA (Homo sapiens)
ttttgtttttttattttttattttgtttggggttttttagatgtaattaattttaggattaatgatttttattcggtttttttagtggttcgtgttgcggtcggtgtgttcgattgtagggttggattgtggattttcgggttggttagttttatatttagttttgttttgggatatagttgttgtttcgggggatttgtgtcgtagtggttttacgagttgttttggttattggttggtagtttcggtttttttgagtattgagtatatttttttttttaattttttgtaggagttaaggttagcgggcgtgggtggttgaaattttttcggtaatagggtttgcgttttttttgtttttttttcgggtttttttttttaatttgtatttcgtttttattttttatatttgtttttcggtttttagtttttttttgtttatttttttttttacgggttttatgttattatttgtggta

SEQ ID NO: 985 - DNA, 500 bp, Artificial Sequence
  chemically treated genomic DNA (Homo sapiens)
atttgtttttggtatttttgggtaataaagtagagtttagggtttttttttttttcgtcgtttttattgagtttagatggtatatttttatcgtggttttaagagggggtgttacgtgagttcggattttagattttgggggttgggttttttagcgagttttcggtgggggaatagagtgggtagtggtttgtgagggttttgtagaatgggggtttattttttacgtggttagttttggaagatagggttaaatattcggtgggttggcgggcggttggttggcggaggaagtaggaagttggaatgaatttgattataaatagtttatattacgcggtttttgtaggtggaggcgtttacggaaagggtttcgggtggttgtggggtgggagggtataggtttttgttttttatagttgtgatggtgttatttaagtataggttgtttttatttgtttttgtagtaatggttttgtttttttattttttttgtttat

SEQ ID NO: 986 - DNA, 500 bp, Artificial Sequence
  chemically treated genomic DNA (Homo sapiens)
atagataaagaggatggggggataaagttattattgtaggagtaggtaggggtagtttgtatttagatgatattattatagttgtggggagtaggggtttgtgtttttttattttatagttattcggggtttttttcgtgggcgtttttatttgtaggggtcgcgtggtatggattgtttgtggttaaatttattttaattttttgtttttttcgttagttagtcgttcgttagtttatcgggtgtttggttttgttttttagagttggttacgtggaaaataaatttttattttatagggtttttataagttattgtttattttatttttttatcggagattcgttgagaggtttagtttttaggatttaggattcgagtttacgtagtatttttttttaagattacggtggaaatgtattatttgggtttaatgaggacggcgagagagaaaagggttttgggttttgttttgttgtttaggaatgttagggataggt

SEQ ID NO: 987 - DNA, 467 bp, Artificial Sequence
  chemically treated genomic DNA (Homo sapiens)
tatagtgtagtgtttggtttttttatggcgcgcgataacgtggttatttttatcggttggtgtcgcgtggagttgggtgtgtcggaggtgtttatgtttgagattgaggatttggtgttgcgtaagaacgagaagagcgtggtgttgtgtttgttggaggtggcgcggcgtggggtacgtttgggtttgttggttttacgtttcgtgtagtttgagtaggagattgagcgggagttgcgtgttgtatttttagtttttaacgtttttgtcgttggggaggatattattgaaatcgttttcgtattagggatttttgttcgcggttttcgtatgatatttagcgatttgcgtaatttcgacgagttggtgagttttttagtattaggtgttagggattcgatagtatagttagtgtttgtaatttgtttttgaattttttagggtttattttgttatttgtagaatag

SEQ ID NO: 988 - DNA, 467 bp, Artificial Sequence
  chemically treated genomic DNA (Homo sapiens)
ttgttttgtagatagtagggtggattttgggaggtttagggatagattgtaggtattggttgtgttgtcgggtttttggtatttggtgttgggggatttattagttcgtcgaggttgcgtaggtcgttgggtgttatgcgggggtcgcgggtaggagtttttggtgcgggggcggttttagtggtgttttttttagcggtaggggcgttgggggttgggggtgtagtacgtagttttcgtttaattttttgtttaaattgtacgaggcgtggggttagtaggtttaggcgtgttttacgtcgcgttatttttagtaggtatagtattacgtttttttcgtttttgcgtagtattaggtttttagttttaaatatgagtattttcggtatatttagttttacgcggtattagtcgatgaaggtggttacgttgtcgcgcgttatgaaggagttaggtattatattgtg

SEQ ID NO: 989 - DNA, 385 bp, Artificial Sequence
  chemically treated genomic DNA (Homo sapiens)
gattgggtttggtgattttgtcgtcgtaggttttttgtagtataggttttgagagtaacggtgcggttgtttgattgttacggaataaatatatattaggcgagtattagtttgaggtcgaggggtatatggagttggtttgagtttagttaggagtttggaagtaagtttagtttttttcggtcgtgttttcgagggtttgatcgcgaaacgttcgtacgtacgggttggagttgtttgttacgcgtggtaattgcggtaggaatttgatttacgtacggacgttagtatttataagtgagaggcgttttagatacgtggtgtcggttttggaagtagttggtgggtggtgaggaaatgttatagttttggaaagatagaggtt

SEQ ID NO: 990 - DNA, 385 bp, Artificial Sequence
  chemically treated genomic DNA (Homo sapiens)
ggtttttgtttttttagagttgtgatatttttttattatttattagttgtttttaaagtcgatattacgtgtttgaggcgttttttatttgtgggtgttggcgttcgtgcgtgagttaggtttttgtcgtagttgttacgcgtggtaaataattttaattcgtgcgtacgagcgtttcgcggttaggttttcgagggtacggtcgggaggagttgggtttgtttttagatttttggttgggtttaggttagttttatgtgtttttcggttttaggttagtgttcgtttggtgtgtgtttgtttcgtgatagttaggtaatcgtatcgttgtttttagagtttgtgttgtaaaaggtttgcggcgatagggttattaggtttagtt

SEQ ID NO: 991 - DNA, 500 bp, Artificial Sequence
  chemically treated genomic DNA (Homo sapiens)
taattttttggttttttttaagcgtttttttcgtatttttttgattatagtagttggtggtatagtgtgcgtatttgtgggtaggagttagtgaaggtttttttttttttttttaaagttttaggttttacggtttgttattcgtaaaattttaattacgagggggcgtttttttgttcgtcgtttcgtagggagattcggtttaggtcgttggagtttcgagttttagggtttttgtgatggaagggcgggcgcggtttttatatttggttttttagttttatttaaggaggattgttagatagtttcgttttgaggtgtaggaggtcgggtcgtttcggttattttgaatttattcgaagttagagggttcgagttcggggggcggtcgggtgtttatttttagagtttgtttagcgttttgttgagtttagcgttgtgtaggtgcgggtattggttcgcgagttttttgcgcgttgtttgagtttatattatgaagg

SEQ ID NO: 992 - DNA, 500 bp, Artificial Sequence
  chemically treated genomic DNA (Homo sapiens)
tttttatggtgtgggtttaggtagcgcgtaggaagttcgcggattagtattcgtatttgtataacgttgagtttagtaagacgttgggtaagttttggaggtgagtattcgatcgtttttcgggttcgggttttttagtttcgggtggatttagggtagtcgaggcggttcggttttttgtattttagagcgggattgtttggtagttttttttggatagggttggaagattaggtgtgggggtcgcgttcgtttttttattataaggattttggaattcggaattttagcggtttaggtcgggtttttttacggggcggcgggtaggaaggcgttttttcgtggttggaattttgcgggtggtagatcgtggggtttggggttttggagggagggaaggaggtttttattaatttttgtttatagatacgtatattatgttattagttgttgtggttaggaggatacgagggaaacgtttggaaagaattaaagggttg

SEQ ID NO: 993 - DNA, 402 bp, Artificial Sequence
  chemically treated genomic DNA (Homo sapiens)
ggaggaggaagatgaatagtgtttttgttaattttggttttttcggtttatgggatgggagatgttattattttacgtatttattttagttagttttatataggtcgatcggggaggttttttttgagtttaatttgataagttttgaggagtgagttgtatttattttgttttgtttgggatagggtggggggtttttgggtagggggttgggggttgtaggagtacggtgggcggtcgttttgtatttgtttgaggaaggattatttttttcgttaagtttttgtttggttgtgttcgtttttagtttttgtgtttttttttaattcgttatttcgtaagggttggtttaagggtttttttttatagggttcgtattttttgtttaggttggtatgttga

SEQ ID NO: 994 - DNA, 402 bp, Artificial Sequence
  chemically treated genomic DNA (Homo sapiens)
ttagtatgttagtttaggtagggggtacgggttttgtgagaaagagtttttgagttaatttttgcggggtgacgggttagaaaaaggtatagaagttgagggcgggtatagttaagtaaaggtttggcggaggaagtggtttttttttaggtaggtgtagagcggtcgtttatcgtgtttttgtagtttttagttttttatttagggattttttattttattttagataggataaagtaggtatagtttattttttagagtttgttaggttgagtttaagggaaattttttcggtcggtttgtgtggggttggttgaggtggatacgtggaatggtgatattttttattttataaatcggaagggttagggttgatagaggtattgtttatttttttttttt

SEQ ID NO: 995 - DNA, 439 bp, Artificial Sequence
  chemically treated genomic DNA (Homo sapiens)
ttattatattgtaaaagttgtttttttttttgttttttcgatttatttttttagggtttatcgttagttgtaggttacggttgcgaagtatagtcgagtttttttttttattgagttgtgttaggcgtatggcgattatgtagtttttatttttgagtcgtagtagttttaggttgttcgttttttagttttttcgtagtcgttgatagcgtttttgagtttgttgttggtttcgtagtcgttgttttagttttgttcgttttttttcgagtattcggtttcgggtttgtagttgttgttttcgttgtagttggtttttgcgagtttttcgtagtcgtcgtatttttgttattaagaattgggttaggtttttaggtttttttttatttgttaggatagaataggggatagaataggtagtttaggtaagtaaaattta

SEQ ID NO: 996 - DNA, 439 bp, Artificial Sequence
  chemically treated genomic DNA (Homo sapiens)
tggattttatttgtttgagttgtttattttgttttttgttttgttttggtagatgaggaggggtttgagggtttgatttaatttttgatgatagaggtgcgacggttgcgggaagttcgtaagagttagttgtagcgggagtagtaattgtaggttcggggtcgggtgttcgaggaggagcgggtagggttggagtagcggttgcgggattagtagtaggtttaggagcgttgttaacggttgcgggaggattgggaggcgggtagtttggagttgttgcggtttaaggatgagaattatatgatcgttatgcgtttggtatagtttagtgaggagaagaattcggttgtatttcgtagtcgtgatttgtagttggcggtaggttttggggagatgggtcggggaggtaagggaaggggtagtttttgtaatgtagtag

SEQ ID NO: 997 - DNA, 451 bp, Artificial Sequence
  chemically treated genomic DNA (Homo sapiens)
ttttgatagtgtttgatttttagtgtttttcgtgtttgggtgaagggtttgtgtttttgagttgagttgttggtaggtattttggaggtagagtaggttaattttggtatgaatttggcggttttggtattcgtaatttgttttgatatttttttcgtgagttaggtggtgagttattttataatgtaattttaaattgaggttttttgtttttttttaggatttttttttttatagtattattatatgtatatagtcgtaaaaaggttaagaggaaatattttcgacgggtttaggattttaaaaagtttttaagggtttttcgtattagtaaggtttagcgtcgtcgttttataggtaaagtacggtatagcggggagtgagatcgagaacgaagcggtgttttagtttaggttgcggggatttgtttttgtttagtttggttgttttt

SEQ ID NO: 998 - DNA, 451 bp, Artificial Sequence
  chemically treated genomic DNA (Homo sapiens)
agggatagttaagttgagtaaggataggttttcgtagtttagattggggtatcgtttcgttttcggttttatttttcgttgtgtcgtgttttgtttgtgagacggcggcgttgggttttgttggtacgaggggtttttgggggttttttggagttttgggttcgtcggggatgtttttttttgatttttttgcggttgtgtgtatgtagtgatgttgtgagggaggagattttaggggagggtagaaagttttagtttaagattgtattgtggggtgatttattatttggtttacggaggggatgttaggataggttgcgaatgttaggatcgttaagtttatgttagagttggtttgttttatttttagagtgtttgttagtaatttagtttagagatataggttttttatttaggtacgaaaagtattggaggttagatattattaggg

SEQ ID NO: 999 - DNA, 384 bp, Artificial Sequence
  chemically treated genomic DNA (Homo sapiens)
tttgtttttttttttggttatatttttttttatttggttgaaatggtaggtattttagaattttcggggtaggattattattttttgtttttatatcgtataggatttttcgggagtttcgttataggtttttatcggatgaatttttggaaggtttttattatttgtttggtggtttcggggatgtgtacggtgttaaacggggttgttatagtatacgtttcgtttttgtatttgtcgagtcgatagtttacggtgttattttttttatttatttcgacgttaattagaaatttatatttattacgatatttagtttgtagggagagagagttgtattttattttggttgtttagcgtttgggtttggaaattttgattttt

SEQ ID NO: 1000 - DNA, 384 bp, Artificial Sequence
  chemically treated genomic DNA (Homo sapiens)
ggaaattagggtttttaggtttaagcgttgggtagttagggtaaggtgtagttttttttttttgtagattgagtatcgtaataagtgtgagtttttggttggcgtcggggtggatggggaggataatatcgtgggttgtcggttcggtaagtataagggcgggacgtgtgttgtggtagtttcgtttgatatcgtgtatattttcgaagttattaagtaggtggtgaaggttttttaggagtttattcggtgaggatttgtgacggggttttcgggaagttttatgcggtgtgggagtagagggtggtgattttgtttcgggaattttggagtgtttgttattttagttagatgaaggaaggtgtggttagaggagagagtagg

SEQ ID NO: 1001 - DNA, 499 bp, Artificial Sequence
  chemically treated genomic DNA (Homo sapiens)
tttttagtttggaggaggtagaggggtttgtttagtttttattttttaaagtgtattttttagtggttagtagtagaggggaataggtttggggattcgggagttgttattttgcgatggttttttttatttatagagtatttgtcgtattttttatcggtaaggggtgttttcgaggttatcggggtagttgttttttggttatgagttttttgttttttttggagggtttggttttgcgtatttttttttttagggtttggtgggggttgtgttttcggtttcggttcgggttttttttttatttgttgaagattcgttttattgagtgtatgaagcgatggtagttatgtaggaatttgtagttttttagtttgcgttgaaaagtattcgaggtaggggtgggggtgggcggttgagaggtttttcggttagttttcgtgggtttagtcgtgtttgagttgtttagtagttgggttatgtagtagatgttgttttt

SEQ ID NO: 1002 - DNA, 499 bp, Artificial Sequence
  chemically treated genomic DNA (Homo sapiens)
aggaataatatttattgtatggtttagttgttggataatttagatacggttgagtttacgaaggttggtcggggggttttttagtcgtttatttttatttttgtttcggatgttttttagcgtaagttggagggttgtaggtttttgtatggttattatcgttttatgtatttagtggggcgggtttttagtaagtggggggagagttcgaatcggagtcggagatatagtttttattaggttttgaggaagggggtgcgtaggattagattttttaggaaaggtaagagatttatgattaggggatagttgtttcggtagtttcgagagtattttttgtcggtgaaggatgcggtaggtgttttgtggatgagaggaattatcgtaggatgatagttttcgggtttttaaatttgtttttttttgttattagttattgagaagtgtattttaagaggtgggagttgggtagatttttttattttttttaggttgggag

SEQ ID NO: 1003 - DNA, 455 bp, Artificial Sequence
  chemically treated genomic DNA (Homo sapiens)
tgtaagggagtggtgatttttttaagtcgggagtttttttattagggggttttttaagggtatttttgtttttagcgggggagtcgttattttattttgttttgtttagtttgagatacgtaattttttttagtttttatttttcgttgaatttttaaggcggggttggggggatgtttaggtttaggaaggaggttgggggttcggtcgttggacgttgtttatcggtagttcggattagagtaggagttttattattatttgcggggataggtgggatatatgtattttcggggttattttagattttttggaggatgttgattgatattgtttagtttgagaattattgtgttttcggagtagaggtttttttattgtttttgggtagcgggcgtcgggtatagggttttttcggatgagcggggcgggtatgagagtatatggaattgggg

SEQ ID NO: 1004 - DNA, 455 bp, Artificial Sequence
  chemically treated genomic DNA (Homo sapiens)
ttttagttttatgtgtttttatgttcgtttcgtttattcggagaagttttgtgttcgacgttcgttatttaagggtaatggggaggtttttgtttcggggatatagtagtttttaaattggatagtgttaattagtattttttaggaggtttaggatggtttcggaaatgtatgtgttttatttgttttcgtaggtggtgatgaaatttttgttttggttcgggttatcggtgaatagcgtttagcggtcgggtttttaattttttttttgagtttgaatatttttttaatttcgttttgagaatttagcgaagagtaaaagttggagaaaattgcgtgttttaggttaagtagagtaaagtggggtgacggttttttcgttaggaatagagatgtttttagggaattttttgatggaagagttttcggtttaagaaggttattatttttttata

SEQ ID NO: 1005 - DNA, 471 bp, Artificial Sequence
  chemically treated genomic DNA (Homo sapiens)
tttttatttgtttattttggataataattagtatagtgtagtgtggttttgtagtgatattatttgtagagaggttaggtttagtttttttcgttttttaaaaggttagtaggttttaggagttgggggtggggtttggttgtggggtttttatgttttaggggttagggtagattttttttagtcggtaattattgtagattttttttttggttagtattcggggatttttttgtttttgtttcgtttttttattttgtttgttgagatatagggttttacgggttttttttttggggtcgggttgattgtggtttgcgaggggtagttatcgtgttgggtttttttgttagaggtagaaattataaaattatttggaatatatacgttttaagtgatagatttaatttaattttataaatattgatttcgcgtttaatttattcgttttttagtgttagtttatttttg

SEQ ID NO: 1006 - DNA, 471 bp, Artificial Sequence
  chemically treated genomic DNA (Homo sapiens)
taggaatgagttggtattggaggacgagtggattagacgcgaggttaatatttgtggaattgaattgaatttgttatttggggcgtgtatgttttaggtaattttgtggtttttgtttttggtaggaaaatttaatacgatgattgtttttcgtaggttatagttagttcggttttaggagagagattcgtggagttttatgttttagtaggtaaggtagggggacggggtaggggtagggaggttttcgagtgttggttaggggaggaatttgtagtggttgtcggttaaggagggtttgttttggtttttggggtatggaggttttatagttaggttttatttttagtttttgggatttgttggttttttaggagacgggggaggttgggtttgatttttttgtaggtggtgttattgtagggttatattgtattgtgttggttgttgtttagggtgggtagatagagg

SEQ ID NO: 1007 - DNA, 371 bp, Artificial Sequence
  chemically treated genomic DNA (Homo sapiens)
aagtttaaatttttttgattttacgtttgttattatagttggagggaaatcgattttagaatttatttgatatgtcggatttttttgtggtatttattttatcgtttagtagttagttatgatgttataagtttattagattttcggtagggggaaaacgttggggaattggaaagaatggatgttttttattcgttaggaaggtaggggaaggagttgggtatgtttgggaggagaagtcgcgtggttggtgggggataggagtaggtttaatgtttgtgatattaaatgttaggtagaaatttgaaaattttagttatttagatgtttttttaatatttagatgtttggtattgagtagattatgtttt

SEQ ID NO: 1008 - DNA, 371 bp, Artificial Sequence
  chemically treated genomic DNA (Homo sapiens)
ggagtatggtttgtttagtgttagatatttggatattgagaaaatatttgggtagttggggtttttaggtttttgtttgatatttaatattataaatattgagtttgtttttgttttttattagttacgcggtttttttttttaaatatatttagtttttttttttgtttttttgacgggtaagaaatatttattttttttaattttttagcgttttttttttatcggaaatttgatgggtttatgatattatggttggttgttgagcgatgaagtggatgttataaagaaattcgatatattagatagattttgaaatcggtttttttttagttgtagtaataggcgtgaagttaggagaatttgagttt

SEQ ID NO: 1009 - DNA, 467 bp, Artificial Sequence
  chemically treated genomic DNA (Homo sapiens)
ttgtttttttgttttatatataacgtttttttagaaggaagggaagagttaggaggggaggggtaggggtttataggtcgtattaaatggtggttttttatcgtaaaatttagtttaatttgaattttagtattagagggtttatggggtggagtttcgggatttttagtttcgtttttttttaggttaggtgttacggcgtagattcgtacggttttttttcgtttttcgtcgtaagttttcgttgtttatcgttttcgcgtaaggcgttttagttcgtaatttagtagtgtaggtcgggttcgaagaagtgggagcgcgcgggtaggtagacggggcgtacggcggtcgagcgtattatcgggtggtcgagttgtagtagcgttacgtcgtagttatggttgtttttttcgtggtacgggtgtaggagtaggcggtttattttgaaggatatttttttaggttag

SEQ ID NO: 1010 - DNA, 467 bp, Artificial Sequence
  chemically treated genomic DNA (Homo sapiens)
ttggtttggagaggtgttttttaaggtgagtcgtttgtttttgtattcgtattacgaagaggatagttatgattacgacgtggcgttgttgtagttcgattattcggtggtgcgttcggtcgtcgtgcgtttcgtttgtttgttcgcgcgtttttattttttcgagttcggtttgtattgttggattacgggttggggcgttttgcgcgagggcggtgagtagcggggatttgcggcgggaggcggagggagatcgtgcggatttgcgtcgtaatatttggtttggagaagggcggggttgggggtttcggggttttattttataggttttttagtgttgggatttaaattgggttgaattttacggtagaaaattattatttaatgcggtttgtaggtttttgtttttttttttttagttttttttttttttttggaagggcgttatgtgtggggtaaaggggtag

SEQ ID NO: 1011 - DNA, 340 bp, Artificial Sequence
  chemically treated genomic DNA (Homo sapiens)
ttaattgtattgtaatgagaggatttaatttttattttcgattgtcgggatttttgtagtttttagagttggtaggggttgggagtgttgtttaggtaggtttttggagaagggagtggtaagaggattcggagttatcgtgttcggagattggaagaaatttggacgaagttgagaaggtattatttgtttgtatcgtagaagtaataagaaaattttagaaattggtaatcggcggatgtgtatttttttttatttgtattgattggtattttgagtttttgaaaggagtggttggaagaagagaatgtagaattttggatatggtttttattttgga

SEQ ID NO: 1012 - DNA, 340 bp, Artificial Sequence
  chemically treated genomic DNA (Homo sapiens)
tttaggatgagagttatgtttaagattttgtattttttttttttaattattttttttaagaatttaaaatgttagttagtgtaggtaaaggaagatgtatattcgtcggttgttaatttttgaaatttttttgttatttttacgatatagataagtgatgtttttttaatttcgtttaggttttttttaattttcgaatacggtgatttcgaatttttttgttatttttttttttagggatttatttaggtagtatttttagtttttgttagttttggaagttgtagagatttcgatagtcggggatggggattgaatttttttattgtagtgtaattaa

SEQ ID NO: 1013 - DNA, 468 bp, Artificial Sequence
  chemically treated genomic DNA (Homo sapiens)
ttattttgggtaagttgggttcgtagcgtgggcgcggtgaggacgcgtagtttatgtagtcgtttttaagagtaagagaaagcgtcggggtttttatcgtagtcgtcggtgggaggtatattggggtagtcggggtgcgttattagttcggttgttagggtgtggttcgttagggtattttttaggattcgcgttagggtttcggatacgcggtgagcggatatgtgtcggtcgtaagtgtttaggtttacgaaggcgtttgtttatttgtggggggcgggatattagaggtgggattaggtcgggttatggttaagggttaggtaggttagggaagggacggcggggtgggagggggtaattggggtggcggtagcggtcgacgttagattcgttttcgggttgagaaacggatatagttagttaggtgaatagttagtgcggagggatagaggtagttatggtagg

SEQ ID NO: 1014 - DNA, 468 bp, Artificial Sequence
  chemically treated genomic DNA (Homo sapiens)
tttattatagttgtttttgttttttcgtattggttgtttatttggttagttgtgttcgttttttaattcggaagcgagtttggcgtcgatcgttgtcgttattttagttatttttttttatttcgtcgttttttttttagtttatttagtttttggttatggttcggtttggttttatttttgatgtttcgttttttataggtggatagacgttttcgtgggtttgagtatttgcggtcggtatatgttcgtttatcgcgtgttcggggttttggcgcgggttttggaaggtattttagcgggttatattttgatagtcgagttgatggcgtatttcggttattttagtgtgttttttatcggcggttgcggtgaaggtttcgacgtttttttttgtttttgggagcggttgtatgagttgcgcgtttttatcgcgtttacgttgcgggtttagtttgtttaggatgg

SEQ ID NO: 1015 - DNA, 494 bp, Artificial Sequence
  chemically treated genomic DNA (Homo sapiens)
tggttatgtgtttaagaatgttgtgattaaagtgaggagaaaggtagtttttgtgttatagtttttattttagatatacgagttcgtggagttgtgggaaagaaggaggaggtgttggacgaagttggaaatggtaaggggaggttggggaaatatttagttgttagcggttttttcggggtacgttgggattagttaagagaatgtaatagttaggggtgggagtttttttcgcggttgtatacgttaggtttttttagttttgtaggtttaaatgaaggtttatgtgaagggggaatcgttttggatagtttagtgttttttagagttatattattattattttttattacgcggaggtggttgaaaaaaaggagttatagatgggtaaggtttgaggggcgtcgggttgacgaggtaaaaaaaaaagtaggtgttgtggtgttgatgggaggtttttttttttttataggacgttaggaaggaaatggggt

SEQ ID NO: 1016 - DNA, 494 bp, Artificial Sequence
  chemically treated genomic DNA (Homo sapiens)
gttttattttttttttggcgttttgtgagggagggagaattttttattagtattatagtatttatttttttttttgtttcgttagttcgacgttttttaaattttatttatttgtgattttttttttttaattattttcgcgtggtggaaaatggtggtgatgtgattttgaggggtattgagttgtttagagcgattttttttttatataagtttttatttgaatttgtaagattggagggatttggcgtgtgtaatcgcggagggggtttttatttttggttgttgtatttttttggttgattttagcgtgtttcggggaggtcgttgatagttggatgtttttttagtttttttttattatttttagtttcgtttagtatttttttttttttttttatagttttacgggttcgtgtatttggggtggaggttgtggtatagaaattgtttttttttttattttagttatagtatttttgaatatatggtta

SEQ ID NO: 1017 - DNA, 377 bp, Artificial Sequence
  chemically treated genomic DNA (Homo sapiens)
gggtaatgaggggaagttagggttttgggggaaattttttatttggggtgagggatgtggaggtagatattgggtattggggtagggttagggggtggaggtgttttggggaggagagggtaggattgggttcgtattgggatgtattgttttagtcggttttttgggaagatttcgtatagttggggttttagcgatcgtttcgtaagtatggcgaatattacgttttttagtattagggagtttacgttttgaaaaaggatggatagtaaaggggttaaggtaaagtggtatagggatatatatgagggttcgttttttttttattagagttgcgatttttgatttaattgtttggaggttttggagtataggtt

SEQ ID NO: 1018 - DNA, 377 bp, Artificial Sequence
  chemically treated genomic DNA (Homo sapiens)
agtttgtgttttagagtttttaggtaattggattagaagtcgtagttttggtgggaggaaggcgagtttttatgtgtgtttttgtgttattttgttttggtttttttgttgtttatttttttttagggcgtggattttttggtgttagaaagcgtgatgttcgttatatttgcggagcggtcgttggggttttagttgtacggagtttttttagagggtcggttggaatagtatattttagtacgggtttagttttatttttttttttttaaggtatttttattttttaattttattttagtgtttaatgtttgtttttatattttttattttaagtagggaattttttttaaaattttgatttttttttattgttt

SEQ ID NO: 1019 - DNA, 498 bp, Artificial Sequence
  chemically treated genomic DNA (Homo sapiens)
taagattttgttttatgttattttttttcgagaattggttttttttagttttaatttggtgtttagttttttttggaataatgtttcggttacgttttaggttagtttcgagttaggaggttttgatttgttgcgtattttattttatttttattcgtttttgttgtagtcgttgtcgtttagtaaggcggtcgaggagttttatcgggtggatttggtgttgttcgaggatattatcgagtatttcgtgcgtattaaggtcggcggcgtttgttttaaattcggtattaagatgttggagaggtcgttttcgggacggtcggaggagaagtttgagggggttaacggtttttcggttcggcggttatttcggtattttttgagcgttcgggagcgtacggggggtcgaggcgttcggcgtaagtgggtggagtgcgtgtgtttgttcggttggtacggatttagttgcggcgtgtttattgtggtgtagtattttaa

SEQ ID NO: 1020 - DNA, 498 bp, Artificial Sequence
  chemically treated genomic DNA (Homo sapiens)
ttggagtattgtattatagtgggtacgtcgtagttgggttcgtgttagtcgggtaggtatacgtattttatttatttgcgtcgggcgtttcggtttttcgtgcgttttcgggcgtttaggaggtatcggggtggtcgtcgggtcgaggagtcgttggtttttttaggtttttttttcggtcgtttcgggggcggtttttttagtattttggtgtcgggtttgaagtagacgtcgtcggttttggtgcgtacgaaatattcggtggtgttttcgggtagtattaagtttattcggtggagtttttcggtcgttttgttgggcggtagcggttgtagtaggggcgagtgggagtagagtggggtacgtagtaggttagggttttttggttcggggttggtttggggcgtgatcggggtattgttttagaaaaagttggatattaggttagggttgagggaggttagttttcgggggaaggtgatataggatagggttttg

SEQ ID NO: 1021 - DNA, 484 bp, Artificial Sequence
  chemically treated genomic DNA (Homo sapiens)
atagagaatttagtgtgaagaaaagataaggataaatttggattacgtgtatagattttaggttttgttttagaggagttttgcgggagtttaggatcggttttttttttacggatggttagtttttttttgattgtttttaagttcggttgtgttaagtatttcgcgtcgatataaagtattggtatttgatattttaatagtaataaatttgttagtgttttatatattgttagtttttagagtttattattcgtgtttttagaatagacgttaaggttatgtttttagtcggattgtcgtagtttcgtcgtcgtgatgaggtaggtgtggaggttttagtagttttttcggcgttggcgtggaggtttttttcgcggattatttgaagtagggttacgttgtattgtagttgtatagtattgtaaggattaagtagcgatgttttaatcgtaaacgaagaggaaggtgaaatgaaggtaaa

SEQ ID NO: 1022 - DNA, 484 bp, Artificial Sequence
  chemically treated genomic DNA (Homo sapiens)
tttgtttttattttattttttttttcgtttacggttaggatatcgttgtttgatttttataatattgtgtaattgtaatgtaacgtggttttgttttaggtgattcgcgggaggggtttttacgttagcgtcgggaaggttgttggggtttttatatttgttttattacggcggcgaggttacgataattcggttgggagtatgattttggcgtttgttttgggagtacggatgataagttttggaagttggtagtgtgtaaagtattggtaagtttgttattgttaaaatgttaaatattaatgttttatatcgacgcgaagtgtttaatatagtcgggtttgggggtagttaggaggaagttggttattcgtggaggaggggtcggttttggattttcgtaggatttttttgaggtagggtttgaagtttgtatacgtggtttagatttgtttttgttttttttttatattgagttttttat

SEQ ID NO: 1023 - DNA, 482 bp, Artificial Sequence
  chemically treated genomic DNA (Homo sapiens)
ttggtagtatttgggaagttttagcggttttttatcggtggttttgtcggtttagatgggatggtaagggtcggtggttatagcgtagttttgtaggttattggtagttaggcgtttgaggttacggttagttaggcgttgcgggaggttgtagggtatttcggaggaggagtcgcggaatttttgtagttaggtttagagtgggcgtgttcggtagttatatatttaggggttgtcgttgagttttaggtattgtagggtacgtaggggggttagggttttagtgggtagcgttgatagattgttggtaaatagatagagtgttatgaggcggttaaggttacggaaggtatgcgggtgtatatgggttacgcggttttggtgtagtaggagacggtcgaggttgtgtagtttacggaaggcgcgttcgggtacgttggagatgcggttgtcgtgtaggaagaggtgtgtgaggttgttta

SEQ ID NO: 1024 - DNA, 482 bp, Artificial Sequence
  chemically treated genomic DNA (Homo sapiens)
tgggtaattttatatatttttttttgtacggtaatcgtatttttagcgtgttcgagcgcgtttttcgtgggttgtatagtttcgatcgttttttattgtattagaatcgcgtggtttatgtgtattcgtatgtttttcgtgattttggtcgttttatgatattttatttgtttgttaataatttattagcgttgtttattgaggttttggtttttttgcgtgttttgtagtatttgaggtttaacgataatttttgggtgtgtgattgtcgggtacgtttattttgggtttggttgtagaagtttcgcggtttttttttcgaggtgttttgtagtttttcgtaacgtttggttggtcgtgattttaaacgtttagttgttaatgatttgtagggttgcgttgtggttatcggtttttattattttatttggatcggtagggttatcgatgaggagtcgttggggttttttaagtgttgttag

SEQ ID NO: 1025 - DNA, 395 bp, Artificial Sequence
  chemically treated genomic DNA (Homo sapiens)
ggaggatagataagtgaagggtagttatagtttagggtattaggggttatcgtaggttaggttggggcgtatttagggtcgggtatgggaggggcgttgtgtttgttatatgttgttttttttttagtttttcggggttttttgtttagtttttttgaggttttttagtagtttcggatttgtttaggagggaggaagtatcgtttatttacgtagtcgtttttagaggagtagttcgaggaagagtttaggaagttttcggtggttttgcgttttataagttcgttggttttgttgttttttgagttattcgtgttttttttttttcgtattcgtaggtttttatttgtgtagggaagaattaggggtttttttgggtttttaagagtttttga

SEQ ID NO: 1026 - DNA, 395 bp, Artificial Sequence
  chemically treated genomic DNA (Homo sapiens)
ttagaagtttttggaggtttagaagagtttttggtttttttttgtataggtgaggatttgcgggtgcggaggaggagaggtacgggtggtttagagagtagtagggttagcgggtttgtggggcgtaaggttatcgaggattttttgggttttttttcgggttatttttttgaggacgattacgtgggtaggcgatgtttttttttttttgagtagattcgaggttgttgggaggttttaggaaggttgggtagggagtttcggggagttggagagagggtagtatgtggtaggtatagcgttttttttatgttcggttttgggtgcgttttagtttggtttgcggtggtttttggtgttttgggttgtgattgttttttatttgtttgtttttt

SEQ ID NO: 1027 - DNA, 390 bp, Artificial Sequence
  chemically treated genomic DNA (Homo sapiens)
aaatagttggttaagaggaaagatagtggtggtaatgttgagagagtgtcgaggaaagagtggagagtttgtagttaagacgaatatttatagtaagtttttaatagttaaggatttgaaagttattatcgtttagttggatacgagagtaagaatttagtatattttgtcgggttttgttagttgtgtagagtataaggttttaggtaagttagtgtcggggtaaaatattgttttcgtcgaaagtagagttaagaatggaatggaaaaagattgaggtttgtatagcgtacgtacggggattttaaaatggattcgaaaatattttataatgtaattttgggagatcgtaatataaaaaggaaggaatttaatgtaggtgagttttaa

SEQ ID NO: 1028 - DNA, 390 bp, Artificial Sequence
  chemically treated genomic DNA (Homo sapiens)
ttgaggtttatttgtattgaatttttttttttttatgttgcgattttttaagattgtattgtggagtgttttcgaatttattttgaaattttcgtgcgtgcgttatgtaggttttagtttttttttattttatttttaattttattttcgacggaagtagtgttttatttcgatattggtttgtttaggattttgtgttttgtataattagtagggttcggtaggatgtattgaatttttgttttcgtgtttagttggacggtgatggtttttaagtttttggttgttgggagtttattataaatgttcgttttggttataaattttttatttttttttcggtatttttttagtattgttattattgtttttttttttggttaattgttt

SEQ ID NO: 1029 - DNA, 444 bp, Artificial Sequence
  chemically treated genomic DNA (Homo sapiens)
agggttgtgttattttggttgtagtagggtcgtatttgtttttttaattaatgtattattttttttagaaatagaataaagataaaagcggatgtataataaattattttagtttgttagcgttttgagagatgaaaaatttcgtttagagataggattgtgggtttataaaaaaattataaagtttaggtattttgttaagtttttagaacgttgtcgggtcgttttttttttttttatgtttagtcgtgcgtggttgtcgggatagcgtttatttcggtaggcgacgagttagtgtgggaatttaggggtcgttttagtttcgttggggtgttgagttgtagggagtggtttgtatcgattttttttttttttatttacgttatttaaaagtatattagaggggttttgagatgaaattcgtatattttttagagttttttt

SEQ ID NO: 1030 - DNA, 444 bp, Artificial Sequence
  chemically treated genomic DNA (Homo sapiens)
gggaaggttttgagaagtgtgcggattttattttaaaatttttttagtgtgtttttgagtggcgtgaatgggggagaggggagtcggtgtaggttattttttgtaatttaatattttagcgaaattgaggcggtttttgggtttttatattgattcgtcgtttgtcggagtgagcgttgtttcggtagttacgtacggttgagtatggagaaggaaagggcgattcggtagcgttttaggggtttggtagagtgtttgggttttatggtttttttgtaaatttataattttatttttgggcgaggttttttattttttagagcgttggtaggttgaaatgatttattatgtattcgtttttgtttttgttttatttttggaaaaggtggtatattggttagggaagtaggtacgattttgttgtagttaggatggtatagtttt

SEQ ID NO: 1031 - DNA, 346 bp, Artificial Sequence
  chemically treated genomic DNA (Homo sapiens)
aaatatgttattttttttatttaagaggtaagaatcggttgtaagttatggggttattaaatcggtcgtagttatagtaagtagaagaggttacggtttaggtttttttagattttttttgggatatacggttttttgggggggttcggcgaaattattcggattaggagttatcgtatacggttatattaggtttgtcgtagaggtaggtagttaaggttacgtggtaggcggtgatttttttgcggtacgtggtaatgagaggttgcgagagatttatttttttggtttggaatagagtacggagtttttttgggtttttttcgaagttatttttagttaggaa

SEQ ID NO: 1032 - DNA, 346 bp, Artificial Sequence
  chemically treated genomic DNA (Homo sapiens)
tttttgattgaggatggtttcgagaagggtttagaagagtttcgtgttttgttttagattaagaaggtggatttttcgtagttttttattgttacgtgtcgtaagggagttatcgtttgttacgtggttttggttgtttatttttgcggtaagtttgatgtggtcgtgtacgatggtttttggttcgagtggtttcgtcgggtttttttagagagtcgtgtgttttagggaaagtttgagaaggtttgagtcgtgattttttttgtttattgtaattgcggtcggtttagtgattttatgatttatagtcggtttttattttttaggtgaaggagatgatatgttt

SEQ ID NO: 1033 - DNA, 400 bp, Artificial Sequence
  chemically treated genomic DNA (Homo sapiens)
tttttgtttttttagttgtttttgggatattttagtatgtggacgagtagtttttgttacgtttttttttatttgtggttttggtgattatgttttggtttttgattgtttaatgttgggtttttgtttatattcgtggtagggttttggattggtgacgtgttattttaatttttggtgtttggttttttggttaattttgatttttggaattagtgggattagtaatatattaaggagttttgtttttttattagagttttggaattcgagattagttggcgatgatttttgaatatcgttatcgttgtaaatattttataattttaggttttggtattgagttattttttatgggtgatattatgaaattttgttttagttagttttgtaggttttg

SEQ ID NO: 1034 - DNA, 400 bp, Artificial Sequence
  chemically treated genomic DNA (Homo sapiens)
taggatttgtagaattggttgaaataagattttatggtgttatttatgagagatgatttaatgttaaggtttgaagttatagagtgtttatagcggtggcgatatttaggggttatcgttaattggtttcgagttttaaagttttgatgaagaaataagattttttgatgtgttattgattttattgattttaggagttaagattagttaggaagttaaatattaggagttggggtggtacgttattagtttagagttttgttacggatgtaggtaggagtttagtattaggtaattaggagttagaatatgattattagggttataaataggaagaggcgtgataggaattgttcgtttatatattggggtgttttagggatagttggagagatagaaa

SEQ ID NO: 1035 - DNA, 500 bp, Artificial Sequence
  chemically treated genomic DNA (Homo sapiens)
atttagtggagttggggaaggaagaaagtggggttgggagaatttttttaattttatttttgttggttcggggacgggtatcggtttttagtaagagaagtattttcgggatgttgagcgttttattttgtttttaggatttaggtaggtaggttttagtttcgtcgcgttttcggatttataggttagcgtggttcgaagttttttttgggggtttcgcgggcgtttatacgtattcggggggtatttgcgcgtcgggcgtcgttttgcggtagaagtcgagtttttgtattagcgtattgattttttcgcgggttattttattgagtgggatgcgttgaggcggaggaggggcggggttagtaggttgggtttcgtttttggtttcgtttttagtttattttttacggttttatttttagtttttcgtagcggcggtttagtagtacgagtttagggtcggttttagggaggtgttttattattaggttgtgattgga

SEQ ID NO: 1036 - DNA, 500 bp, Artificial Sequence
  chemically treated genomic DNA (Homo sapiens)
tttagttataatttggtgatgaaatatttttttggggtcgattttgagttcgtgttgttgggtcgtcgttacgaggaattagaggtgaggtcgtgggaggtgggttgggggcgaggttagaggcgaggtttagtttgttgatttcgtttttttttcgttttagcgtattttatttagtgaaatgattcgcgaagagattaatgcgttagtgtaggagttcggtttttatcgtaaggcggcgttcgacgcgtaggtgtttttcgagtacgtgtgggcgttcgcgaagtttttagaggaaatttcggattacgttgatttgtaggttcgggggcgcggcggagttgggatttatttgtttgagttttggagatagaatgaagcgtttagtatttcgggaatattttttttgttgagagtcgatgttcgttttcgggttagtagggatggggttggggaggtttttttaattttatttttttttttttttagttttattaaat

SEQ ID NO: 1037 - DNA, 470 bp, Artificial Sequence
  chemically treated genomic DNA (Homo sapiens)
ttttgattgtgaaaagggtattaatttgtgtaatggcgtcgcgattcggtcgcggattttagtttttaaagtcgggtatttttaattaggagaaattaagtggggttgttatatattttgagaataagtaatattatttaaatttaggtagttttaattattaatttaatcgttgaattttcgttgttatatgttttttaaatagattagtataattttaattaggatttaaaatgtattattttcgtttcggaatttagaatttgtagtcgacgggagtttttggaggtttaatgattttaattatggcgagaaatattttttttcggtggggaggggcgcggtcggtggcgaggagggtattttttcgggtcggagaaggtcggatggtagttcgtttcgaaagtttcggttcgttggattgggggttcgggggtggggggaatatagagaagtagggttggtggagg

SEQ ID NO: 1038 - DNA, 470 bp, Artificial Sequence
  chemically treated genomic DNA (Homo sapiens)
tttttattagttttgtttttttatgttttttttattttcgaatttttaatttagcgggtcgggattttcggggcgggttgttattcggtttttttcgattcgggaaagtgtttttttcgttatcggtcgcgtttttttttatcgggagaagatatttttcgttataattaaagttattaagtttttaaaggttttcgtcggttgtaggttttgagtttcggaacgaagatgatgtattttaagttttagttaagattatgttgatttatttaggagatatgtagtagcgagaatttagcggttaagttagtggttaaggttgtttaagtttaaatagtgttatttatttttaaaatatgtagtagttttatttaattttttttaattaaaggtattcgattttagaggttggagttcgcggtcgggtcgcggcgttattgtataggttggtattttttttataattagaa

SEQ ID NO: 1039 - DNA, 491 bp, Artificial Sequence
  chemically treated genomic DNA (Homo sapiens)
ttatagaaggtgattgtgggttgagtttgaggttttttttagatggggaagagagaatagtatattttttttgtttacgtttcggtattttatttaagaattagttgttcgttagttatttgttatcggagatagttttgttggcggtttttagaaaaagcgaagtagttagaggatgaatcgttattcggggaatatatttgtatataggataggaatggatgggagtggggagcgttttggggttattgtttaaacgttatttttatggtttttaagatttgtattagtagtttagtcgttgatgaattataattttcggataagttgtagaggtttttttcgttttatgtgtttatttttgtcgtttatattgggggatttatgttttttggggttaggaggagaaaataatgagttattggggataagagaaaaataaaaatgttttgtatgtgtaaaattatttaaaatggaggtttttagaggat

SEQ ID NO: 1040 - DNA, 491 bp, Artificial Sequence
  chemically treated genomic DNA (Homo sapiens)
gttttttaaaagtttttattttaggtggttttgtatatatagggtatttttgttttttttttgtttttagtgatttattattttttttttttagttttaggaagtataaattttttagtatgagcggtaggggtgaatatatggaacgaggggggtttttgtagtttgttcgagaattataatttattagcggttgagttgttgatgtaagttttggagattatgaggatggcgtttgaatagtagttttagggcgttttttatttttatttatttttgttttgtgtgtaggtgtgtttttcgaataacgatttattttttggttgtttcgttttttttgaaagtcgttaatagagttgttttcgatgataggtgattaacgggtagttgatttttgagtgagatatcgaggcgtgggtaggagaggtgtgttgtttttttttttttatttgggaagggttttaggtttagtttatagttattttttgtga

SEQ ID NO: 1041 - DNA, 478 bp, Artificial Sequence
  chemically treated genomic DNA (Homo sapiens)
ttaaggaatttgggtttaggtattgattttgaggagttggcgatgtaggtatggggtatttacgtagggttttagtaatttttgggaaggagaattcggggtttgaaggtgaggcgagtggatttaggattggataatttgggggttttagggaagtgagatttgaagtagttaggttatatcgggttttcggtagtaggtagagggtttttcgtgggaagtttttggtcgttggtatttggtagttgttttttgtagaggtattgggcgtagagttgtgtttatcgttttgaaatttgcgacgtttagtagttttgttttagttttattatagtttttgaacgtgcgtcgtattggtttttagtagtgtataattttgggttgaatacgtagtagagtagagtaaaaagatggcgttttcgcgtcggtttttttttagatataagataagaaggggtgaggagggagtttttgaata

SEQ ID NO: 1042 - DNA, 478 bp, Artificial Sequence
  chemically treated genomic DNA (Homo sapiens)
tgtttaaaagttttttttttatttttttttgttttgtgtttagaaagaagtcggcgcggagacgttatttttttattttgttttgttgcgtatttagtttaaaattgtgtattgttggaggttaatgcggcgtacgtttaaaagttatgatgaggttggaatagggttgttaagcgtcgtagattttaggacggtgagtatagttttgcgtttagtgtttttgtagggagtagttgttaaatgttagcggttagaaattttttacggggagttttttatttgttgtcgaaggttcggtgtgatttggttgttttagattttatttttttgggatttttaagttatttagttttgggtttattcgttttatttttagatttcgggtttttttttttaaaggttgttggagttttgcgtggatgttttatatttgtatcgttagttttttagggttagtgtttgagtttaggttttttaa

SEQ ID NO: 1043 - DNA, 292 bp, Artificial Sequence
  chemically treated genomic DNA (Homo sapiens)
aattagttggtgaaggtttttaattagtaaaggaggaagtagtcggggtcggtgagggtgaggtcggtagttaggtaggaaggtagtaggaggaggaggaagcggaggcggtattttttgagaggcgtatgtttagtgagtcgtgaagatggtagggttggcggagcggtcgtcgtatttgattttttttttttttttaggatatgtgatggcgtttagtttggagttgggataaggtttttgtagtcgatatttttataggagaagttttgggattggggtagtagtaagg

SEQ ID NO: 1044 - DNA, 292 bp, Artificial Sequence
  chemically treated genomic DNA (Homo sapiens)
ttttgttgttgttttagttttagagttttttttgtaggggtgtcggttataggaattttattttagttttaaattggacgttattatatattttaaaaaaaggggagagattagatgcggcggtcgtttcgttagttttgttatttttacgatttattgagtatgcgttttttagaaggtgtcgttttcgtttttttttttttttgttgtttttttgtttggttgtcggttttatttttatcggtttcggttgtttttttttttgttggttaagaatttttattagttggtt

SEQ ID NO: 1045 - DNA, 246 bp, Artificial Sequence
  chemically treated genomic DNA (Homo sapiens)
ttttagagtttttggtgtggggtggggtatataggtagggattaatttatggagtttttagtttgttttgtagtgttttttataaaagttatggatttttttttgtttgttatatgtcgtgtttattattgtgacggttttttttacggggatttttatacgatagagagtaaggcgttagttaaggattattgggtagtcgggggttggcggtgttaagtagtaggaagtagtttagttggatga

SEQ ID NO: 1046 - DNA, 246 bp, Artificial Sequence
  chemically treated genomic DNA (Homo sapiens)
ttatttagttgggttgttttttgttgtttagtatcgttagttttcgattgtttagtgatttttaattgacgttttgttttttgtcgtatggaggttttcgtggaagaaatcgttatagtggtgggtacggtatgtggtaggtaggggaggatttatagtttttataaagaatattgtaaagtaggttggagattttatgagttggtttttgtttgtgtgttttattttatattaagggttttgagg

SEQ ID NO: 1047 - DNA, 500 bp, Artificial Sequence
  chemically treated genomic DNA (Homo sapiens)
attagggtagttaaggggaaagattgacgtagaaggaatgaggtttttatgggttgggtttaaaagatttagagcgagtgtttagttgaaatatttgttaaaattttaaggaatatttatataaaaataagaagttgttcggtatagaagttagggtaggggatgtttttcgaaggttatattttatggtaggtatatagtagtacgtttaaatatggtttttgttaaggttagagaggtattatttatatagaagaagttattatcgtgattttatttatttcgcgtttttatcgcgtaattgaatgttgagtgtggacggtattttttttagtatttggttgcgttatcgtgtttagttggtaagttttgggggagaagagaggtttagaaggaagattatttgagtttattagaataatgtgtgtttttaataaggtaggggcgtttaaatttagtaggtttaatagattaagttatgttatgaaggttttgtggat

SEQ ID NO: 1048 - DNA, 500 bp, Artificial Sequence
  chemically treated genomic DNA (Homo sapiens)
gtttataagatttttatagtataatttggtttgttggatttattgagtttgggcgtttttgttttgttaaaagtatatattgttttgatggatttagatggttttttttttgaatttttttttttttttaaggtttgttaattgagtacggtaacgtagttaagtgttggaagaagtgtcgtttatatttagtatttaattacgcggtgggggcgcggggtgggtagagttacgatgatgattttttttatgtgaatggtgtttttttagttttaataggaattatgtttaagcgtgttgttgtatgtttgttatggagtgtggttttcgaagaatattttttattttgatttttgtgtcgagtaattttttatttttgtgtgggtgttttttgaggttttggtaaatgttttaattaagtattcgttttaggttttttggatttagtttatgggaattttattttttttgcgttagtttttttttttgattgttttagt

SEQ ID NO: 1049 - DNA, 442 bp, Artificial Sequence
  chemically treated genomic DNA (Homo sapiens)
tattttgttttaagggtaagtaaggaatacgtttttttagttttaggggttatcgcggttttttttttttttagtttcgaagttatgggggttttttcgttatttttagttttttgggttatcgaagtattcggttttttagtttttggagttatcgcgggttttttttcggtttcgagggttaagggggttttcgttcgttagtgttaaagcgttcggtcggaggcggaaggaagtgatatttattgtttttttcgagatcgcgtcgttcgcggttcggtcggtagttgtagtgtagatagttcgagagtttcgtttgtaggcggtgtagatatatgtagatattgtagatattgtagatatcgtttcggcgtcgatttgataaacggtttcgttttttttggaagtcgtttgcgtgtttatttatttgtgtttagttaga

SEQ ID NO: 1050 - DNA, 442 bp, Artificial Sequence
  chemically treated genomic DNA (Homo sapiens)
tttaattgggtataaataaatggatacgtaggcggtttttaaaagaggcgaaatcgtttattaagtcggcgtcggggcggtatttatagtatttatagtatttatatgtatttatatcgtttgtaggcggggttttcgggttgtttatattgtaattgtcggtcgggtcgcgggcgacgcggtttcggggagaataataaatattattttttttcgttttcgatcgggcgttttggtattggcgggcggggatttttttggttttcggggtcggggaaggattcgcggtggttttagggattggggaatcggatatttcgatagtttaaggggttgggggtggcgagggggtttttatggtttcgaggttggggaaggggagagtcgcggtggtttttggggttgggggaacgtattttttgtttgtttttggggtagggtg

SEQ ID NO: 1051 - DNA, 333 bp, Artificial Sequence
  chemically treated genomic DNA (Homo sapiens)
ttttttttttttttttaaatttttatttgatattaaataaagtaaattttaaatagattaattgtcgtacggttttgtttcgtttttttagtttgtttttaggtttggcggggggtcgggttgcggtggcggtagcggtgggagatgtcggggcggtcggcggaggtttatgtggcgttttaggtgggatgttagcgttttgaaggcggaggttttggttttttttttttgcggtttgggtatggtatttttttagttttacgtgatggtcgttcggcggtattagtatagtcggtttattatcgaggtggacgagtatagttttaattttat

SEQ ID NO: 1052 - DNA, 333 bp, Artificial Sequence
  chemically treated genomic DNA (Homo sapiens)
gtggggttggagttgtattcgtttatttcgatgatgagtcggttgtgttggtgtcgtcgagcggttattacgtgggattgggagaatgttatgtttaggtcgtaggggaggagggttagggttttcgtttttaggacgttggtattttatttagagcgttatatggattttcgtcggtcgtttcggtattttttatcgttgtcgttatcgtagttcggtttttcgttagatttggaaatagattgaggagacggagtagaatcgtgcgatagttaatttgtttgggatttgttttatttaatgttagatgaagatttagaaagagggagaggg

SEQ ID NO: 1053 - DNA, 457 bp, Artificial Sequence
  chemically treated genomic DNA (Homo sapiens)
tgtttagtttgggaagtgttttaagattattttgggagaggtttgggttgcggcgttttcgtttttttgtttcgcgtaaggtcggggattttgttttttcggagcgagggtgttcggtaggtattagcggttagtagtagtcggggtcgggttttattcgaggatcgaggtgtcgatgaacgtttatgttcggaagatattggttttttggtttatgtatttatttaattttaagttaggttttttagatttttaaattaatagtggattttgtaaattgttgcgttagaggaaaatttaagcgagttcgatcgcgggaagtatcgtcgttatgaaaggcggtggtttagcgttatttgtcgggacgcggtagttaagggagtcggtgtcgggggaggtttgaggtttcgggttttcgggaggaaatagagttgtttgtaggaataaaggaggaaag

SEQ ID NO: 1054 - DNA, 457 bp, Artificial Sequence
  chemically treated genomic DNA (Homo sapiens)
ttttttttttttgtttttgtaaatagttttgttttttttcgaggattcgaggttttaggtttttttcgatatcggtttttttggttgtcgcgtttcggtaggtggcgttgagttatcgttttttatggcgacggtgtttttcgcgatcgggttcgtttagatttttttttgacgtaataatttatagaatttattgttgatttagggatttggggagtttaatttaaaattaagtaaatatataaattagggagttagtgtttttcgaatatgagcgtttatcggtatttcggttttcgggtgaggttcggtttcggttgttgttggtcgttggtgtttgtcggatattttcgtttcgggagagtaggattttcggttttgcgcggagtagagggacgaaggcgtcgtagtttaggttttttttagggtggttttgagatattttttagattggata

SEQ ID NO: 1055 - DNA, 312 bp, Artificial Sequence
  chemically treated genomic DNA (Homo sapiens)
ggttgggtgtttagtttatagggaaagaggcggttgattgtagatatgattagttatttattcggggattttcgttatattatgtatgtgggtcgtggcggggatgttttcggggatacgtttttttttagtaattacggtggtagtttcgggagtatttatcgtttatttcgtagttttttggttaagaagttgtagttggtgcggagggtgggggcgttttttcggaggatggtatttttttttgtatttttttcggttttatcggttattttttttattattaagaacgttatttttttgttttagttt

SEQ ID NO: 1056 - DNA, 312 bp, Artificial Sequence
  chemically treated genomic DNA (Homo sapiens)
gagttggggtagggagatggcgtttttgatgatgggggagatggtcggtggagtcggggagggtgtagggggagatgttatttttcgggggggcgtttttatttttcgtattagttgtagttttttggttaggaagttgcggggtgagcgatgggtgttttcggagttgttatcgtggttgttgaggaaggacgtgttttcgaagatattttcgttacggtttatatgtatggtgtggcggaagttttcgagtgggtggttgattatgtttgtagttagtcgtttttttttttgtgaattggatatttagtt

SEQ ID NO: 1057 - DNA, 439 bp, Artificial Sequence
  chemically treated genomic DNA (Homo sapiens)
ataattttaagtttttttttgtagttattagtaggttataaagagtaaagggtttaggaacgtgttaagaagttgttttttggtttttcgttattttagttatttttgattataaggttgtttttagaaggaaggtagtagagaatggttttatattgttcgattcgggcgttgtatttagcgtttattttgagttttattaacgaatagttgggtttgaaattattttttttttaggtttgtatagtaatttaagttatcgtaaagtttatttttgtagtttttgtttttggttatttcgatgacgtcgattattttattttgtttaaatatttggtttataggtatttgttgtttaagtttttcgcgggtttagtttagtttttcggttatagtgttttcgtttatttggatttttattaggtgggtttttttttgg

SEQ ID NO: 1058 - DNA, 439 bp, Artificial Sequence
  chemically treated genomic DNA (Homo sapiens)
ttagaagaaggtttatttgatggagatttaggtgaacggaggtattgtggtcgagaagttggattgggttcgcgagaggtttgagtagtaggtatttgtgaattaagtgtttgggtaggatgagatgatcgacgttatcggggtgattaagggtaaaggttataaaggtgagttttgcggtggtttgagttgttgtgtaaatttgggggagaagtggttttaggtttagttgttcgttgatgaggtttagagtgagcgttgggtatagcgttcgaatcggatagtgtagaattattttttattgttttttttttgagaatagttttgtggttagaagtggttgggatagcggagggttaggggataattttttaatacgtttttggattttttgttttttgtagtttattgataattgtaaaggggagtttggaattat

SEQ ID NO: 1059 - DNA, 453 bp, Artificial Sequence
  chemically treated genomic DNA (Homo sapiens)
gaagtaagatgtttttagtggttgtatttacgattatggtttttttgtttattgtttgggcggggtttttaataatttttttaatttgtttatcgtttttagttgagattcgtttaatgatatgcgggggtggggtatacgtttttaattgagggttggttttggttcgtttgatggtacggatgttttttttaattttttgtgtgatttggtattaattgttaattaaggtaagaatattgggtgtgtttttatttataaatttttttattatttttgttatattggtgtcgttttggtttaagttgcgggtttgggttcgtgttcgtaatttgtttattagttttattatattgtaggtaattttagttatagtagttgttgtttttagatttatgttagtgtttaagagtataaaattgattttttttgtgaagggtgttagatttaggt

SEQ ID NO: 1060 - DNA, 453 bp, Artificial Sequence
  chemically treated genomic DNA (Homo sapiens)
gtttgggtttggtattttttatagaaggaattagttttgtgtttttggatattggtatgggtttgggagtagtagttgttgtggttgggattatttgtagtgtggtagaattagtaaataaattgcgggtacgagtttaagttcgtaatttggattaaagcggtattaatgtagtaaaggtgatgaaggagtttgtgggtgggaatatatttaatgtttttattttagttgataattggtattaagttatataagggattgggaggaatattcgtgttattagacgagttagagttaatttttagttaggagcgtatgttttattttcgtatattattgggcgaattttagttgaaggcggtgaataggttgagagggttgttgaaggtttcgtttaggtaatgagtagaggaattatgatcgtgggtgtagttattggaggtattttgtttt

SEQ ID NO: 1061 - DNA, 305 bp, Artificial Sequence
  chemically treated genomic DNA (Homo sapiens)
tttttttatttttagtatgcgaggttgggagcgggtgtaggtagtttagtcgaagtttagaggttaagggatagttttgggtttttttttgttttgcgtggttttgttattttttgtttagagaagatagtttattttttttttttattatcgtttttttttgggtttgttatcgaggtaattttgaatgattggaacgttaatttttgattttcgttcgtttttttttcgattagatataaagtagaagtgaatagggttggggtaggcgagggtagataaggagttatgtattagaattagtt

SEQ ID NO: 1062 - DNA, 305 bp, Artificial Sequence
  chemically treated genomic DNA (Homo sapiens)
agttgattttgatgtatggttttttatttgttttcgtttgttttagttttgtttatttttgttttgtatttgatcggaggaggggcgggcggaagttaagggttaacgttttagttatttaaaattatttcggtggtaggtttaggggagggcgatggtaggaggagaggatgagttgttttttttgagtaggaagtgataaaattacgtagggtaggggaaggtttagagttgttttttggtttttgggtttcggttgagttatttgtattcgtttttagtttcgtatgttgagggtggaggag

SEQ ID NO: 1063 - DNA, 404 bp, Artificial Sequence
  chemically treated genomic DNA (Homo sapiens)
tagtagtttttggaaggttatggcgggtaggtaaattagggcgttgtgggttaggtttagcgtggttagcgtatttagtgtttcgaacgttttcggtcgtagtttttttagtgcgtttttttttagttttagtcgtcgtaacgagtttagttcgtttagcgttttttggggtagtttacgtaggtggttggaggttaggttgagtaggagtaggcggtttaggttacggaaggcgttttcggttattagttttatttcgtagtggcgtaggtttaggtgtgtgaggtgaggtacgttttggaaggcggttgcggggattatttttagtaaattgttttgtaggtttagtcgttgggttagttggggatagcgaggagaaagtggggttgagttaggtagggatt

SEQ ID NO: 1064 - DNA, 404 bp, Artificial Sequence
  chemically treated genomic DNA (Homo sapiens)
ggtttttgtttggtttagttttatttttttttcgttgtttttagttgatttagcggttggatttgtagggtaatttgttgaaggtgattttcgtagtcgttttttagggcgtgttttattttatatatttggatttgcgttattgcgaggtggagttggtggtcgagggcgtttttcgtggtttgggtcgtttgtttttgtttaatttggtttttaattatttgcgtgagttgttttaggaggcgttggacgggttgggttcgttgcggcggttggagttggaggggaacgtattggaggagttgcggtcggggacgttcggggtattgggtgcgttggttacgttaaatttggtttataacgttttggtttatttgttcgttatggttttttaggggttattg

SEQ ID NO: 1065 - DNA, 400 bp, Artificial Sequence
  chemically treated genomic DNA (Homo sapiens)
tttggatttaggagtagagtttgtgaagtgttatttttagtatgttgagtttttttatttttttaaataacgtatttttgttattaggtattatgtattagtaaagagaggagggttgatgttagggttcggggacgggatatttaggttggggtgtttagatttttttgttgattattttatcggttttgttgttttatttatatagagtttgtttagtttgtcggtttgggtgttgatggatgaggacgttcggatttttttttattagtcgttttatgatttagagtaggtgttttaggtatttcgtcggtttcgttcgcgtattcggaaagtgtaagtgattagtttttgggtttttatatggttagagttttgggtttttgttggaaaagtattt

SEQ ID NO: 1066 - DNA, 400 bp, Artificial Sequence
  chemically treated genomic DNA (Homo sapiens)
agatgtttttttagtagggatttagggttttggttatgtggaagtttaggggttggttatttatatttttcgggtgcgcgggcggagtcggcggagtgtttggggtatttgttttgagttatagggcgattggtaaaagaagattcggacgtttttatttattagtatttagatcggtaggttgagtaggttttgtgtgggtgagatagtagaatcggtggggtagttagtagaaagatttggatattttagtttagatgtttcgttttcgagttttgatattagtttttttttttttattaatgtatgatgtttgataatagaaatgcgttgtttaaaagaataagaaaatttagtatgttgaaggtaatattttataagttttgtttttgggtttaag

SEQ ID NO: 1067 - DNA, 495 bp, Artificial Sequence
  chemically treated genomic DNA (Homo sapiens)
gaattggaaaagtatttgggtatttaaattcgtgtttttgatgttataaagaagaaataaattgattagttcgttaatgaagttgagagatttgatgttttttttaatgttgttggttttgtttattatggaattgttttggattgtgaggagaaagattgggatttttcgatgaattttaatgtgcgtagtacgtatttgatgattaaggtatttttttttaaaatgtttgtttaaaaatttggtaatattattattatgttttttgtggtttttagtattaaaggagttgtgaatagatgtgtgtatagtataattaaggtagtcgtgattggttttataaaatttgtggttgtagattttatttagtagggtattaggtgtaattgtgtgtgtttaggaacggttgatacgttatttttataagaaagaatataagttagaggaaattttgaagaggtacggaatgattttttgaagagataaaagatggga

SEQ ID NO: 1068 - DNA, 495 bp, Artificial Sequence
  chemically treated genomic DNA (Homo sapiens)
ttttattttttgtttttttaggaaattatttcgtgtttttttaggattttttttggtttgtatttttttttgtagagatggcgtattaatcgtttttgggtatatatagttgtatttgatgttttgttggatgaaatttgtagttatagattttgtgaggttaattacggttgttttggttgtgttgtatatatatttgtttataatttttttgatgttggaaattatagaaaatatggtgataatattgttagatttttgagtaagtattttaggaaggaatgttttgattattaggtacgtgttgcgtatattgagatttatcgagaagttttagtttttttttttataatttaggatagttttatgatggataaaattagtaatattaaagagaatattaagttttttaattttattggcgaattgattaatttgttttttttttgtgatattaaggatacgagtttgaatatttaggtatttttttagttt

SEQ ID NO: 1069 - DNA, 452 bp, Artificial Sequence
  chemically treated genomic DNA (Homo sapiens)
aaggttttgagtttttgtttttgtatttatttttttttttataagttagttttttttttttttatttgagacgtaattttgtggttatagtagtagtagtagtaggaaggttggggttatggttttatttagttgggtagtgttaggtttggagatttaaggtgagggtttattcgatataggatgtgttatttgggtttgttagggaaggattcggggttttaaaagtgaagttgtttatttagggaagtgaggtagtgtgggatttattgtttttagttaatcgtagggatttattgagtttattatgagggcggtgttggtagttgttttcgttttttttttcggaattttaggtaggtgtggttgttttatttagtttggggttttaagtcgggaggatttatagttagagggtttttcgttttttttaattttttttagaaattggt

SEQ ID NO: 1070 - DNA, 452 bp, Artificial Sequence
  chemically treated genomic DNA (Homo sapiens)
attagtttttgggggaggttggggagggcggggagttttttgattgtgagttttttcggtttggggttttagattgggtggagtagttatatttgtttgaagtttcgaggaaaagggcggaaatagttgttagtatcgtttttataataggtttaatgaatttttgcggttggttgggggtagtgggttttatattgttttatttttttaaatgggtagttttatttttagaatttcgggtttttttttggtaggtttaggtggtatattttgtgtcgggtgggtttttattttggatttttaggtttgatattgtttagttggatggaattatggttttagtttttttgttgttgttgttgttgtggttatagggttgcgttttaggtgaggggagaaggggttgatttgtggaggagggagtgggtatagaggtaggagtttagggtttt

SEQ ID NO: 1071 - DNA, 374 bp, Artificial Sequence
  chemically treated genomic DNA (Homo sapiens)
tattttttaagaatttatgagttttggtaataggcgggggtggggagggtaggtttaaggggtggtagttggtttaggataatttatttgggggtagtatgtttagagagattttgtgtaaaatttggggttttttggttttatttattatgtagttatattcgttagtattttttttttgtagggtaattatttttatttgtagtaggtttttatttaggtttgtgagaaacgtacgtttgttcgttggagttttgcgatttatagttgaggatattaggggttggtattttttcggtaagaatcggtattatattttttgagttttgatattttggagtttgtagtggtattgtattagaatggagtttttt

SEQ ID NO: 1072 - DNA, 374 bp, Artificial Sequence
  chemically treated genomic DNA (Homo sapiens)
gggaagttttattttggtgtagtgttattataggttttaggatgttaaagtttagaaggtgtggtgtcggtttttgtcggaggggtgttagtttttggtgtttttagttgtggatcgtagagttttagcgggtaggcgtacgttttttatagatttgggtgggggtttgttgtaggtggaaatggttattttgtaggaagaggatgttggcgagtatggttgtatggtggatggggttagggggttttagattttgtatagagtttttttgaatatattgtttttaggtgagttattttaggttagttattattttttagatttattttttttattttcgtttattgttagggtttatgggtttttgaggagtg

SEQ ID NO: 1073 - DNA, 465 bp, Artificial Sequence
  chemically treated genomic DNA (Homo sapiens)
ttttaaaaatgttatttggaaattaagtataattttgttaaaatgagtaaggattttatttaaatgaaattaaagagggttattttattttttttatttagtatttaaaataatttagagtgtgagaaattagattgtttagggttatacgtttttaaggattgttttttaatagttttttttttgtttttgtttcggggttttagttttttttttttatttttggatttaagtttgcgtggtgttggttatattgattgatagttaggggatatgtatttattagtagggtgtgttttttcggtttttataatgaatgttggtttagtcgttagtagtttttacgttaatgttttttcgttagtgaggttaggtttttaggtgttattggagttagaggagggtagttggcgtgcgttaagtagttattaggagttattttatgttaatgttttattttttgta

SEQ ID NO: 1074 - DNA, 465 bp, Artificial Sequence
  chemically treated genomic DNA (Homo sapiens)
tgtaggaagtggagtattggtatgaagtggtttttagtggttgtttggcgtacgttagttgtttttttttgattttagtggtatttgggggtttggttttattgacgggagaatattggcgtgaaggttgttggcgattgggttagtatttattgtgaagatcggagggatatattttgttggtgagtgtatgttttttggttgttagttagtgtggttaatattacgtagatttgagtttaggggtggaggagagagattggaatttcggggtagaggtaggaggagggttgttagagagtagtttttgggggcgtgtgattttgaataatttgattttttatattttaaattattttaagtgttaaataaaaaaaataagataattttttttaattttatttaggtgaaatttttgtttattttagtaaaattgtgtttaatttttagatgatatttttgggg

SEQ ID NO: 1075 - DNA, 459 bp, Artificial Sequence
  chemically treated genomic DNA (Homo sapiens)
ggaggtagagggagagttttttttagatgttattattattgttaagtagttgtatttttcgtcgggaaatttttttaggtaagagaacgtagagacgttcgttcgtagttcgggggaggacgttttattaggtgttggttacgaataggaggtttttttgggtgtgaggggtgcgttagggtcgtttatttaggagcggttcgcgggaggattaggcgaggtttttaacggagtttttagtgtgtgtgtcgaagaaggttttttggggtttcgtaacgttcgtagttagttttttaagggcgcgtttgatttgttaggtgagttttcggtcgagggcgtagcgtatacggttagtttcgcgtaggtagattgtatagttcgttttaagggttacgtttattttgttaaggtgttaattttggatatttatttgagtaagattgagggggtataagtgga

SEQ ID NO: 1076 - DNA, 459 bp, Artificial Sequence
  chemically treated genomic DNA (Homo sapiens)
tttatttgtgtttttttagttttatttaagtagatgtttaaagttagtattttagtagggtgggcgtgatttttggggcgggttgtgtagtttgtttgcgcggagttggtcgtgtgcgttgcgttttcggtcggaggtttatttggtaaattagacgcgtttttggggggttggttgcgggcgttgcggggttttagggagtttttttcggtatatatattgggggtttcgttaggggtttcgtttagttttttcgcgggtcgtttttgggtgggcgattttggcgtattttttatatttaggaaagttttttgttcgtggttagtatttggtgaagcgttttttttcggattgcgggcgggcgtttttgcgtttttttgtttggaggaatttttcggcgaggaatgtagttgtttggtagtggtggtggtatttgggaaaggttttttttttgttttt

SEQ ID NO: 1077 - DNA, 382 bp, Artificial Sequence
  chemically treated genomic DNA (Homo sapiens)
agggttttaggttgtggttttttatgaattgggtgtaatattttagggatttttttttttacgttatttttaagagtaggtatttatttgtttgaagtttgtatgaagttttattcgtttattttttattttttttttttttttttgtttttagttagtttttgtgtttaggatatttattaattatgatttttaaggttattagtagtaatagtagaaataaaagaaggcgtatagggttagaagttagggatatttttcgtatattgtggagagtaataggtaggaagttgggcgtgtatatatttatttttattggtatggtgaagaaatgttatttaatagcgtgggtgtgggtattgtttaaattttttattttgga

SEQ ID NO: 1078 - DNA, 382 bp, Artificial Sequence
  chemically treated genomic DNA (Homo sapiens)
tttagggtaaagaatttgggtagtgtttatatttacgttgttggataatatttttttattatattagtgagggtgaatgtgtatacgtttagttttttgtttgttattttttatagtatgcgaagaatatttttgatttttagttttgtgcgtttttttttgtttttgttgttgttattaatagttttggagattatggttggtgagtgttttgagtataagaattggttgaggataaggaggagggagaaaggtagggggtaggcgaatggggttttatgtaggttttagataagtgggtgtttgtttttaaggatgacgtgaggaagaggatttttgggatgttatatttagtttatgggagattatagtttgaggtttt

SEQ ID NO: 1079 - DNA, 498 bp, Artificial Sequence
  chemically treated genomic DNA (Homo sapiens)
ggttggatgttagttttaggagagagaaatttttttttagtttgagggaagagagtggtgtgaagttgggggtttgtatgttttaggtaggaagaaagtggggttaatagatataggtaggtagtatgattatggtttaggagttagtttagggttggggggttgttttggttttagcgtttttttttgagagggtttttatttttggtttttcgttcgtagttgaaggagtagagggaacgtgagcggtggtagcggtagcggaaggttttggttgtaggtagttcgttggaggagggaggagagttcgatgatttggtgtcggttttgcgttttggggaggttttcgataaggatttatgtaagtttaagcgtagtcgtaagcgattagggagttaggttttggaagttattcgggagcgggtaataaatcggttaaattattgatttggggaattagttatataggaggtcgggagatagggattggtgagaatg

SEQ ID NO: 1080 - DNA, 498 bp, Artificial Sequence
  chemically treated genomic DNA (Homo sapiens)
tatttttattagtttttgtttttcggttttttgtgtggttagttttttaggttaataatttagtcggtttattgttcgttttcgggtaatttttagggtttggttttttgatcgtttgcggttgcgtttgagtttgtataagtttttgtcgaagatttttttagagcgtagggtcgatattaggttatcgaattttttttttttttttagcgagttgtttgtagttaggatttttcgttgtcgttgttatcgtttacgttttttttgtttttttagttgcgggcggggggttaaagataggaatttttttagggagaggcgttgaggttagggtagttttttaattttgggttaatttttaggttatggttatgttgtttgtttgtatttgttggttttattttttttttgtttaggatatataggtttttagttttatattattttttttttttaggttgggaagaagttttttttttttggggttgatatttaatt

SEQ ID NO: 1081 - DNA, 351 bp, Artificial Sequence
  chemically treated genomic DNA (Homo sapiens)
tagaggaggtttttggtattgttagttttgtttgtgatttttttattatttttggggagttagcggtttttttttttttttttatttttgtgtgtataaaggttatttttattgttttttgtggaaatatttttagaggatcgagggtattttttgagaataaagtttttttttggggagtgttggttagggtttttgttattgcggtttgttgtttgtttagagttttgtgttttgataagaataaagtgatttcgattggaattttgtagtttgttgttggttttgtttgtttttttgtagatgtgtagttttattttggttttttttttttttaaggaaaggggagtt

SEQ ID NO: 1082 - DNA, 351 bp, Artificial Sequence
  chemically treated genomic DNA (Homo sapiens)
aatttttttttttttgagaggagaggaggttagaatggggttatatatttgtaggaaaataggtagagttagtaataagttatagggttttaatcggaattattttgtttttgttaaaatataaggttttgagtagatagtaagtcgtaatgataagagttttggttaatattttttaggaagaggttttgtttttagagaatgttttcggttttttaaagatatttttatagagaataataaaaatggtttttatgtatataggagtgagaggagggagaaaggtcgttgattttttaggggtggtggaagggttataggtaagattaatagtgttaaagattttttttg

SEQ ID NO: 1083 - DNA, 487 bp, Artificial Sequence
  chemically treated genomic DNA (Homo sapiens)
atggagatgattttgtttttgttttattttttttcggagttgcggttcgagttggcgtattcgatttttattgcgcggttttaagaggagatagtcgttattgtatcgggttttatagttattttttagaggtaaagttcgtggtttttgagtcgttagttttttttttggggtcgttcggggtatatcgtttgggtcggtttagttttttagtgtagtcgtttaggaagattttaagtagcgttgaggggcgtagggtttttttttcgcgattttggagttttttagtagttttggaattaattaagattttgaagaggttttggggagaaataaaatttacgcgtagggtagggtttgtatcgggttatgttaagtaaatttttattttttttagagaattgatttgggatcgaagtaaagtttttgaatattttggaaaacgttgatttttataggtttatattaattgtttttttttttttga

SEQ ID NO: 1084 - DNA, 487 bp, Artificial Sequence
  chemically treated genomic DNA (Homo sapiens)
ttagaaggaagaaggtagttggtgtgaatttatgaaaattagcgttttttaaagtgtttaagaattttatttcgattttaaattagttttttggaggaggtaagagtttatttggtatggttcgatgtaaattttattttacgcgtggattttgtttttttttagagtttttttagaattttggttaattttagagttgttaagggattttagggtcgcggagggagggttttgcgttttttagcgttgtttagggtttttttgggcgattgtattgggaaattaagtcggtttaggcgatgtgtttcgggcggttttaagaaaaagattagcggtttagaagttacgggttttatttttaggaagtggttatgaggttcggtatagtggcggttgtttttttttggaatcgcgtagtgaaaatcgagtgcgttaattcgggtcgtagtttcggagaggggtggggtagggatagggttatttttat

SEQ ID NO: 1085 - DNA, 392 bp, Artificial Sequence
  chemically treated genomic DNA (Homo sapiens)
tgtttttattaggtattgtttaggggttgtttatttttttttagtttttacgggggatgttgtgatttgataggtgaggagagtaagttttttagataggtcgtttttttaaggtcgtgtagtttttataagtttaaatgtgatttgcgtcgggtaattttaaaatattgtcgtcgttagttttaggtggttttgtagggaggggttttcggtgttttttgtgaattggaatcggaggttgattttttagagtgtgagaagttggcgggtttggcggttggggacgtgttgcggtgtgcgtgtatcgggttgaagatttgttaggttggacgtttttgtcgtgagtggtgtttttagaggtcgcggttttttgtagtagttttgggtagttt

SEQ ID NO: 1086 - DNA, 392 bp, Artificial Sequence
  chemically treated genomic DNA (Homo sapiens)
agattgtttagggttgttgtagagaatcgcggtttttgaggatattatttacggtagggacgtttaatttggtaggtttttagttcgatatacgtatatcgtagtacgtttttagtcgttaggttcgttagttttttatattttgaggagttagttttcgattttaatttatagaggatatcggggatttttttttgtagggttatttggagttgacggcggtagtgttttggagttgttcgacgtaggttatatttgaatttgtgggaattgtacggttttgggaaaacgatttgtttaggagatttgttttttttatttgttaaattataatatttttcgtggggattgaaggaaaatgggtagtttttgggtagtgtttggtgggaata

SEQ ID NO: 1087 - DNA, 475 bp, Artificial Sequence
  chemically treated genomic DNA (Homo sapiens)
tttttgaatattttttttaagatttaaaatagtaaaatgaaatttaatattattataaagttattttttggtaaataatttaaggaagataattttcgtatgtattttttttttaatagtttaggttaggtttttatatatagttttttttaaaatatttgagtgtaattatttagtaggttatcggttgtaattttgagaaataaagtagtataatgtgatttgtatagagaatgattttatttattacgtttttaattatttatatttgttttaaattaaaatgttttggttgaacgtaggtattcgaaggaaggtttattttagtttagttttgtttttaatgtttgtgatatatagagtatgtgtgtttagggagaggttgcgtttagtgaagtagttgggtttttatttttatagggcgatattttaataggattttagttttttggggagttattttattgtgttattg

SEQ ID NO: 1088 - DNA, 475 bp, Artificial Sequence
  chemically treated genomic DNA (Homo sapiens)
tagtggtatagtgggatggttttttagggggttaaggttttattgagatatcgttttatgagaatgagaatttagttattttattgaacgtagtttttttttgggtatatatattttatgtgttataagtattgagagtagaattagattgggatgagttttttttcggatgtttgcgtttagttaaagtattttgatttgaggtagatataaatagttggagacgtagtgggtaaaattattttttgtataaattatattgtgttgttttgttttttagggttataatcgatgatttgttaaataattatatttaagtattttggggagaattgtatataggaatttagtttgaattattaagaaaaaaatgtatacgggagttgttttttttaaattatttgttagagaataattttataatgatattgggttttattttattgttttgaattttagaagaggtgtttagaaa

SEQ ID NO: 1089 - DNA, 373 bp, Artificial Sequence
  chemically treated genomic DNA (Homo sapiens)
tttggtattagttgtttttttggaatatggaatttcgggcgagggaggtggagaatttttttttggggttcgtttttcgtttttttgttcgtttgtagtttgaaggaagggcggtgggggcgggggttcgagtatttcgcggtttgcggcgcgtaggagggtaggtttttggtttgcggtcgttttcgaatgatttcgttttttttcgttttggacgatagtattagggtgtagtcgtaggagaggggtcgatattttttaggagttttatcggcgaagttttagtaagtggtatttttcggggtttagagagtcggcgtgttgtttggtttgggtttagatattagtttatttaagtttattttgggttttt

SEQ ID NO: 1090 - DNA, 373 bp, Artificial Sequence
  chemically treated genomic DNA (Homo sapiens)
aaaagtttaagataagtttgggtgagttgatgtttggatttaaattagatagtacgtcgattttttggatttcgggagatgttatttgttgaggtttcgtcgatggggtttttgaggggtatcggttttttttttgcgattgtattttagtgttgtcgtttagggcggggagggacggggttattcggaggcggtcgtaggttagggatttatttttttacgcgtcgtagatcgcggggtattcggattttcgtttttatcgttttttttttaaattgtaagcgagtaggagaacgagggacgagttttagaagaaagttttttatttttttcgttcgaagttttatattttagggaggtaattgatgttagg

SEQ ID NO: 1091 - DNA, 308 bp, Artificial Sequence
  chemically treated genomic DNA (Homo sapiens)
gtatttgttgtttagttagaagttattttaagttattttaaaatgagttatgtcgtttagtattttatttttgaaaattaagagaatcgttttttagttaaattgaaaatagtaaatatttagtggtttaaatttatatatgggttttaaagtcggggagattattttaggatgaaataaaattttaagtaaaatgaattttaaaataattaatttaagataagttgtttataggagttttatttcggttagtttaaatgtaagtggttgtttgtatttgatttattttttatgagatgttataatta

SEQ ID NO: 1092 - DNA, 308 bp, Artificial Sequence
  chemically treated genomic DNA (Homo sapiens)
tgattgtggtattttatgaagaataaattaaatataaatagttatttgtatttagattaatcgaagtaaaatttttatggatagtttattttaaattaattattttgaagtttattttatttgagattttattttattttaagatagttttttcgattttaaaatttatgtatggatttaagttattaaatgtttattgtttttaatttgattgaaaaacgatttttttgatttttaaggatgaagtgttaaacggtatgatttattttagaatagtttaaaataatttttggttggatagtaggtgt

SEQ ID NO: 1093 - DNA, 324 bp, Artificial Sequence
  chemically treated genomic DNA (Homo sapiens)
tttgttttttaatattatttaagaagattacgttgtattattttattttttatatttttttgttgataaatgattttattttatttgatttaattttatttttttattgtgtaatattattgatagatagtggatttacgtaggtatataagagatttatgtattttttgaatttaaattttgagttgaggacgatgtttttatttttaggtttttattcggtttgggagtttgtttttagtattattgttgataagacgttagtagtatatttaaaatttgttatttgagattttgattttattatattggttttttattttt

SEQ ID NO: 1094 - DNA, 324 bp, Artificial Sequence
  chemically treated genomic DNA (Homo sapiens)
ggaaatggagaattagtgtgatgaagttaaagttttaaatggtaggttttagatgtgttattggcgttttgttaataatagtattgaagatagatttttaggtcgaatgggggtttgaggatggaagtatcgtttttaatttaaggtttggatttaaaggatgtataaattttttgtgtgtttgcgtaaatttattgtttgttagtaatgttatatagtaaggagataaaattaaattagatagggtgggattatttattaataaagagatataaagagtagaatgatatagcgtggtttttttgggtagtattgaaagataga

SEQ ID NO: 1095 - DNA, 389 bp, Artificial Sequence
  chemically treated genomic DNA (Homo sapiens)
ttattttgttattaaattttttttttgggttaaattttttttttagatttgtagttattgttttttttgatttttataaagtaggaaatgtttatgtattgttaagtttttagagttttcgttgtttatagtaattaaatgagatgattgttttagttttaagtattggttttagagaagggtagagtatattttgaatcggaaaattaaattaaataaaaataaatagttacgtgaggtatgtgagatgttagtttttttttggagaaatgtaagatagaaatttgattgtaaagttttatttttgaatgaaggtttttgcgatttgtttttagggttatattgttttttttttggattattgggaattatagttttagtaaatttag

SEQ ID NO: 1096 - DNA, 389 bp, Artificial Sequence
  chemically treated genomic DNA (Homo sapiens)
ttgagtttgttagggttatgatttttagtagtttaaggaagggatagtgtgattttaaaagtaagtcgtagaaatttttatttaaagatagagttttatagttagatttttattttatatttttttaaagagaaattgatattttatatattttacgtggttgtttgtttttgtttggtttggtttttcggtttaaagtatgttttatttttttttgagattaatgtttaggattgaggtaattattttatttgattgttatgggtagcgaggattttgaaaatttggtagtatatggatattttttgttttatggaggttaagagaagtagtggttgtaaatttgagagaaaaatttgatttaaaagagagatttaatgataaagtgg

SEQ ID NO: 1097 - DNA, 380 bp, Artificial Sequence
  chemically treated genomic DNA (Homo sapiens)
tatattttattttattatttgttttttatagttttgtaaattagtaaatttttataagatatataggttgagagcgtgaagttagttagaaaagttacgtggaaatgtatatttattttagagtagtcggatttatatttaatatggtaaattaaaacgatgtaggtatttattttttttttttggagtttttaggtttttaaaatttaatattttattgttgatttgtttaaaatttttttaggtgaggtgaatttcgagggtattttatttaattatatagttagaggagggtggggttttataagattagattttaaatgttggggtttttgcgggtttttaggttgtcgggagtagaggtgaattgttttttgttt

SEQ ID NO: 1098 - DNA, 380 bp, Artificial Sequence
  chemically treated genomic DNA (Homo sapiens)
gaatagaaggtagtttatttttgttttcgatagtttgggaattcgtaagagttttagtatttgaagtttggttttgtgaaattttatttttttttggttgtgtgattgaatgggatgttttcgaggtttattttatttgagagggttttgggtagattagtagtaaggtgttaaattttagaagtttgaaaattttagaagagaaaggtaggtatttgtatcgttttgatttgttatgttaaatgtgaattcggttgttttggaatagatgtgtatttttacgtggtttttttagttggttttacgtttttaatttgtgtgttttgtggagatttattgatttataagattgtgaggggtaaatagtgagatgggatatg

SEQ ID NO: 1099 - DNA, 378 bp, Artificial Sequence
  chemically treated genomic DNA (Homo sapiens)
attaaattattttgaaggttttgttagatatatgtattaattattggttattttagttgtatatttgtatggagaggagaatttggcgtttttaaattgattttggttggtaaagtgggaaagtagaaggatagggtggtaggttaaggggaatttaatttagaagtggttacgtggtatttacggttttgtattggttaggtggaagaaggaggaattacgtaagatttaggcgagggcgtataattatttttagttttttagttttgttttttgttttttggagtttatgtagttggataaatttgttgagttgtaacgtgaagtaatttttttcgggagggggaaggttttagggtgaatttaagttaattttag

SEQ ID NO: 1100 - DNA, 378 bp, Artificial Sequence
  chemically treated genomic DNA (Homo sapiens)
ttggagttggtttggatttattttgaagttttttttttttcggggaaagttgttttacgttgtagtttagtaggtttgtttagttatataggttttagaaaataagaagtaagattggaaagttggggatgattgtacgttttcgtttgaattttacgtggttttttttttttttatttggttagtgtagagtcgtgggtgttacgtggttatttttggattgggttttttttggtttgttattttgtttttttgtttttttattttgttagttagagttaatttgaggacgttaagtttttttttttatataggtgtgtagttgggataattaatgattaatgtatgtgtttggtagggtttttagggtaatttgat

SEQ ID NO: 1101 - DNA, 469 bp, Artificial Sequence
  chemically treated genomic DNA (Homo sapiens)
ttgtattttattattttttttttaattattttagtgtagtagatgtaagtagagttttatgtaattatttgagataaggatgaagaattgaaagataaataagtgatttattttaatggatttgttttagataggagaaatttgtaattttttttaggcgtgttttatggatttatagtggagtgaattatagatttgtataagttttgaaattgtgggtaattttatagtttttagatcggtttttcgtaataggtagttagtttttattgggttttttggatttttattttaaaaatggagaagatagattatagttattgattagggatcgtgggaggtgttacgtgatggtgaggtattatgttagggagttgagttttgatttttttgttgggtgattttttatttttgggttgttagatttattttttggatgtcgtgagtagatgttttatattagtattat

SEQ ID NO: 1102 - DNA, 469 bp, Artificial Sequence
  chemically treated genomic DNA (Homo sapiens)
atggtgttggtgtaggatatttatttacggtatttaggaagtagatttagtagtttagaggtggagaattatttagtaggaaggttagagtttagttttttagtatgatgttttattattacgtggtattttttacggtttttggttagtggttgtgatttgttttttttatttttgaaatgggagtttaaggggtttagtgagaattgattgtttgttgcgagaagtcgatttgagaattgtaaagttatttatagttttaaggtttgtgtaagtttgtgatttattttattatgggtttatgaagtacgtttaagagaaattataggttttttttgtttgaagtaaatttattaaagtgagttatttgtttgttttttagttttttatttttattttagatgattgtatgagattttgtttgtatttgttgtattgggataattggaaggagggtgataaaatgtaa

SEQ ID NO: 1103 - DNA, 231 bp, Artificial Sequence
  chemically treated genomic DNA (Homo sapiens)
ttattgttttgttatggaggaatttaaaggttattattggttatttatttaattttttgaatacgtttttttttgtttagataagtttggtttttttgtttttcggatatggtaatatttttattgatttttgttagtaaagttatatgttattagtttttttagggttatacgtgtagtacggtagtttttaggtattatattgattgtaaagaagggtaggaatttttg

SEQ ID NO: 1104 - DNA, 231 bp, Artificial Sequence
  chemically treated genomic DNA (Homo sapiens)
tagagatttttgtttttttttgtaattaatataatgtttaagaattatcgtgttgtacgtataattttgggaaggttgataatatgtagttttgttggtaagagttagtgaaaatattattatattcgagaagtagaaaagttaggtttgtttggataaggaagaacgtatttagaaggttggatagatggttagtagtagtttttgggtttttttatggtaagataatga

SEQ ID NO: 1105 - DNA, 334 bp, Artificial Sequence
  chemically treated genomic DNA (Homo sapiens)
aggtatggtttttttaggtgttagggttattttttttttttttagtggttgttttttttgttggtacgtagtatttgttttttagttttaagtttgtggggtagttaggagagttttgtttttggttttcgttggttttatattttttggcgagtggttttgtacggtagtttagttttggggaattttttaagggagagggtttttttttttttttaatttttttatttttatttaattttattttatattggttttttattatcgttagttgttgttttgttaggtattgtggaatatttatatttttttttattatagggtttggatatat

SEQ ID NO: 1106 - DNA, 334 bp, Artificial Sequence
  chemically treated genomic DNA (Homo sapiens)
gtgtgtttaagttttgtgatagggaaagatgtaggtgttttatagtatttggtaaggtaataattggcgatggtaaagggttagtatggagtggggttgggtgagggtaggggagttagggagggaaagaagtttttttttttgaaaagttttttagggttgggttgtcgtgtaaagttattcgttaggaagtatgggattaacggaggttagaggtaagatttttttggttgttttataggtttagagttgggaggtaggtgttgcgtgttagtaggaagagtagttattagaagagagagaagtagttttggtatttgggggagttatattt

SEQ ID NO: 1107 - DNA, 500 bp, Artificial Sequence
  chemically treated genomic DNA (Homo sapiens)
tatttttttttttgagatttggttaataaattaaatgttgtattttgtatatgaggaattaaagtttatttattggatttagtggttttagtgtaggatatttttgtgcgttgttatagaggtaggtatgtaatttagaaaaaattgaaataggtaatttgttatgttgatagttataagagaaagatttcgtgttaacggtacgtttttaattgtgtattttttttatttatagtttgtttattagagttttgagtaggttgtttattaggtcgggagtgttgatttagaagatagatgatttttagtatatgtaaatcgagtattgtaaaagttattttttattcgtgttagtagtttatagttagtttttagtagttttgcgttttagttgtaaatattttattagattaatgtatttagtataggtagaaaattcgatttattatagttatagtaatgaatttttattacgatgatagttttaattatattatgtt

SEQ ID NO: 1108 - DNA, 500 bp, Artificial Sequence
  chemically treated genomic DNA (Homo sapiens)
gatatgatgtggttgaagttgttatcgtaatggaaatttattgttgtagttatggtaaatcgagttttttgtttgtgttgaatgtattagtttaatgagatgtttgtagttggagcgtagggttgttggagattaattgtgagttattaatacgggtggaagatagtttttgtaatattcggtttgtatgtgttgaaagttatttgttttttgagttaatattttcgatttggtaaataatttgtttagggttttggtgaataagttgtaggtaagggagatgtataattggaggcgtgtcgttgatacgggattttttttttgtaattgttagtatgataggttatttgttttagttttttttgggttgtatgtttatttttatggtaacgtataagagtgttttgtattaaaattattgagtttagtaggtaaattttagttttttatatgtaaagtatagtatttaatttattaattagattttagaggggaaaatg

SEQ ID NO: 1109 - DNA, 442 bp, Artificial Sequence
  chemically treated genomic DNA (Homo sapiens)
agtaataaaattgaatttttagtttgttcggtattagttatgtgttttttagatgtcggaagaggagcgaaggaggattagaaatttttttattttaacgatggtttttttttttgtgttttattttattttttcgtttttagttatttttagtttttaattcgggttttatatttattttggttttagagtatagatttttttgtagttgggtcggcgcgttgcggcgttgaggagttgcggcgcgttttttttatcgcgattgtttatttgttaggcgttacgtgtgggcgacgttattgggttttatgtttttatcgtcgttatttgtttacgtgagttgttttttttttatcgttttcgttttttttattacggagaaaattttgtacgtttttttttgtgaaaagtagagtttttttttttttattattattagttg

SEQ ID NO: 1110 - DNA, 442 bp, Artificial Sequence
  chemically treated genomic DNA (Homo sapiens)
taattggtggtaatgagaaaaagagaattttgttttttataagggaaaacgtgtaagatttttttcgtagtaggggaggcgggggcgatgggaggagagtagtttacgtaggtagatagcggcgatgaaagtataaagtttagtgacgtcgtttatacgtggcgtttggtaagtgaataatcgcggtgagaggggcgcgtcgtagttttttaacgtcgtaacgcgtcggtttaattgtaggaaggtttgtgttttggagttagggtaaatgtaagattcggattggagattagaaatggttagggacggggaggtggggtgaagtataggggagagaattatcgttgaggtgagggggtttttgattttttttcgtttttttttcggtatttggagggtatatagttaatgtcgggtagattgagagtttaattttgttgtt

SEQ ID NO: 1111 - DNA, 386 bp, Artificial Sequence
  chemically treated genomic DNA (Homo sapiens)
tttagagaaagtgtgggaaaatttatatttttgtattgttattcgaatatagaaaatataggaggaaaatgagttgttattttaatttttatgatgttttgttgtttagtataattttatagtgcggttttgggtttattggtttatattttgatagataattaagaaagtagtagttttttttagacggtttttttttatgatttgtattttagttagaggcgattagttataaaaaaaatatgatggaaagatggtaagaagttaattagatggatggatggttgattgatagttttttggtattacgattttagattttagattatatagtttggtagttttttataagaattaatttttttgtaggttggtaaagttgttaa

SEQ ID NO: 1112 - DNA, 386 bp, Artificial Sequence
  chemically treated genomic DNA (Homo sapiens)
ttaatagttttattaatttgtaaaaaagttggtttttgtagaaaattgttaggttatgtagtttgaaatttggagtcgtaatattagagagttgttagttagttatttatttatttaattggttttttattatttttttattatgttttttttataattggtcgtttttggttaaaatgtaaattatgaggaagagtcgtttagaaaaagttgttgtttttttaattatttgttagaatatggattagtggatttagggtcgtattgtagagttatgttaagtagtaaggtattatgggaattggagtgatagtttattttttttttgtgttttttgtgttcgaatgataatgtagaaatatgggtttttttatattttttttgaa

SEQ ID NO: 1113 - DNA, 300 bp, Artificial Sequence
  chemically treated genomic DNA (Homo sapiens)
ttgagttgtgaagtgttgaaattgattaagaaatgaaggtagaatgttcgttttttgggagaataattagttagtttatgttgttgttatttttggttgtcgattggaatgtagttgttaaggtagttgtttaattgtttgtttaatttgaaaggatattgttaaatggtaaatattttttataataatattttatttttgttaagaataataatagtgtattttattgagttttaatggcgtgttaaatacgatagatttattattaggtaggtttataatttggattgaatatggatg

SEQ ID NO: 1114 - DNA, 300 bp, Artificial Sequence
  chemically treated genomic DNA (Homo sapiens)
tatttatgtttagtttaggttgtgaatttgtttagtaataaatttgtcgtgtttggtacgttattggagtttaataaaatgtattgttattgtttttagtaaaagtaaaatgttgttatagaaaatatttgttatttggtagtgtttttttaagttgggtaaatagttaaatagttgttttaatagttgtattttaatcggtagttaagagtggtagtaatatagattggttgattatttttttaaaggacggatattttgtttttattttttgattagttttaatattttatagtttag

SEQ ID NO: 1115 - DNA, 441 bp, Artificial Sequence
  chemically treated genomic DNA (Homo sapiens)
agtattttattatttttttattcgtgtttttgttttttaggagggttaattgttgagtttaggtttttagaagggtattgaattgttttagggtttgttttagttgagttatttggtttgagaatttttgtttcgaaagggttatttggttgattaggttttttaaatagttttgcgtttggaatatattgtttttttattgtttttagtcggtacgtagggtttgtattttcgtgtgtatgagtttatatttattggtagttgtgttttgttttatttcgggagttagcgattttattttgttgagacggtttgtattaatttttttggaatttattagtttttgtaatggaatattattatggtaattgaagagtttgtgagttatttggattgtaagtttttaattgtgtatatagggggattttgttttgttaggaa

SEQ ID NO: 1116 - DNA, 441 bp, Artificial Sequence
  chemically treated genomic DNA (Homo sapiens)
tttttggtaggatagggtttttttgtgtatatagttgaaaatttgtagtttaagtgatttataggttttttagttattatggtgatattttattataggagttgatagattttagagagattggtgtaagtcgttttagtagagtggagtcgttggttttcgaagtgaaatagaatataattgttagtgggtgtgagtttatgtatacggagatgtaggttttgcgtgtcgattggaagtagtgggaagatagtgtattttaaacgtagagttgtttggagaatttggttagttagatggttttttcggagtaggaatttttaggttaagtggtttaattggagtaggttttggaatagtttagtgtttttttgaaaatttgggtttagtagttaatttttttggaaggtaagaatacggatgaggagatagtggaatgtt

SEQ ID NO: 1117 - DNA, 311 bp, Artificial Sequence
  chemically treated genomic DNA (Homo sapiens)
aaaagtgttgtttatttttgttagtgggttagtagattttttagcgtcgtttgtttttttttcgttttttttaggatgttttcgtattgttgttgtagagtcgtagttttttgaatataggaatttttgtttataatttttttggtattggttgagaaggtagtgatcgcgttgtttagtgattttagggtttggtagagattttaagaagagtgcgagaagaatgtagtgaaagtataggagttaacgaggtttgtatttttttttgatatcgattatcgtaaaatatttttttttagttataataaata

SEQ ID NO: 1118 - DNA, 311 bp, Artificial Sequence
  chemically treated genomic DNA (Homo sapiens)
tgtttattatgattgagggaaaatattttgcgatgatcggtgttaaagaaaaatgtaggtttcgttggtttttgtgtttttattgtatttttttcgtattttttttaggatttttgttaggttttggagttattgagtagcgcgattattgtttttttagttagtgttaggaaggttgtgaatagagatttttgtgtttaggaggttgcggttttatagtagtaatacgaggatattttaaggagggcgaaggagagatagacggcgttggagaatttgttggtttattggtagaggtgagtagtattttt

SEQ ID NO: 1119 - DNA, 454 bp, Artificial Sequence
  chemically treated genomic DNA (Homo sapiens)
ggaaaagggttgtttttgatagaagggatattttaagagtagtttaggaatcggtgtatttgggcggtttcggaagaagtcggggtttttggaggcggaggcgaggtttgggatttaataagaagggcgcggttagagaggaggggttggttaaaagtttttgaaataaggtttaggtagaatcgcggttttagttttttagttttagttcggtttttgggtttgttgtggtgtttttgttttttgtaggatcggtcgtagtatggacgtttttaggcggttttcgacgttcgtgtaattgatgtagttaaaagtaatgttagtggaggtgttcggttatttttttaagcggtttttttggttttattttgagtttttgaagaattcgaaggtagttcgttttgaggtttggttggtggaaaagattttcggtgagtggattaagaaggggtag

SEQ ID NO: 1120 - DNA, 454 bp, Artificial Sequence
  chemically treated genomic DNA (Homo sapiens)
ttgtttttttttggtttatttatcgaagattttttttattagttaaattttaaggcgaattattttcggattttttaggaatttagagtggaattaggagaatcgtttagggaggtgatcgagtatttttattggtattgtttttggttgtattagttgtacgagcgtcggaaatcgtttgggagcgtttatgttgcggtcggttttgtaggagataaggatattatagtaaatttaaaggtcgagttggagttgggagattagaatcgcggttttgtttgggttttattttaagggtttttggttagttttttttttttagtcgcgttttttttattgggttttaggtttcgttttcgtttttaggagtttcggtttttttcgaggtcgtttaagtgtatcggtttttgggttgtttttagagtgttttttttgttaggagtagttttttttt

SEQ ID NO: 1121 - DNA, 498 bp, Artificial Sequence
  chemically treated genomic DNA (Homo sapiens)
gaggggtgtagtattgaggtttggggttcgggagggggttttatacgcgggaggaaacggagagagacggtgaggattgttttcggaggtgggtgaggtttagcgtgcgcgtttaggtaagtaggtaagaatgtagtagtcgttaggtttaggcgcgggcgcgtttcgttcgggtgatttagttcgtgttaggaagcgggagttggtttagttttttagagttttcggatagtagtcggatttcggtcggtttttggggtattaggatagattttcgcggttagtagttcggtttggggggcggaatattttttttttgtttcgttttattttttttcgggtcgtaattattttagtttatcgttgggacgtggtcgcgggtgtcgagagcgttgtcggcgtcgtgggggttatttcggttttggtttcgacggcgttttaggatttgcgatagtcgtaagtagcgattatgggggttaggagagtttaagaagtggg

SEQ ID NO: 1122 - DNA, 498 bp, Artificial Sequence
  chemically treated genomic DNA (Homo sapiens)
tttattttttggatttttttagtttttatagtcgttatttacggttatcgtaggttttggggcgtcgtcggggttaggatcgggatggtttttacggcgtcggtagcgttttcggtattcgcggttacgttttagcgatgggttggggtggttgcggttcggaggaaggtggggcgggataagaagagagtgtttcgttttttaggtcgggttgttagtcgcgggggtttgttttagtgttttaggagtcggtcgggattcggttgttgttcgggagttttggagagttgagttaattttcgttttttggtacgggttgagttattcggacgggacgcgttcgcgtttgggtttggcggttgttgtatttttatttgtttatttgggcgcgtacgttgggttttatttattttcgaaggtaatttttatcgttttttttcgttttttttcgcgtatagggttttttttcgaattttagattttagtgttgtatttttt

SEQ ID NO: 1123 - DNA, 417 bp, Artificial Sequence
  chemically treated genomic DNA (Homo sapiens)
tagttggagaggagatttgatgatttttttggtggagggtggttagggaaggagtggaagagagagttggggagaggaaattgtggttataaagaggaagagagaggtagagttggaggtgatattaggggagagagaggagtgggttcggcgatggttatgttgggcgaggtgtggagagtatagttgtgttatttattagttgtttttagtttagataatttttgtgtttattttatttttgtttgtttatcgtttttgtcgggttggatatttttattattacggttatcgttgttatattgtcggttgttattttttgttttatttttttttttgtttatgatatggtagaaggtggtaagggaagtagttgtttttcgttagtagtttttttgttattgaaggttgaagttg

SEQ ID NO: 1124 - DNA, 417 bp, Artificial Sequence
  chemically treated genomic DNA (Homo sapiens)
tagttttagtttttagtggtagggaggttgttggcggagggtagttgttttttttgttattttttgttatattatgagtaggaaggaagatgaggtaagaaatagtagtcgatagtgtggtaacggtgatcgtggtggtaagggtgtttaattcggtagaggcgatgggtagataaaaatgagatgggtataggaattgtttgagttggaggtagttgatagatagtatagttgtgttttttatatttcgtttagtatggttatcgtcgaatttattttttttttttttttgatgttatttttagttttgtttttttttttttttttatggttatagttttttttttttagtttttttttttattttttttttggttattttttattagggaggttattaggttttttttttagttg

SEQ ID NO: 1125 - DNA, 464 bp, Artificial Sequence
  chemically treated genomic DNA (Homo sapiens)
tttttgttttttatttaagtaggttttagggtttatggtaagatgatttttttggggagaaagagtttgagatttagaaatttaatttgtataatgaattttggtttttttttttttttagggatttgattttttttttttttttttttttttttttgttataggattttatgttttattttagcgtagtttggttgattgatgttttattttttatatgtattgatatgacgtgtgattgtttaggtatagttggagaagttggagaagatagtattttatttttttttttagaattaattattgattggagggttaatgttttaattttgatgtgatttagtaggttatgcgagggttgtttttaataggagtagtgtttttttttttttgcgtagtttttgatttagttcggtatgttttttggtgatattgttgttcgttatatggtttagtgttgtaaa

SEQ ID NO: 1126 - DNA, 464 bp, Artificial Sequence
  chemically treated genomic DNA (Homo sapiens)
tttgtagtattgggttatgtggcgagtagtagtgttattaggaaatatgtcgagttgggttaggaattgcgtaaggaggaggagatattgtttttgttgaaggtagttttcgtatgatttgttgaattatattaaggttgaagtattggttttttaattaatgattagttttgggagaggggatgaggtgttgttttttttaatttttttaattgtgtttgaatagttatacgttatgttagtgtatatagagaatgaagtattagttaattaaattacgttggagtggagtatagagttttgtgatagaagaggaggaggaagagaaagaagaattagatttttaaaggagggaaaaagttaggatttattatataaattaaatttttaagttttaggttttttttttttaaggaaattattttgttatgagttttagggtttgtttgaatggagagtaagaa

SEQ ID NO: 1127 - DNA, 443 bp, Artificial Sequence
  chemically treated genomic DNA (Homo sapiens)
gagtttattttggattttttattgagaataggatgttttgttaaggatgggtaaagaggggtatagtagaaagataaaaggatgtgttagttataaaaattacgtgggttaaggatagggggttgtaatgtaaagattggaatttgtagtacggtaaattagagcgtggtaagattagcgttttagattttagataaggttatttttttttttaggaaagacgatttttttattaatataagcgtttggcgtttttttttttcgtttaggcgttttggttggaacgaggaaatttaaaagtgttacgaaagaataaaagtggtttaaattttgaaaatttttaaaattaaaagattgtaatttaaaggaagataaagagtatgatttttaatttttttaagttattttatttatttttagtgttaaaaatttaatgttagttt

SEQ ID NO: 1128 - DNA, 443 bp, Artificial Sequence
  chemically treated genomic DNA (Homo sapiens)
agattggtattgggtttttggtattgaaaatgaatgaagtagtttggagaaattaaaagttatgttttttatttttttttgagttataattttttaattttaagaatttttagaatttgggttatttttgttttttcgtagtatttttgagttttttcgttttagttaggacgtttggacggaaaagggaagcgttaagcgtttgtgttggtgaggagatcgttttttttggagagggaagtggttttgtttggagtttgaaacgttaattttgttacgttttagtttgtcgtgttgtaagttttagtttttgtattgtagttttttgtttttggtttacgtggtttttgtagttggtatatttttttgtttttttgttgtgtttttttttgtttatttttgataaaatattttgtttttagtgaaagatttaggatgaattt

SEQ ID NO: 1129 - DNA, 189 bp, Artificial Sequence
  chemically treated genomic DNA (Homo sapiens)
ttagtttttaagatggtatttgttggaggcggtaggtagaggttttaagtgtggattttaattttcgtggggattgaatttttgcggttgttgtttgtttaggtacgtttgttttttatgaattttttttatttatagggttttaaattttatgtcggcgggaggaggaaggagattgggtataattta

SEQ ID NO: 1130 - DNA, 189 bp, Artificial Sequence
  chemically treated genomic DNA (Homo sapiens)
tgagttatgtttagtttttttttttttttcgtcggtatgaggtttggggttttgtggatgaaggaagtttatgggaggtaaacgtgtttgggtaagtaatagtcgtagagatttagtttttacgggggttagaatttatatttagggtttttgtttatcgtttttagtaaatgttattttgaggattag

SEQ ID NO: 1131 - DNA, 367 bp, Artificial Sequence
  chemically treated genomic DNA (Homo sapiens)
ggagaaagaggaatttgtaaggtttaagcggatggtatggatgtatgtaatgaagatcgggaagtagattttgggtgggagagttgttttaagtagaaaaatagttaatttaaatttatttttggttgagtttgagcgttagagtaaggtagggaagagtgttcggaatgttgagttagtttaggttgttgtaggttgtattgtatggattttagtattagtaatgtgtgtatagaaaagtcggtttttttcgttgttatcgattgtttattaaagtgaatttgggtagcgtcgattttgttgttgaaagtatttgattttttgttgtatggattttttttttagggttaattgtgattgtagattt

SEQ ID NO: 1132 - DNA, 367 bp, Artificial Sequence
  chemically treated genomic DNA (Homo sapiens)
aagtttgtaattatagttggttttagggaaggaatttatgtagtagaaaattagatatttttaatagtagagtcgacgttatttagatttattttggtaagtaatcggtgataacggaaaggatcggtttttttgtgtatatattgttggtgttaaggtttatgtagtgtagtttgtagtagtttgggttggtttagtatttcgggtatttttttttgttttgttttgacgtttaggtttagttagaggtagatttgagttggttgtttttttgtttagagtagtttttttatttaggatttgtttttcggtttttattatatgtatttatgttattcgtttaggttttatagattttttttttttt

SEQ ID NO: 1133 - DNA, 309 bp, Artificial Sequence
  chemically treated genomic DNA (Homo sapiens)
ttttattttttttttaggagtgtgtttttagtttcgtatttgttttttttatttttagtgtattttcgtcgtaggtattattttttgatttgttatgttattcgtttttttttttattgtatttacgttttattatttgttttggttcgtataatgttagttttgtaaggggtttttttaaggttttatttttaattgattaatgtcgaggatggggagtaatgcgtgtattagagggggttgggtatacgtaggtttgttgttggatggaggagaggtagtattttttgtatgtttgggtggttttta

SEQ ID NO: 1134 - DNA, 309 bp, Artificial Sequence
  chemically treated genomic DNA (Homo sapiens)
tggggattatttaggtatgtaggggatgttgttttttttttatttaataataagtttgcgtgtgtttagttttttttggtatacgtattgttttttattttcggtattgattaattgaaaataagattttggaagaattttttgtaaagttgatattgtacgagttaaggtaggtaataaagcgtagatatagtgagggagggggcggatggtatgataagttagagggtgatgtttgcggcggggatgtattgagaatagagagggtaggtgcggggttggagatatatttttgagagggagatggga

SEQ ID NO: 1135 - DNA, 379 bp, Artificial Sequence
  chemically treated genomic DNA (Homo sapiens)
ggtaaagttgagattttagatggttttgcgggtgagggcggaagaagggaagagttaggggtcgtttttatttatggtttttagttattggtttggaattttgcgtttatttcgtgttagggtcgaattcggggattcgagggttttaggttgtcgcggtgattaatgtgtgaaggtcgttgttaaaatcgggtatggtttggttgtaaaggtgcggacggggtttgttttgtttttttttggatttttattttgattgtttttatagaggaaaggaagtatttttaagggaagaaaggtaaaaagagtttattttggttttttttgggggggggttttagtattttaacgagggtgtggtttttattattagggtaga

SEQ ID NO: 1136 - DNA, 379 bp, Artificial Sequence
  chemically treated genomic DNA (Homo sapiens)
tttgttttggtgatgagggttatattttcgttaaaatgttaaggtttttttttaagaaaagttagaatgagttttttttgtttttttttttttagaaatatttttttttttttgtgaggatagttaggatggaaatttaggaaggagtagaataaatttcgttcgtatttttgtagttaggttatgttcgattttggtagcggtttttatatattagttatcgcgatagtttgggattttcggattttcggattcggttttggtacggagtgggcgtagggttttagattagtagttagaggttatggatgggggcggtttttaattttttttttttttcgtttttattcgtagggttatttggggttttagttttgtt

SEQ ID NO: 1137 - DNA, 405 bp, Artificial Sequence
  chemically treated genomic DNA (Homo sapiens)
ggagtaattttgatttggagagttatgtatatattttacgttaaggaggtgatgaaagttttattttttatagcgatgatatttggaagaagatataattgttatcgtgagttttttaattatttttggagattaagtgtgagacgtagtagtgtaggatgattggattacgtaaaacgagatagatgttatttgtgagttacgcgtaagttgttaagtgttaaaatgaatatttttattaaacgatggagtttttatattatttgtagtttggttagatttgaaagatgagttgattgtttttagatagtgcggtaaataggtagggatttggaattttttttggttgtatgagtaattattgttttatatttaaattagaaatatgggtttttagttaggttt

SEQ ID NO: 1138 - DNA, 405 bp, Artificial Sequence
  chemically treated genomic DNA (Homo sapiens)
agatttaattgaaaatttatgtttttaatttaagtatgagatagtaattatttatatagttagagaggattttaagtttttgtttatttgtcgtattatttaaaaataattaatttattttttaaatttgattaaattataaatggtatgagaattttatcgtttaataaggatgtttattttggtatttagtagtttacgcgtggtttatagatggtatttgtttcgttttgcgtaatttaattattttgtattattgcgttttatatttagtttttaggagtaattgaaaagtttacggtgataattgtgtttttttttagatgttatcgttataaggagtggggtttttattatttttttgacgtaggatgtgtatatggttttttaggttagagttgtttt

SEQ ID NO: 1139 - DNA, 393 bp, Artificial Sequence
  chemically treated genomic DNA (Homo sapiens)
ttattatgtagtatttaggtttggattttagttagtagtattagtttttttttattttcgggtagcgatatcgttggtgtagatcgttttaggtgcgttttcgtttagttttattgtttttagttttagtttgggttcgtttttagtttgttggagttgttggatgtgtttaggtttttaggtattttggtttttttttattcgtttcgcgaagatcgagggaaagtagacgcgttttcgcggtaattcggagtttgtagttcgtagggattttatcgttttaggtgtaggcgtgtatatgttagttgtagaaaatattatattaaattagtttgagggagttaaagtaaattataatattttaggcgttagagatttttttattatagaatt

SEQ ID NO: 1140 - DNA, 393 bp, Artificial Sequence
  chemically treated genomic DNA (Homo sapiens)
aattttgtaataggagagtttttgacgtttgaaatattatagtttgttttgatttttttagattggtttggtgtgatattttttgtaattggtatgtatacgtttgtatttggggcggtggggtttttgcgggttgtaggtttcgggttgtcgcggagacgcgtttgttttttttcggttttcgcggggcgggtggggggaggttagggtgtttggaggtttgaatatatttaatagttttagtaggttgagggcgagtttaagttggggttgaggatagtagagttgaacgaagacgtatttgagacggtttatattagcggtgtcgttgttcgaaagtgagagaaggttgatattgttagttggaatttaggtttgggtgttgtatggtgg

SEQ ID NO: 1141 - DNA, 378 bp, Artificial Sequence
  chemically treated genomic DNA (Homo sapiens)
tgtaaggtattattatagattttttattttttttttttgtttattagaacgttaataagagatataatatttagaaaatagagagtagagatttttttggattaaatagtattttttttttttgtttttgtttttttgtgatttaagggagaaatgattttttttttttaagtgattttatttttttttgttaagaattcgtggatatgttatttggttagagtttagtttgtagttattacgtaggtaatttatttacgttagattataatttatttaattcgtttgtgttttagttaaatgtgtattagagtaaaagtttagatttgattatgggtaagtttaatgattaatataagttatttaggtttttttttt

SEQ ID NO: 1142 - DNA, 378 bp, Artificial Sequence
  chemically treated genomic DNA (Homo sapiens)
gaggaaaaagtttgagtggtttatgttaattattaaatttatttatggttaggtttgaatttttattttggtatatatttggttgggatataaacgagttaggtgagttatagtttaacgtgagtgagttatttgcgtggtggttgtaggttgagttttaattagataatatgtttacggatttttgatagagagaaataagattatttagaaagaaaggattattttttttttgagttataaggagatagaaatagaaaaaaaaggtattgtttgatttagaaaagtttttgttttttgttttttaggtgttgtattttttgttaacgttttggtgaataaaaggaagaaatgggagatttatagtagtgttttgta

SEQ ID NO: 1143 - DNA, 351 bp, Artificial Sequence
  chemically treated genomic DNA (Homo sapiens)
ttttgttttttatagtttttagttttaaatttttaaaatgttattaagtattatatttaattttataataaatttatattttaggtaggatgttgtttataggatttatgttgggtgatgtttgggtgatttaaatagggaaataatatttttttaagttatattagtttttaacggtgttattggttacgcgtagagaggtaaatttatgagtagtattggggagttaatgaacggttggttagatggtgtttgttagaaggtgttgattttttagataattgggattgttttttgggagtaaatgagaggtgtagtagggacggattgtattttaattatatagaaata

SEQ ID NO: 1144 - DNA, 351 bp, Artificial Sequence
  chemically treated genomic DNA (Homo sapiens)
tgtttttgtgtgattgagatgtaattcgtttttgttgtattttttatttatttttaggaaatagttttagttgtttaaaaagttaatattttttgataggtattatttggttagtcgtttattaattttttaatgttgtttatgaatttgtttttttacgcgtgattagtgatatcgttgagagttaatgtggtttaaaggaatattgtttttttgtttggattatttaggtattatttagtatgagttttatgggtaatattttatttgggatgtaagtttgttataagattaaatgtaatatttgataatattttggaaatttgaagttgagggttgtaaagagtaaaa

SEQ ID NO: 1145 - DNA, 435 bp, Artificial Sequence
  chemically treated genomic DNA (Homo sapiens)
ttggtattttgatttttagttagagttgatgaggattgtatggtaggtaggttaatttagataattgtatatttagcgagtacgattatttaggaaaataaggaaaagtcgttggatgatcgaaattagattgttattttttcgggttttatttgtatatagattgtagtcgtaacgattttttatttgatggttggttgtgttattgttagtcgatagttgtttcgtatttagagaggattgggagtgatttaggttagggagtttggttttttttttaaatcgtgcgttaattgaggagtggggatttgcgttagtttcgtgattagttttaaatgtgagttggggagttatatagtattagtgcggtgagtcgttcgtataggttttagttagataaattatagtaagtatttttttttttgttttagtttt

SEQ ID NO: 1146 - DNA, 435 bp, Artificial Sequence
  chemically treated genomic DNA (Homo sapiens)
aaggttaggataaaggagaggatgtttgttatggtttgtttggttggggtttgtgcgagcgatttatcgtattgatgttgtgtgattttttagtttatatttaaggttggttacggggttggcgtagatttttattttttagttagcgtacggtttaaaggagaaattagattttttgatttaaattatttttagttttttttggatgcgggatagttgtcgattagtagtgatataattagttattaagtggagaatcgttgcgattgtagtttgtgtgtaggtggagttcgggagaatgatagtttaatttcggttatttaacggtttttttttatttttttaaataatcgtgttcgttaagtatatagttgtttggattagtttgtttgttatgtagtttttattaattttggttggaaattagggtgttag

SEQ ID NO: 1147 - DNA, 423 bp, Artificial Sequence
  chemically treated genomic DNA (Homo sapiens)
tttagattaatttttttgtagtgattttattgggaggttgtattagtatttagatatttttatatattgaggaaaaatagatagtcgtgtttaaggattttagagggtttgttattatttatttataatttttttagaatttatgagttttaggtttttattgtagtggtaagcgttgagtgtttacgggggtgtgtgtgggataggatgtggtttgagttttgtgatttttatttcgattttatgcgtcgggaatttttgtagttttgtgattggtttgtgggggtttgggttaagtttttgttaagatattaaaagattgtagaggtgggtaaagattttaggtttttagattagtaatttataaatattagttatgattatatagttaagggtcgtttatttgttttttttttttttagt

SEQ ID NO: 1148 - DNA, 423 bp, Artificial Sequence
  chemically treated genomic DNA (Homo sapiens)
gttaggagaaggggaagtagatggacgatttttaattgtgtagttatgattagtgtttgtagattgttagtttgggggtttgaggtttttgtttatttttgtagttttttggtattttggtagggatttagtttaagtttttataggttagttatagggttgtaaggattttcgacgtatgaggtcggggtgaggattatagaatttaaattatattttgttttatatatattttcgtgagtatttagcgtttattattgtaatgaggatttgggatttataagttttgggaaaattataaatgggtgatagtaagttttttgaggtttttaaatacggttgtttgtttttttttaatgtatggaagtgtttagatgttgatgtaattttttagtaaagttattgtaaaagggttggtttaga

SEQ ID NO: 1149 - DNA, 464 bp, Artificial Sequence
  chemically treated genomic DNA (Homo sapiens)
tagtttgttaatagttgtttaggttttttatgggattgcgttttattgagtatttgaagaaagtatttattggaaatgggtttttttgggagattgtttggatttcgagtgtttggcgtttatgtttttatatttggttgttgttttttgtttttttttggttgtaggtgtgagtgtttgtttgtttaaatttcgtttagtattgtttggaaaaataaaataatatggttatttgtttgggtattgaatgttttttttgaattttggttttgtttattggtttagaggcggaatgggtggggtaagtttcggtgtgagtttgggaagtttcgagaagacgttatgggttgggtttgttaggttggggttgtttttggttttaatttttttggaatgttttgagggttaggagcgttgttattgatggttatgggagttgttaggttgtggtttttttttttata

SEQ ID NO: 1150 - DNA, 464 bp, Artificial Sequence
  chemically treated genomic DNA (Homo sapiens)
tgtgagaaagagagttatagtttgataatttttatagttattaatggtaacgtttttgatttttaagatattttaaaaggattaaaattaagagtaattttaatttaatagatttagtttatagcgttttttcgaaattttttaaatttatatcgaaatttgttttatttatttcgtttttgggttaatgggtaggattaaaatttaggaagaatatttaatgtttagataagtaattatgttgttttgtttttttaagtagtgttgagcgaggtttaaataaataagtatttatatttgtagttaaggaagggtaagaagtagtagttaggtgtgggaatatgaacgttagatattcgggatttagatagttttttaggagagtttatttttagtgaatattttttttaggtgtttagtgaagcgtagttttatggggagtttgggtaattgttggtaagtta

SEQ ID NO: 1151 - DNA, 499 bp, Artificial Sequence
  chemically treated genomic DNA (Homo sapiens)
ttttttttttttttatgattatgtcgtgatcgtgtttgcggttattattcgacgtatttttatttttattcgaatttaggagtcgaacgttagatcggggaagtgggtgtcgtgcgtgtgggtatagaaatattatgaagattattttttcgattttaagtaatttagtttttaggcgtatcgttaaatttttgttttgtttattgtggattggatatttttaaggaattatatatgtattaagatttggtaagattttttattttttttggttgtttggtattcgtttttaggtagtcggatgtaaataggcggttcgttttgtttggcggtgggtttcgtggattttgatttgtttattgttttgtcgttttttggggtttttaaagaattttttgtgtttttatttttttttttttttatttttatttttagtcgcgggagggtgaagggagggttaatgtgtggtagtggtttttgtattatttttttatagtag

SEQ ID NO: 1152 - DNA, 499 bp, Artificial Sequence
  chemically treated genomic DNA (Homo sapiens)
ttattgtggggaggtaatgtagagattattattatatattggttttttttttattttttcgcggttaaaaataaaaataaagaagagaagaaatgaaagtataaggagttttttaaaagttttaggagacgatagagtagtgagtagattagaatttacggagtttatcgttaggtagagcgaatcgtttgtttatattcggttgtttgggagcggatattaggtaattaagagagatggggaattttattaaattttaatatatgtgtggttttttgagaatatttaatttatagtaaatagagtaggagtttaacggtgcgtttgaagattggattatttagaatcgggaaaataatttttatggtgtttttgtgtttatacgtacggtatttattttttcgatttagcgttcggtttttgggttcgggtagaaatgaggatgcgtcgagtggtgatcgtagatacgattacggtatggttatagagagaggaagga

SEQ ID NO: 1153 - DNA, 422 bp, Artificial Sequence
  chemically treated genomic DNA (Homo sapiens)
ttattatttaaggttagttgtttgatttttttttagtgttttgtttatagggtttgaatatttataaatggaaatattagttaattagaaattatcgttagggttttttgatagtgttttaggtttttataatttggaatgttttgtaatatttaatatgtaagtacgtcgaattattttttagatagaatttgaatttttgtgttttttagttttttttttttttttatttttttttaatatggaatttgaaaagcgtgaaaaaagaagtttattaaataagaatttagaggagaaattgacggtaagatatgagatttagtatatatagatttataatgaaattgatagggtagtagagtaattgttatagattggaaaagttgtgttagtcggtttttgtttttatgttttgttggtta

SEQ ID NO: 1154 - DNA, 422 bp, Artificial Sequence
  chemically treated genomic DNA (Homo sapiens)
tgattagtaaaatatggaaatagaggtcggttagtataatttttttagtttatgatagttgttttattattttgttaattttattataaatttgtgtgtgttaaattttatgttttatcgttagttttttttttaaatttttgtttaataagtttttttttttacgttttttaagttttatattgaaagagaatgagaaagagagaaagattgagagatatagaggtttagattttgtttagaaaatgattcgacgtgtttatatgttagatattgtaggatattttaagttgtgagagtttaggatattattagagagttttagcgataatttttggttagttagtgtttttatttatagatgtttaaattttataaatagagtattgaagagaagttaggtagttggttttagataatga

SEQ ID NO: 1155 - DNA, 368 bp, Artificial Sequence
  chemically treated genomic DNA (Homo sapiens)
agtttttgagttttattgtaggttttagtgttagtttcggaggaaattagaaaagggttgaaattattgatatagttatttttttagttttttttaacgtaggtgtatagttttttgtagtgagtagatcggggtttatagggatattgtatgtttgtattgggttgttattagttttatggaaatatgtattaattgtgttattgtgtttttttgttatattgttttttttttaggtcgttttggtatcgtttatttaaattgtgtaattatttggtttaggtgtcgtagagattgattagtagtataaggttattataagtataatcgttattcggttattttagttattttttttagtattttag

SEQ ID NO: 1156 - DNA, 368 bp, Artificial Sequence
  chemically treated genomic DNA (Homo sapiens)
ttagaatgttggaggaaatagttgggatggtcgggtggcggttgtgtttgtggtggttttgtgttattgattaatttttacggtatttgggttagatggttgtatagtttaaataaacggtgttagagcggtttagaaagggggtagtgtgataagaaaatatagtgatataattagtatatatttttatgaaattagtaatagtttagtgtaagtatgtagtgtttttgtaggtttcgatttgtttattataggaaattgtatatttgcgttaggaggagttaaagagatggttgtgttagtggttttaatttttttttgatttttttcgggattagtattggagtttgtagtgaggtttaagaatt

SEQ ID NO: 1157 - DNA, 500 bp, Artificial Sequence
  chemically treated genomic DNA (Homo sapiens)
tttgtttagtgtttttggtaattagtaagtgttgagttttttgttggtgtttttttaatttattagtgatttggttcgtaaattatttggaaaaggagtttttagagatttcggcgtatagtaggttaggaggtagttgtttcgggatttagagtaatttcggggtaatttttttttttttaaaggttaattttagaagaggtaggttttttttttttcgatgttaatgtttattatgaaatagtaatttttaaatatttaggtgatacggagatgcgtttgttatacgttagcgttttttatatgtaatagtcgaagttgtaatttgaatttttttgttaacgtgaggaagtcgggattcgaatcggggagataaaaggggtttcgaatatgtttttggatttaatagatggtcggaaattaggggtagcggagttgttaaatgcgttacgtacgttttttcgtagttttttgagttcgttattttttttagtttttag

SEQ ID NO: 1158 - DNA, 500 bp, Artificial Sequence
  chemically treated genomic DNA (Homo sapiens)
ttagaagttgggggaagtggcgagtttaggagattgcgaagaagcgtgcgtgacgtatttaatagtttcgttgtttttgattttcgattatttattaaatttaaggatatgttcgggattttttttgttttttcggttcgaatttcggtttttttacgttggtaggaaaatttaaattgtagtttcggttgttatatgtgaaggacgttgacgtgtagtaggcgtattttcgtgttatttgaatatttaaaaattattgttttataatggatattgatatcgaaggaaagaggatttgttttttttagaattagtttttggaggagggagggttgtttcgaggttgttttgaatttcggggtagttgttttttggtttgttgtgcgtcggggtttttggagattttttttttaggtggtttgcgggttaagttattggtgggttggagaagtattaataggaggtttagtatttgttggttgttaaggatattagatagg

SEQ ID NO: 1159 - DNA, 428 bp, Artificial Sequence
  chemically treated genomic DNA (Homo sapiens)
aagtgtttttgtagtattgagaatatgatttatgggttggtttttttttttgtttttgtttgggtgttattgattttgggattttttttgaataataggtcgtggagattttttataggttgttgtgtgaattttaggaaaattttttttagaggttatagttgtcgttttttttacgttttcggttagattattttgagtttattggtggttttagtgatgtggttttttgtggttttgtttaatggaattttttatgaatgtgttatgagcgggacgagaagtttaggatttttggaattgatttgtaagggtaagtttaaagagtgttgggaagaattttataaagtattttgtggtaaaattagtatgttatttatcgttaatgaagaattgaaattttttttttaggtttagttttaggtaag

SEQ ID NO: 1160 - DNA, 428 bp, Artificial Sequence
  chemically treated genomic DNA (Homo sapiens)
tttatttgagattgggtttgaagggagagttttagttttttattgacggtaggtagtatgttagttttgttataagatattttgtgaagttttttttagtattttttgggtttatttttgtaaattagttttaggagttttgaatttttcgtttcgtttatggtatatttatagaaagttttattgagtagagttatagaaagttatattattggagttattaatgagtttagagtgatttggtcgaggacgtagaagaaacggtagttgtggtttttgggaaagatttttttgggatttatatagtagtttgtgaagagtttttacgatttattgtttagaaagaattttaggattagtaatatttaggtaggagtaaagaggaaaattagtttataggttatatttttagtgttgtaggggtattt

SEQ ID NO: 1161 - DNA, 443 bp, Artificial Sequence
  chemically treated genomic DNA (Homo sapiens)
gggtggttttgttgattttagagatttagggcgggggtagggagcggggagcgttaggttaggatttttttgttcgggaaggttggagaaagtgcgagaagatgttagaaggtgcgaatttgagcggtttaggtagagtcggcggtcgtttagatatttagggggattataggacggaaggattcgtgaggggtttttagaattgttgatagaatatttcgataggttgaggagaattagattcgttttttttgttttgttagcgttttggaagttttttttttatagatttataattttcgtcgtgttatttaggatgtcggttatgttcggggttttgaggtcggagggaattaattttgatttagaatgtcgaggtttaagggaattgggaggaagtttagagaggagagtttaggcgttatatttgttagtttttatag

SEQ ID NO: 1162 - DNA, 443 bp, Artificial Sequence
  chemically treated genomic DNA (Homo sapiens)
ttgtagaaattgataggtgtggcgtttgagtttttttttttgggtttttttttagtttttttgggtttcggtattttgggttaaggttggtttttttcggttttagggtttcgggtatggtcggtattttggatggtacggcgaaggttgtggatttgtagaaagagggtttttaagacgttaataagataggagagacgagtttgattttttttagtttgtcgaggtgttttgttaatagttttggggattttttacgagttttttcgttttgtaatttttttaggtgtttgagcgatcgtcggttttgtttgaatcgtttaggttcgtattttttggtattttttcgtattttttttagttttttcgggtagggggattttggtttgacgtttttcgttttttgttttcgttttgggtttttggggttagtagagttattt

SEQ ID NO: 1163 - DNA, 489 bp, Artificial Sequence
  chemically treated genomic DNA (Homo sapiens)
gagtttggttggttttagaagtaagttttttttattttatgtttgttgtcggttgtttttgcgtttatttgtgtgggtatcgtttttttgggttttatatttgattattattgttagagttttggggtggttgagttgagttagcgttgtggttggagttttgcggaggagttgaattatatagtgttaggtttggggttcgcgggcgaggttttttttggttagtgtaggcgttatgaagtggattggaattagagcgtttttagttgtgtagattttttggttagtttggttattaataggagttatttgtcgttgggtttttgttaggatggttgggtgtatgatacgttcggtttttttatcgttattgaggtaaaaaagtttttgtaatatgggagtttttgggatagggagaaatataaagtaaattttatgaagtttagttttatattaggaaagaggtagggggttatgtttattgtgtag

SEQ ID NO: 1164 - DNA, 489 bp, Artificial Sequence
  chemically treated genomic DNA (Homo sapiens)
ttgtataataaatatagttttttattttttttttgatatggaattgaattttataggatttgttttatatttttttttgttttaggaatttttatgttatagaggtttttttattttagtgacgatggaagagtcgggcgtgttatatatttagttattttggtagggatttagcggtaggtggtttttgttggtggttaggttagttagggggtttatatagttgagggcgttttggttttagtttattttatagcgtttgtattggttaaggaaggtttcgttcgcgggttttaggtttggtattgtatagtttagttttttcgtagggttttagttatagcgttggtttagtttagttattttaggattttggtagtggtggttaggtgtgaaatttaggaagacgatgtttatatagatgggcgtaaaggtagtcgatagtaggtataagatgaggaaggtttgtttttggaattagttagattt

SEQ ID NO: 1165 - DNA, 388 bp, Artificial Sequence
  chemically treated genomic DNA (Homo sapiens)
tttttataggatatgagggttgataattattttattgtatggttttggggattgatgaataaaggttaatatgtggaaaagggtaattaaagaaagaagagttatttttaggttaattagtataagttttttcgttggtatgttttaatatattaaaatagtagtaaaaataatttgtatattggtatcgaaggtatagataaatttgtcgaggatttttattacggtagagggatgttttatatgagtttttagtagattaattaagtttttgttagttttatttggaaatgatgttgtttttttggggttatgtagagaagtttatgttgatgaaatgagttgttttagaatggtagttttcgggtagtagagtttgggtttaagg

SEQ ID NO: 1166 - DNA, 388 bp, Artificial Sequence
  chemically treated genomic DNA (Homo sapiens)
ttttgagtttaggttttgttgttcgggaattgttattttaggatagtttattttattaatatgaatttttttgtatagttttaagaggatagtattatttttaaatggaattagtaagaatttaattaatttattaaggatttatataaagtatttttttgtcgtggtaagggttttcggtaagtttatttgtgttttcgatgttaatgtgtagattgtttttattgttgttttagtgtattagggtatattagcgaggagatttgtattaattaatttggaggtggtttttttttttttagttgtttttttttatatgttagtttttgtttattagtttttaggattatgtaatgaggtgattattagtttttatgttttgtaaaga

SEQ ID NO: 1167 - DNA, 433 bp, Artificial Sequence
  chemically treated genomic DNA (Homo sapiens)
gggaggaggtgttttgtattttataaaatgaaggttttgcgatcggtttagagttgtgtggtttttagtgggtttttaagtttcggggtattttaggtcggtattatattattaaaaagaagcgtaaattttatttttgaagtttagtcgaaggtaggcgtcggtagggagagttaagaggtcgtttagagagtttgggtcgggagtgggagtgggataaggcgggagttaatttagttggagtagacgttagaagaagtttcgtttagttgaggtgtttcgttttaattttaggttttcggggattttaagaagggagttattcggtgttttttcgagcggtttttatagttttggagattttgttgttgtttaggggtgtagtcgtcggagttttcgggtttgttggggtttagtaggggtagtgggagtt

SEQ ID NO: 1168 - DNA, 433 bp, Artificial Sequence
  chemically treated genomic DNA (Homo sapiens)
ggtttttattatttttgttgagttttagtaggttcgagggtttcgacgattatatttttgggtagtagtagagtttttaaagttgtaaggatcgttcggagaagtatcgggtagttttttttttggggttttcgagagtttgggattggggcggggtattttagttgaacggaattttttttggcgtttattttagttaagttagttttcgttttgttttatttttattttcggtttaaattttttaggcggttttttagttttttttgtcggcgtttgttttcggttaagttttagaaatgggatttgcgtttttttttaatgatgtaatatcggtttagggtatttcggagtttggagatttattagggattatatagttttaaatcggtcgtaaagtttttattttgtaaaatgtaaaatattttttttt

SEQ ID NO: 1169 - DNA, 281 bp, Artificial Sequence
  chemically treated genomic DNA (Homo sapiens)
taggtaatttttgtttatggtgttaagttgtaaattatttgtttttagtttttagcgaatgttattgggaagtattaggataaaagtcgttatttaaaaattttaattttagtttttttttggtttgggtttaaagttagaggcgattttttataggtggtatgttagtgttatttgattgttgatatattttgtgtggtggttgagaaaattggagaagaaagagttagggtagttaaaggattgttcgttaattttaagatgtgtaggatgaagaggag

SEQ ID NO: 1170 - DNA, 281 bp, Artificial Sequence
  chemically treated genomic DNA (Homo sapiens)
tttttttttattttgtatattttaaaattaacgagtagttttttgattattttggtttttttttttttagtttttttaattattatatagaatatgttagtagttagatggtattggtatgttatttatggagaatcgtttttggttttaagtttagattaagagaaaattagaattggaatttttggatgacgatttttgttttgatgttttttaatagtattcgttaaagattagagatagatagtttgtaatttagtattatgagtaaaagttgtttg

SEQ ID NO: 1171 - DNA, 313 bp, Artificial Sequence
  chemically treated genomic DNA (Homo sapiens)
tagaattttttttaatattgtatgtttgttataatgtgggtagggagaggttgttggttttgtagtagttatttgatggttgtttaaaggatcgtgaatttagttattattagtattttttttatttttttagatttgggtgtagttggtttagttttttatttttagtttcgggaaagttttttttttagattttcgtttttttttaataagtttgtatgttgtgttaaggagtaatcgtttttgttgttacgaatttatttgtttttgtgaatttacgtgttttttatttttgttttatttagaatagaga

SEQ ID NO: 1172 - DNA, 313 bp, Artificial Sequence
  chemically treated genomic DNA (Homo sapiens)
tttttgttttggatgaggtaaggatgaagggtacgtgaatttataagggtaagtgaattcgtagtagtagaagcgattgttttttggtataatatgtaagtttgttgaggaggagcggaaatttgggagagagattttttcgaggttggggatggaggattgagttaattgtatttagatttgaaagagtagggaaaatgttggtgataattgagtttacggttttttaagtagttattaggtggttattgtagagttaatagtttttttttatttatattatggtaggtatgtagtgttgagaaggattttg

SEQ ID NO: 1173 - DNA, 339 bp, Artificial Sequence
  chemically treated genomic DNA (Homo sapiens)
tttttatagtgtttttaaagtttgttggtatataaatatgaatgaatgaataatgtagaatttatttaagaaattttaaggagagagaggaggagatttatattatatagtaaataatttaataaatttgttaaacgttatgtatgtgaataggcgtttttttttttttgattttttttttttatatagaatttagtgtttttttttcgtttttcgttatagtatttatcgtttttttttttttacgtcggggagtagtcgaggtttgtgttttttagcggatttgttaaattattttttttagtatgttgtttttttttttttatagattatttgtta

SEQ ID NO: 1174 - DNA, 339 bp, Artificial Sequence
  chemically treated genomic DNA (Homo sapiens)
taatagatgatttgtggaagggagagagtagtatgttggaggggatgatttggtaagttcgttgaagaatataagtttcgattgtttttcggcgtggaagaaggaaggcgataaatattgtaacggaggacgaggaaggagtattgagttttatgtggaaagaaagggttaaaaagaggaaaacgtttatttatatgtatggcgtttaatagatttattaggttgtttgttgtgtgatgtaaatttttttttttttttttttgaaattttttgagtgaattttatattgtttatttatttatgtttatgtgttagtaagttttgggagtattgtaaaaa

SEQ ID NO: 1175 - DNA, 463 bp, Artificial Sequence
  chemically treated genomic DNA (Homo sapiens)
ttttttttttgggagtggggttagttaattggtaggcggtaggcggtagggttgagtgggtagggttgacggggagcggaatggaggtacgtttcgtggagatggcgttgggtacggttattgttgtttttgtttatttttttattttttttcgtttttaaggtttatattttcgtcggaatttagggtattgtttttttttatttggaaggttttagggtttttttattcgcgtcgcgtttcgttttcgttttcgtgattcgaggcgtagcgtgcgtggtgatttcggtttatggggattttttcgtttgtttttcgttaagatggcggttttattagggaggttttaggggttacggttgggtagagttagtttgagttgttggggagaagggtattttatagggtttttagggtaggggagttttagatagatgtaaggttttggtgttatattttttta

SEQ ID NO: 1176 - DNA, 463 bp, Artificial Sequence
  chemically treated genomic DNA (Homo sapiens)
tgagaaggtgtggtattaggattttgtatttatttgaggtttttttgttttagggattttatggggtatttttttttttagtagtttaagttggttttgtttagtcgtggtttttggggtttttttgatgaggtcgttattttggcgaggagtaagcggggaagtttttatgggtcgggattattacgtacgttgcgtttcgagttacgggggcgggagcgaggcgcggcgcggatgaaagggttttggggttttttaaataggagggaatagtgttttggatttcggcgggggtatggattttaggaacggggaaggatggaagaatgggtagaagtagtagtaatcgtgtttaacgttatttttacggggcgtgtttttatttcgtttttcgttagttttatttatttagttttgtcgtttgtcgtttgttagttggttgattttatttttaagggaagag

SEQ ID NO: 1177 - DNA, 456 bp, Artificial Sequence
  chemically treated genomic DNA (Homo sapiens)
tttaatttttaagtgtattttttttggttttttttagacggtggaaatagggcggtgattaattttttagagtggaagatacgtacgaagggcgtatttgtagtttttcgggatttaggcgggggtcgttgtgtttttttaaaagtgagcggcggttttagtttgttatcgtttcgtttcgttagttcggaggaaattttggttggaggcgatttcgggtttagtcggacgggtcgggtcgagtttaggaggggttggtagacgtgttttagggttagggtggggcgtagggagcgtcgtttttatttttagtatttttggggtgggggatttgagcgtgcggagagcgggaggtagagttgagagcggggttaagcgcgaagttaaggcgtcgtatagggttgggtgggaatggatagggtgagttggaagcgaagtattttagttaggttttag

SEQ ID NO: 1178 - DNA, 456 bp, Artificial Sequence
  chemically treated genomic DNA (Homo sapiens)
ttaaggtttggttggggtgtttcgtttttagtttattttgtttatttttatttaattttatgcggcgttttagtttcgcgtttaatttcgtttttagttttgtttttcgtttttcgtacgtttaggttttttattttaaaagtattgagggtggagacggcgttttttacgttttattttggttttgggatacgtttgttagttttttttaggttcggttcggttcgttcggttgggttcgaggtcgtttttagttagagtttttttcgagttggcgaggcgaagcggtggtaggttgaaatcgtcgtttatttttaagagagtatagcgattttcgtttgaatttcggagagttgtaggtgcgtttttcgtgcgtgttttttattttgaaaagttagttatcgttttatttttatcgtttggaaaaagttagggaagatgtatttaggagttaaa

SEQ ID NO: 1179 - DNA, 394 bp, Artificial Sequence
  chemically treated genomic DNA (Homo sapiens)
gggggtagtagattgtttagttttacgttcgttggggttaagcgcggtcgcgcggttttagtttcgcgtttggggttttgcgtgttacgttttaggcgatttgagttttagggcgttttcgttatagtcgcgttttttaggtttttttagaaattaagggcgagcgattcgcggagtttttacgcgcgttttttcggttatttagttggatggtagcgcgagggtagttttcgcggatttatagtttttagttattcggttgttagttttgagagtttgagagtttttatttttcggggtttatgtttagattaattaggttattaggtaggtaaaatttttttttggtaatgagcgaggcgagtgtattgtaaagagattttggtatttaggt

SEQ ID NO: 1180 - DNA, 394 bp, Artificial Sequence
  chemically treated genomic DNA (Homo sapiens)
gtttgaatattagaatttttttgtaatgtattcgtttcgtttattattagaaggaggttttatttgtttagtgatttggttggtttgggtatgaatttcgagaggtggaaatttttagatttttaggattgatagtcgagtggttggggattataaattcgcgagaattgttttcgcgttgttatttagttgggtagtcgggggagcgcgcgtgggggtttcgcgagtcgttcgtttttggtttttggggaagtttgggggacgcggttgtggcggaggcgttttgggatttaggtcgtttggagcgtggtacgtagagttttaggcgcggagttgaggtcgcgcggtcgcgtttggttttagcgggcgtgggattgagtagtttgttgttttt

SEQ ID NO: 1181 - DNA, 242 bp, Artificial Sequence
  chemically treated genomic DNA (Homo sapiens)
ggtggtatagtggtgaattttgcggcggttgcgcgtcgtttacgttgtttttttagttgttgttatttttgcgggttttttttatttaaggggaacggagttgttatttttcgttgtttttatagtaatcgtagtttcgcgcggggagcgagttagtgaattaggtttggtttgcgtttggttttttgggatatgttggttgcgtggggtagaggcggaagaataggggtttggaggaagag

SEQ ID NO: 1182 - DNA, 242 bp, Artificial Sequence
  chemically treated genomic DNA (Homo sapiens)
ttttttttttaaatttttgttttttcgtttttgttttacgtagttagtatattttaaggagttaggcgtaagttaggtttggtttattgattcgtttttcgcgcgaggttgcggttgttatggaaatagcgggaaataataatttcgttttttttgggtgagagaggttcgtagaggtaatagtagttggaggaatagcgtgagcggcgcgtagtcgtcgtagagtttattattgtgttatt

SEQ ID NO: 1183 - DNA, 371 bp, Artificial Sequence
  chemically treated genomic DNA (Homo sapiens)
ttttaaattttataatttaggaaatagtttattattttataaaattataaaagcgaattatttgagtttttttattatttgtttttttttttttaagttggttttgtataaatatgatgtacgtttattgggtgataagtttgtcgtaagtgaaacgtttataggtattataggaatgatttggtgtttcgtttattttattagaattttaattggggtgtgtaggagaggattttataaatggtaaggtaatttttggtagtttgtttgttagtattgttcgtgttatttttagaggagtttgagaagaggtagaggaaggcgaaatatggttggtgagtgtatggtattttttttattaggtttttgtt

SEQ ID NO: 1184 - DNA, 371 bp, Artificial Sequence
  chemically treated genomic DNA (Homo sapiens)
ggtaaggatttgatggagaagatgttatgtatttattagttatgtttcgtttttttttgtttttttttaggtttttttgggaatggtacggatagtgttgatagataggttgttaaggattgttttattatttatagaatttttttttatatattttaattagaattttaatgaagtgggcgaggtattaggttatttttgtagtgtttgtaaacgttttatttacgatagatttgttatttaatggacgtgtattatgtttgtataagattagtttggggagaagggggtagataataaagaaatttaaatagttcgtttttataattttataaaatgatggattattttttggattgtagggtttagga

SEQ ID NO: 1185 - DNA, 419 bp, Artificial Sequence
  chemically treated genomic DNA (Homo sapiens)
agggatggagatttggtttaagtttttcggtttattcggagttgtgatagttatttttagggaatagttacgttgttttattaagtttatttttagcggtttggattttttaggtagaggttgtgggattttgttttttttaatattttagtttatttttaaaagggtttgagtcggataggggttaaataggttttttcgatttggcgggtcggttagacgtgatagtaatgttaaggaggttaagtttttttgtttattttttattttttttttttttatttttggattttttggcgtttttagtatatagaggtttttgagtagttcggttgtaggttttttatttatttagagtttttttttttacgtgtttatttttaattttgtagtgtttgcggattaaaggggaagggagt

SEQ ID NO: 1186 - DNA, 419 bp, Artificial Sequence
  chemically treated genomic DNA (Homo sapiens)
gttttttttttttttggttcgtagatattgtagggttggggataggtacgtgagggggagaattttgagtagatagggaatttgtagtcgggttgtttaagggtttttgtgtattgggggcgttaggaggtttagggatggaaaagggggaggtgagaaatggataaagaaatttggtttttttggtattgttgttacgtttggtcggttcgttaagtcgaaggggtttgtttagtttttgttcggtttaaatttttttgggaataagttgggatgttagaaaaaataaaattttataatttttgtttggggaatttaggtcgttggaggtgggtttggtagggtagcgtgattgttttttgggagtggttgttatagtttcgggtgaatcgaggagtttgggttaagtttttattttt

SEQ ID NO: 1187 - DNA, 480 bp, Artificial Sequence
  chemically treated genomic DNA (Homo sapiens)
aaagtttagatatttgtgggttgtattgtaaatttttgtatagatgtgtgtgaggttgagttttagttatacgtttgtaatagtattaggaaatattttgttatgttatttttttgggtgattttttatgattaaaagaaaaaaaaagttatatttttgttttgtgaaattgagttcgaattttgggtagtttagtagtaattagtatatgtttgaattatagttgcgcgggatggtttgtattatatattaatggtaattattgttttaaatatggaaattaaatattttaggtttaggttgattttaatttgcgggtaggaaacgtttgatttattttaagataagtttaaaagtgtgtggagttttttttggggttataaattttgtttatatttatatgtattttttttgagatagttttttgaggttttttggtagttatttttttgaacgtgggaagagattgggatttttagg

SEQ ID NO: 1188 - DNA, 480 bp, Artificial Sequence
  chemically treated genomic DNA (Homo sapiens)
tttagggattttaatttttttttacgtttaagaaggtggttgttaagagattttaagggattgttttaaaagaaatatatatgaatgtgaataggatttgtagttttagagaaaattttatatatttttaaatttattttgggatagattagacgttttttattcgtagattggaattagtttgaatttaaagtatttaatttttatatttaaagtagtagttgttattggtatataatataaattatttcgcgtagttgtgatttaggtatatattgattattattaaattatttagaattcgagtttaattttataagatagaaatatgatttttttttttttttggttatagaagattatttaaggaagtagtatgataaaatgttttttgatgttgttataggcgtatggttgaaatttaattttatatatatttgtatagaaatttatagtgtaatttataaatatttgagtttt

SEQ ID NO: 1189 - DNA, 464 bp, Artificial Sequence
  chemically treated genomic DNA (Homo sapiens)
attagttttttttttgtatagttttagttatcgtttttattgttttattttttgttttttttttttaggatgtttgtgggtattgaagttttttttttagattggatatgagttagtattttagtattttgtgagttgagtgttaggataaggtgcgatttgatttttttagaaattttttttgttttagagatagttttttgggttagggatttttaaggattaaagtttaatttttattattttttattatattgggaattttagaatgtgtgagttttacgtttttcggtgttgatagattagaggaggattagacgcgataatatggttgttgttggaggggttgagaggtgattgattagtttaagtttgtatagttcgtggaggaagtatttcgtttttgtttttttaagtgataaagtttatgttggaatatagagttttttgttttgagtatttaa

SEQ ID NO: 1190 - DNA, 464 bp, Artificial Sequence
  chemically treated genomic DNA (Homo sapiens)
ttaggtgtttagagtagggagttttgtattttagtatagattttattatttgagaaggtaggaacgaggtgttttttttacgggttgtgtaggtttaagttaattagttattttttagtttttttagtagtagttatgttgtcgcgtttggtttttttttgatttgttagtatcgggaaacgtggaatttatatattttgaagtttttagtgtaatggggagtggtgggaattgaattttggtttttaagagtttttggtttaggaggttatttttaaaataagaaagatttttgggagaattaagtcgtattttgttttgatatttaatttataaagtgttgggatgttggtttatatttagtttgaagagaaaattttagtgtttatagatattttaaagggaggaggtaagagatgggatagtgagggcgatgattgaaattgtataagagaaagattggt

SEQ ID NO: 1191 - DNA, 482 bp, Artificial Sequence
  chemically treated genomic DNA (Homo sapiens)
tttttgtttaaattttttgggtttaggattgtaggtaggtaaggtagagtattttgaatgtttttttgaggattaggaatttatttttttgattatatagtgatgtgttttatagattttttttattgtgaggtaattattttatttatttaagttttataaagtttttattatttcggttagtttatatttttgaagttaagttattagtttgatgcgtttgttgtaaaatgtggtttaatagtttgttagtatatttattttttttttaatggaatttaaaggtattttatgtttgagtagtagtggatttaagagtcgatgaaaagtttcgcgagttgggcgtagttagtataaaataatgcggggaatattgtggagttttacgtagagttatttttagtagtggcgtgcgggttttttgaattttaagttacgttttttgtttttttttttttttgatagtgttttataaataattt

SEQ ID NO: 1192 - DNA, 482 bp, Artificial Sequence
  chemically treated genomic DNA (Homo sapiens)
gggttatttatgagatattgttagggaaaaagaaaagtaaaaaacgtaatttaaagtttaagaaattcgtacgttattgttgggggtagttttgcgtaggattttataatgtttttcgtattgttttgtgttgattgcgtttagttcgcggggttttttatcggtttttaaatttattgttgtttaagtatgaaatatttttggattttattaaaaaaaaaataaatgtgttaataagttgttaaattatattttataataaacgtattaaattgatgatttagttttaaaaatatgaattaatcgaaataataaaggttttgtagaatttggataaatgaagtgattgttttatagtgagggagatttgtggggtatattattgtgtaattaaaaaaataagtttttggtttttagagaaatatttaaaatgttttgttttgtttatttatagttttgagtttaaagggtttgaatagggg

SEQ ID NO: 1193 - DNA, 345 bp, Artificial Sequence
  chemically treated genomic DNA (Homo sapiens)
tagttaagtaggttatgattaagggagataatgaagtatggaattgttttttttagagaaattataggtatggaataagaattttttgaggaggttttttttgttttttttttattaagttgcgatattatttttatatttagagaattttagagtaatatcgagtttcgttgagtgggtttagagttttatatggtagttgttttagtttttggtacgaggttaaaggatgatagtttttatttttttttatgtttttttgtttaattttagggaatatttttttattttgtgattgtttatatttgaaaattttatttatattttataattttttattagttt

SEQ ID NO: 1194 - DNA, 345 bp, Artificial Sequence
  chemically treated genomic DNA (Homo sapiens)
gggttgatggaagattgtagagtgtgagtaagatttttagatatgagtaattatagggtaaagaaatattttttaaggttgggtaaaagaatatgaaagaagataagaattgttattttttggtttcgtgttaggaattgagatagttgttatatggaattttgaatttatttagcgaaattcggtgttgttttgaagttttttgaatatgaaaataatgtcgtagtttgatgaagaaaggatagaaaaggtttttttagggaatttttattttatgtttgtggtttttttggaaaagataattttatgttttattattttttttagttatggtttatttgattg

SEQ ID NO: 1195 - DNA, 435 bp, Artificial Sequence
  chemically treated genomic DNA (Homo sapiens)
gaaggggtaaaataagttagggagtttagttaatatgtgagatggaaatttaaggatagggatagagtacgtataaagtttagggatatagttttttgttggatattttgtttgtattaattggtaaattagattgtataataggaaagaagtttgtgatagtaaaaggggtcgaaaacgggaaggatatttagagggtaggaattatgacggggttttgcggttttgtgggtagtagggagagtgtatttttggtttgcgggtttcgtgagttggaagaaattaggaaagggaagttgagtatttaattttatatagattataggttaatcgtgtttatttagtgtttgaaagtgagaagttgttaaggttttgtgatagttttgaaatcgtaggtattagaggatagaaattttgagtttagagggaggtagg

SEQ ID NO: 1196 - DNA, 435 bp, Artificial Sequence
  chemically treated genomic DNA (Homo sapiens)
tttgtttttttttgggtttaggatttttattttttaatgtttgcggttttaaggttgttataaagttttgataattttttatttttaaatattaaatgggtacgattagtttgtgatttatgtaggattaaatgtttagttttttttttttgattttttttagtttacgagattcgtaggttaaaaatatattttttttgttgtttataaggtcgtagagtttcgttatagtttttgttttttgagtgtttttttcgttttcgattttttttgttattataagttttttttttgttgtgtagtttaatttattagttagtataggtaaaatgtttagtaaaaagttgtgtttttgggttttgtgcgtgttttgtttttatttttaagtttttattttatatgttaattggattttttgatttattttgttttttt

SEQ ID NO: 1197 - DNA, 450 bp, Artificial Sequence
  chemically treated genomic DNA (Homo sapiens)
ttatttgtattgttggtagatgatttataaatgtcgtatagatacgggttgattattggtttatagaagaagtattaaatgaacgacgagatatttgttggtaaatatatagtaaataaaaaatgtaatttagagttaaatatgtgtatagtgtgggttttatttttgtttataaattaagtaatgtgttttgttaattattagtagagttattgattttagatgtgtattatatagttataattttgttagagagtagattatataagttgttttttttttggttgttttattttgttttattttaagagttcgtaaattgacgatcgggataaaaattataattgatattatttgtgggaaatattttataaaataataggtttagatgtaggattaaagttatgtggtagtaaaatattttattgaaaaggggttaggttttatgat

SEQ ID NO: 1198 - DNA, 450 bp, Artificial Sequence
  chemically treated genomic DNA (Homo sapiens)
attatggaatttggtttttttttagtggggtattttattattatatggttttaattttatatttgggtttgttgttttatgaaatattttttatagatgatgttaattataatttttgtttcggtcgttaatttacggatttttggaataagataaaatgaaataattagaaaaagaataatttatgtggtttattttttgataaaattatagttgtgtgatatatatttaaaattaataattttgttaatgattagtagaatatattgtttggtttatgagtagagatggggtttatattgtgtatatgtttggttttgagttgtattttttgtttgttgtgtatttattagtagatgtttcgtcgtttatttaatgttttttttatgagttagtagttagttcgtgtttgtgcgatatttataagttatttgttaataatataggtgg

SEQ ID NO: 1199 - DNA, 493 bp, Artificial Sequence
  chemically treated genomic DNA (Homo sapiens)
ttttagttaattttttttttgttttttagtttttgtttatatagaaaatttggttttagagaatagtatttaaatagtttttaattaaaatgtattacgtgtggtaatgtaaaaaattattagaatagtttttttttatttaaaatatgatttttgtttattgttttggtttttttgtttttgtgttttaggttaaatattatttagatttttgcgaggttaggtgtttttttattaattatttgaaaggtttagagaatggtatttatattaaagttagttttaatgataaaggatatttggttacggtaaatataagtattttttagtttttcgttttatttggtaaaaagttatttttattttagttataatataataaaggattaattgatgggagtattttttttattttttaaaaaataaattgagttaattttacgagtttatttagaggaattaattagggaataggaaatttttaaagttattt

SEQ ID NO: 1200 - DNA, 493 bp, Artificial Sequence
  chemically treated genomic DNA (Homo sapiens)
ggatggttttggagattttttattttttaattaatttttttagatgagttcgtggggttggtttaatttattttttgaaagatggaaaaaatgtttttattaattagttttttgttatgttgtgattgagatggaaatagttttttgttaaatggagcgaggagttgagagatgtttgtgtttgtcgtggttaggtgttttttgttattaggattggttttgatgtaagtattattttttgggttttttagataattggtgagaaagtatttggtttcgtagaaatttgagtaatatttagtttgaagtataaagatagggaaattaaagtagtgaataggagttatattttaaatagaaaaaaattgttttaataattttttgtattattatacgtaatgtattttagttggaggttgtttgagtattgttttttagaattagattttttgtgtggataaggattagggggtagggaaagggttaattgagg

SEQ ID NO: 1201 - DNA, 438 bp, Artificial Sequence
  chemically treated genomic DNA (Homo sapiens)
ggaaataaaaatgtgagtatgaagtttcggtaaaataaatttttttgaaaaatattaatattttataattatttttttattaaaataaaatagtgttaagtatatagttttttttaagtaataaatttttaaaattaaagtgaaattttgaaattatttttttaaatagtattcgttcggtagatagatggtatgttttattttatttttcgtttttatttggtggagtttatggggtattttgagaattaatgggtaattaagaattgggtgttaatttaggtatttgatttggaaattgagtttttgaaaattattaattttaaatatagcgtaagttttttttattatgttattttagaaattggtaataagaatattttaaaaatatttagaaatgtaggagttagattttttgggttgtaggtggaggatata

SEQ ID NO: 1202 - DNA, 438 bp, Artificial Sequence
  chemically treated genomic DNA (Homo sapiens)
tgtgttttttatttgtagtttagaaaatttggtttttgtatttttaaatatttttagagtgtttttattattagtttttgggatagtataataaggagggtttgcgttatatttggaattgatggtttttaaagatttaatttttaaattaaatatttaaattggtatttaatttttaattatttattgatttttaaaatattttatgaattttattaagtagaaacgggaaatgaaataaaatatgttatttgtttatcggacggatgttatttgaaggagtggttttaaaattttattttggttttaaagatttgttatttggaagaagttatgtatttggtattattttattttgatggaaaaataattgtagagtattagtgttttttaagagagtttattttatcgaagttttatgtttatatttttgttttt

SEQ ID NO: 1203 - DNA, 449 bp, Artificial Sequence
  chemically treated genomic DNA (Homo sapiens)
ttttttttagttttgttttgtgtggcgtttgttttgtaatttttttatgtttgttttaataggaaaaaaagtaaagagattgatatatagttatttcgaggttagattgttatcgaaatagatttttttaaataaaaataagggtcgtttttgtttgtaaggttttgtaatgaaatagagttaataaaaattgtatgggaaatttatattgtagttataaaaatattaaaaaatagaatttttagttaaagttagtagtgattgttggttcgaggtagaaattagggagtaaaatattttgaaatatttattgaaagtgaagagagggaagaattattattttttatttatttggttaattttttagaagtaaagttagagttatatttgtttagtaagtgattaagtattgggtttttaagcgtaggatagattatttttttttgtgg

SEQ ID NO: 1204 - DNA, 449 bp, Artificial Sequence
  chemically treated genomic DNA (Homo sapiens)
ttataggagaaaatggtttgttttacgtttaaaaatttagtatttaattatttgttaagtaagtgtgattttagttttatttttgaagggttaattaaatggataaagggtaataatttttttttttttttatttttaatgagtgttttagaatgttttattttttaatttttatttcgagttaataattattgttgattttagttaagaattttattttttaatatttttatagttgtaatgtgagttttttatgtagtttttattaattttgttttattgtaaggttttgtaagtaaaaacggtttttatttttatttggagaaatttatttcggtgataatttagtttcggggtagttatatgttaatttttttgtttttttttttgttgaaataagtatgggaaagttgtaagataaacgttatatagggtagggttgaaggaag

SEQ ID NO: 1205 - DNA, 482 bp, Artificial Sequence
  chemically treated genomic DNA (Homo sapiens)
gggtatgagtaagaatttggggaaagatttggagttaggaggaggtgggtgtttggtaggcggtgagattttaataggtagaggtagaagtgaagggtaaagggaaattttgggttatacggggaaattagatttgtttgtttgtttaatattgtggtttttagtgggatttaaagtcgatgttttaatgtaggacggttatgttagtgttgattagaataatgtattttttagggttatattaaaaaattatgtttagtgttttatttgtatttttaaaatatgtatatatatgtgtgggttagaaaaggttgcgtttaggatatgtatttttatgtgaatcgtaggtaattgtataagtaaataggaagttgcgtaggtatgtaggtagttgtttgttgagaggtgcgtgtgggtatgggtaggcgtgggttttgtttgtttgagtataattttaaaggttttttttgatggaagggagg

SEQ ID NO: 1206 - DNA, 482 bp, Artificial Sequence
  chemically treated genomic DNA (Homo sapiens)
ttttttttttattaggagaagtttttaaaattgtatttaaatagataaggtttacgtttgtttatgtttatacgtattttttaataggtagttgtttgtatatttacgtaattttttgtttgtttgtgtaattatttacggtttatataagaatgtatgttttgagcgtagttttttttggtttatatatgtatgtgtatattttgaaggtgtaaatgaggtattgagtatagttttttaatgtagttttaaggggtatattattttgattagtattaatatagtcgttttatattaaggtatcgattttaggttttattggaggttatagtgttaaataagtaaataaatttagttttttcgtgtggtttaaagtttttttttgttttttatttttatttttgtttattaaagttttatcgtttgttaagtatttatttttttttaattttaagtttttttttagatttttgtttatattt

SEQ ID NO: 1207 - DNA, 492 bp, Artificial Sequence
  chemically treated genomic DNA (Homo sapiens)
gttttttgaggttttagaatgataaaatggagaggtagggttaggggaagagggtttggtgagattcgttttggttttcgtcggttttttgttaatgttcgtagatggtgggggtttatggtcgggacgttcgtttaggttttggtagttttatgtgttttagtatttttttaaaagttgattattcggtttgttttttttgtgagtcggtttattattattttattgtgtggtggtaatttttattcgtattatgaatattgattttatgtttgtttttttatttgaattataggcgggtaggtcggcggttcgtattgtttgtttagttttagtttttttggtagttatttgaatagttttaaagaaaagttgtttgtttgagtatttagggataatagagagcggttataggtcgttatagtgatttattaaaagataggaaaatgagagaaaagatttttattttttgtattagttgtttgttttttt

SEQ ID NO: 1208 - DNA, 492 bp, Artificial Sequence
  chemically treated genomic DNA (Homo sapiens)
aagagagtaggtagttggtgtaagaagtaagggtttttttttttatttttttgttttttaataaattattgtagcggtttgtgatcgttttttgttatttttaaatgtttaagtaaatagtttttttttgagattatttaagtggttgttagggaggttggagttgagtaagtaatgcgagtcgtcggtttgttcgtttgtaatttaggtagaaaagtaagtataaagttaatatttatggtgcgggtaagaattgttattatataatgaaatggtaatgagtcggtttataaaggagataagtcggataattagtttttaaggaggtgttggggtatatgaggttgttagggtttgagcgggcgtttcggttatgggtttttattatttgcgggtattggtagaaggtcggcgggagttagggcgggttttattaggttttttttttttggttttgtttttttattttgttattttggggttttaaggagt

SEQ ID NO: 1209 - DNA, 491 bp, Artificial Sequence
  chemically treated genomic DNA (Homo sapiens)
agtgaatggaggggttgtttttagtttatttggcgttgtggtgaattgttttagggtttggtatattgttattattttaagatagatgggaaataaatattattagtatgtcgataagtgtttgtttttttttagtattagggttaagaaaaataaagtggggagggtattaagttttggagtaagtttttaaaaggtttttttttttgaattttttacggttgtttatttataatagttataattataatagagaggaaaagattttaattatttttgggatatattttgttaaaattatatttaagtattttttatttgtaagcgagaagtattattttttattatgtttttaaagtagcgtggggaagttgtgtgtataaattaaggtgttgttgtggtttgttgttttttgtgaatttttggaaaggattattaagaaggatgttttgataattgtttgttaggtaatttgtataagaggaaagagg

SEQ ID NO: 1210 - DNA, 491 bp, Artificial Sequence
  chemically treated genomic DNA (Homo sapiens)
tttttttttttttatgtaaattgtttggtagatagttattagagtattttttttggtgattttttttagaagtttataaaagataataggttatagtaatattttggtttatgtatataatttttttacgttgttttaaaggtataataaaagataatgtttttcgtttataaataaaaagtgtttaaatgtaattttgataaaatgtgttttaggggtgattgaagtttttttttttttgttgtgattgtaattgttataaatagataatcgtaagagatttaaaaggggaaattttttaaaggtttattttagggtttgatattttttttattttattttttttagttttaatgttgaaggaaaataaatatttatcgatatattaatggtgtttattttttatttgttttggaatggtggtaatgtgttaagttttgagatagtttattatagcgttaagtgagttgaaggtagtttttttatttatt

SEQ ID NO: 1211 - DNA, 463 bp, Artificial Sequence
  chemically treated genomic DNA (Homo sapiens)
tgtaggtaagaagttgtttattattgatagagataaaatattttaatgagtgatggaatttttattttttatttaaatattacgttaatatttaatataaaatattattgttttgttttatatagaaattgtaagtttattttgtttgaaatatggggaaataaattttcgttttgattttttttttgttgttttagttgtgtgttattgatattggcgtgatttgttatgggaaggtgtaatgaggtaagattgggattgtaataattattaatttataaatacgttatggtaaagttaaggtaagttagagtgatatttttaaatattttaggaaatagtatttatgtttgaattatttattttattagttcgttttgatgaatatgggagaaattaataattttttaatataaagagtaatttaatgttattaattgggtattttatatgggttgataga

SEQ ID NO: 1212 - DNA, 463 bp, Artificial Sequence
  chemically treated genomic DNA (Homo sapiens)
tttattagtttatgtgaaatgtttaattaatgatattaggttattttttatattaaaaagttattaattttttttatatttattaaaacgaattaataaaatgagtaatttaaatatgagtattattttttgagatatttagaagtgttattttggtttgttttgattttgttatagcgtatttgtaggttaataattgttataattttagttttgttttattatatttttttatggtaagttacgttagtgttaatgatatatagttagaataataaagagaaggttaaaacgggagtttatttttttatgttttaaataaaataaatttgtagtttttatatgaaataggataataatgttttgtgttagatattaacgtgatatttagatggagagtaaaaattttattatttattagaatgttttgtttttgttaataatgaataattttttatttata

SEQ ID NO: 1213 - DNA, 485 bp, Artificial Sequence
  chemically treated genomic DNA (Homo sapiens)
tttggaagtagtaggggagggggtaggaaggggaggtttttgtttatttatggaaaatggacgtgtgttttatggtagtcgtagtttaagtaaatataaattttgaattagagattatattcgttatttttttagtattagtaatattaaattaaaatatagttttatttggttaattttaaagtaggatgtgggtgttagttttgaaaattatatgatcgggtttttagtagatattattagggttatgtttttgttttaagtaagaaagttataaaggtaatattttttgtagtattattattatgtttagtaaatagatgtaattataataatagttaattttagagataatagtttattatagaaaaaggttaagagggttttttattttttatgcgtagaatttgagttattttatattataattttattgagagaagaggtattaaaagagagataatgagaatttagggtataggttt

SEQ ID NO: 1214 - DNA, 485 bp, Artificial Sequence
  chemically treated genomic DNA (Homo sapiens)
gagtttatgttttaggtttttattgttttttttttaatgtttttttttttaatagagttgtaatatgggatagtttagattttacgtatgaagagtaaaagatttttttgatttttttttgtagtgaattgttgtttttgaagttaattgttgttatggttgtatttgtttgttaaatataatgatggtattataaggagtattgtttttgtgatttttttgtttaagataaaagtatagttttggtggtgtttgttggaaattcgattatgtggtttttaaggttggtatttatattttattttggggttagttaaataaaattatattttggtttggtattgttagtgttgaggaaatggcgggtatgatttttggtttagagtttatgtttatttaaattgcggttattatgagatatacgtttattttttatgagtgaataaaagttttttttttttgtttttttttttattgtttttaaa

SEQ ID NO: 1215 - DNA, 485 bp, Artificial Sequence
  chemically treated genomic DNA (Homo sapiens)
ttatttatttattggaaattttgggttgttaaataatatttaagtttattttgtaattagattaaagttttgggttttgtgggggtcggagattggaattttattttaaaaagaaacgtgtaaggtattttgttttttattaagaagtgtaatgagtaggttttatttatgatttttagttttaaatgattgaattggtattagtgttaaaaaaattgaaaatgttttaatatgtattaatcgtttaatggatgtgttgtttgtttgaaaagggcggggtggtatttaggttgtttaatgattttatatttttttatggtaaaatatttgtgatttgattatgttgtaattaaagagttatataaataatatttttggaaaggaataaacgggtttttttgaaagagggattttggttagttttagttggtattttaggtttttttatgaggagaaaatttttatttttaggtaaattttttttt

SEQ ID NO: 1216 - DNA, 485 bp, Artificial Sequence
  chemically treated genomic DNA (Homo sapiens)
agagaggagtttatttgggggtgagagttttttttttatgaaggggtttgagatattagttggagttgattaaaattttttttttaaggaagttcgtttgtttttttttaaagatattgtttatgtaattttttaattatagtataattaaattataagtattttgttatgggaaaatgtaaagttattaagtaatttaaatattatttcgttttttttaggtagataatatatttattaagcgattaatgtatgttaagatatttttaatttttttggtattaatgttagtttaattatttgggattggggattataggtgaaatttatttattatattttttgatgggaagtagagtgttttatacgtttttttttaaaatagaattttaattttcggtttttataaggtttagagttttaatttgattgtaaaataagtttggatattgtttgatagtttagaatttttagtaggtggatga

SEQ ID NO: 1217 - DNA, 432 bp, Artificial Sequence
  chemically treated genomic DNA (Homo sapiens)
ggaaagggggaagttttttgtaagtatacgtgataaaagaaagataaagtttagtttgttaaaagggattagagttataaatatgtttataaaaattttgttttgttatttatatttgatttataatgattatttgggaaatttgtttttttgttggggtagggatttgattgattatgtaaaggggaaatagatgtatttagtttgcggttttatatatttgttggatgagtaacgattataatttgttaggaggagataataaaaaaatttatataaaattttttattgtgtaagtgatattggttattgtagtcggtaattagaaagttatttcgaggatagaatttttttgtttattaatgtagagaaaatggttagtttgttttttacgttttagaatataatattggagatgttaggatttatttt

SEQ ID NO: 1218 - DNA, 432 bp, Artificial Sequence
  chemically treated genomic DNA (Homo sapiens)
ggaatgaattttagtatttttagtgttatattttgagacgtgggaagtaggttagttattttttttatattaataggtagaaaagttttgttttcggggtaattttttgattgtcgattataataattagtgttatttatataataaaaagttttatgtgaatttttttattgtttttttttggtaaattatagtcgttgtttatttagtagatgtgtgaggtcgtaggttgagtgtatttgttttttttttatatggttagttaggtttttattttagtaaagaggtaaattttttaagtggttattgtaaattaagtataggtaataggatagagtttttgtaaatatatttgtgattttggttttttttgataaattgaattttgttttttttttgttacgtatgtttgtagaggattttttttttttt

SEQ ID NO: 1219 - DNA, 411 bp, Artificial Sequence
  chemically treated genomic DNA (Homo sapiens)
attaggttatttagttagttttttggagttatatatgtgggttggtttttttaagtttttttcgtttaaaaagttagatagagtttgtttttttagtagggcgtatatcgtaggtttgggtgggttgtttgtttttgtgtttgttttgatttttagttatttttaggatgttttttttatggaggagaacgatttagttttgtttgttatgtgtattaagatgagttataagagagtattgtttttttgtaatgtaagaaatgtaatgtagttagaggttttgaaatttggtggggatagcggtagtagagattgtgatagtttcgggatataggaggttattttggtttttagttttaggtgtttggagttattagatagttaaagttgtataaggtataggtatgattt

SEQ ID NO: 1220 - DNA, 411 bp, Artificial Sequence
  chemically treated genomic DNA (Homo sapiens)
aggttatgtttgtgttttgtgtaattttggttgtttggtagttttaggtatttaagattgaagattaaggtggttttttgtgtttcgaggttgttatagtttttgttgtcgttgtttttattagattttagagtttttgattatattgtattttttgtattataagaaagtaatgtttttttgtagtttattttaatatatatggtagatagaattgagtcgtttttttttatgaaagaaatattttggaaatagttaaaagttaaaataaatataaaaataaataatttatttaggtttgcgatatgcgttttgttggaaaaataaattttgtttggttttttgggcggagaagatttgggaaggttagtttatatgtgtggttttagaaaattggttgagtagtttaat

SEQ ID NO: 1221 - DNA, 457 bp, Artificial Sequence
  chemically treated genomic DNA (Homo sapiens)
agttgaggggtggttagtttcggtgagttttggtgttttattatggtttttttatggttgtttttattttttttttagaaaagttattgagaaatggaattttttgatattatttttagttaaagttgttgaaaatagtttagaggagtgaattttatagagttttatgtttcgtttagatttttggggttttttgttttatggagtttgtagagtcgcgtttagattttttattttggatcgttattcggtatcggttttttttacgtagtttttttgtttttattgtaatttgattttttgttaaattattttttttttggttttaaatttttgtcgggaaagagatgaaattagtatttggagagttggaaagggaaaaatagttgttttttataaaatgggttagggagggggaagcggagtagtatagttggattttggtgggaaagttaga

SEQ ID NO: 1222 - DNA, 457 bp, Artificial Sequence
  chemically treated genomic DNA (Homo sapiens)
tttggtttttttattaagatttagttgtgttgtttcgtttttttttttttagtttattttgtgaaaagtagttgtttttttttttttagttttttaagtgttgattttatttttttttcgataaaagtttgaagttaggagggaaatggtttggtagaaagttagattgtagtgggagtaagaagattacgtggaggaggtcgatgtcgggtagcggtttaggatgaggggtttggacgcggttttgtagattttatgagataagaagttttaggaatttaggcggggtatagggttttgtggaatttatttttttgagttgtttttagtaattttagttaggggtgatgttaaagagttttattttttaatagtttttttggaagaggggtggagatagttatggggaaattatgatgagatattagggtttatcggggttgattattttttaatt

SEQ ID NO: 1223 - DNA, 446 bp, Artificial Sequence
  chemically treated genomic DNA (Homo sapiens)
tgattggttgtgtgaatgggtacgattagtagtaaagaaagaaatggaagttcgcgcgtcggttgggttttggtatatgcgttgtttttatagtgtgtttagattacgtcggggtacgtgtatagttaatagattcgatataggaaaaagtattttttagttgtttttattattttgttatttgttattttatttatttgttgtttttacgaaacgtttatttacgttagttaaaatggtatattgggtttggaatcggttggggaaatgttaggttgatagaataggggggataattgaaatagtaattgtgtggacggtggtggtgatataaatttgtttttttgcgtagaaggtaggatttttagagtttaggaggttttttgcggaggaattggtatgtggcgaaggttgtagggagggggttttgggatttaggggtagtt

SEQ ID NO: 1224 - DNA, 446 bp, Artificial Sequence
  chemically treated genomic DNA (Homo sapiens)
agttgtttttgagttttagggttttttttttgtagttttcgttatatattaattttttcgtaagaggttttttgagttttgggagttttgttttttacgtaaaggggtagatttgtgttattattatcgtttatatagttgttattttagttgttttttttgttttgttagtttgatatttttttagtcgattttaagtttagtgtattattttagttgacgtgggtgagcgtttcgtggggatagtagatggatggaatgataaatagtaggatggtggggatagttgagaagtgtttttttttgtgtcggatttgttggttgtgtacgtgtttcgacgtagtttagatatattgtgggggtagcgtatgtgttagggtttagtcggcgcgcgggtttttatttttttttttgttgttaatcgtgtttatttatatagttaatta

SEQ ID NO: 1225 - DNA, 476 bp, Artificial Sequence
  chemically treated genomic DNA (Homo sapiens)
agtggtagaggtgggaggtgggttggcgaggtggggtagtttaggaattgcgttggtggggataggaaattgggttgaagggagatgtaaggttttggtgggaaataaatggtattgtgttgttgacggaaaaagattttggtaggattgttgttgtgagtgttttgtggtttagaaaggaattttttataggttggattaattattaaaaatgtttttatttttaggagttttcggcgtgtagtggagtttcgttgggggaaatgatagtttggattatgggcgttcgcggtttggataagcgaggaagtttttttaaggtaaaaggaagttttgattgggattttaattcgtcggtttgttgtttgagtttgggagttgcggtgttttatggagttgttgagggaagtttgttttttgagttagtatcggttaagggagtttgttcgagtttagttgttgattgttattagggt

SEQ ID NO: 1226 - DNA, 476 bp, Artificial Sequence
  chemically treated genomic DNA (Homo sapiens)
gttttggtaataattagtagttgggttcgggtaagtttttttagtcggtgttggtttagagagtagattttttttagtagttttatggagtatcgtagtttttaggtttaggtagtaagtcgacgagttgagattttaattaaggtttttttttattttaaagaaattttttcgtttgtttagatcgcgggcgtttatggtttaagttgttattttttttagcgaggttttattgtacgtcggggatttttgaaggtagagatatttttaatggttagtttagtttgtaggaaatttttttttaagttatagaatatttataataatagttttgttaagattttttttcgttaataatatagtgttatttattttttattaaggttttatatttttttttagtttaattttttgtttttattagcgtagtttttagattgttttatttcgttagtttattttttatttttgttatt

SEQ ID NO: 1227 - DNA, 463 bp, Artificial Sequence
  chemically treated genomic DNA (Homo sapiens)
gaaaatatgagtttagaagggtttttaatttattagtgggagagattcgtaaagattagaatgagaattgaatgggttgtttgtttttgatatttataacggattaaaagatgatagtttaatttatatggttgtttttttaattttttaaattaagattattatgttttgttgatttaaagtaggttatagtttttggatgcgaggtagttttgtagttttcggtgggacgagagcgggtttagaagaggaaaaggtagcgtgggtagaaagtaatattataagacggtttttggttttgttattgggtaatgttttttcgttaaaattataatataatatgtgtttttatttttttttttacgtaggtattttttattttttaaattgttaggaaatagatttgggtgaaggttggagggaataagaggagagtaaaaatatatatgttgggtggaggaag

SEQ ID NO: 1228 - DNA, 463 bp, Artificial Sequence
  chemically treated genomic DNA (Homo sapiens)
ttttttttatttagtatgtatatttttattttttttttattttttttaatttttatttaagtttgttttttggtaatttgagaagtgagaaatgtttgcgtgggggaaaaagtggaggtatatgttgtgttgtaattttaacggggaaatattgtttaatgataaaattagggatcgttttgtgatgttgttttttgtttacgttattttttttttttttgagttcgttttcgttttatcgaaggttgtaaggttgtttcgtatttagaggttgtgatttgttttaaattaataaagtatgatgattttagtttgaagagttgggaggataattatatggattgagttgttattttttggttcgttgtaaatattaaaagtaggtagtttatttaatttttattttgatttttacggattttttttattgatgagttagaaatttttttaaatttatgttttt

SEQ ID NO: 1229 - DNA, 483 bp, Artificial Sequence
  chemically treated genomic DNA (Homo sapiens)
gttaagagggtttttagaatggattattttattgttttttttttatttaagaattttattttttgatatagatggatgtagggatgggagtcggggtagtttgggagatggaatttggcggtttaggtgttgaagggtcgagatagatttaggatggttaatgataggaaatttatttggttgtttaaatacggtgttaggtaattagtagttatttaggtaatcgatggggttggggaagtttagtaagaggtgatagcgggttttgatgataggattgatttgttttcggaggtaggttatggaagtaggtattatttagagacgtaggtaggtggttggttttggggacgtttgttagttgtagggatgggacgttaggttttgggaagagtaagagtaagatagtattttaggattagggtaattggagttcgtggatgttgttaagaaggaggtgggtattggggaaagagatgtagg

SEQ ID NO: 1230 - DNA, 483 bp, Artificial Sequence
  chemically treated genomic DNA (Homo sapiens)
tttgtatttttttttttagtgtttattttttttttgataatatttacgggttttagttgttttggttttggaatgttgttttgtttttgttttttttaaggtttggcgttttatttttgtagttgatagacgtttttaaggttagttatttgtttgcgtttttgaatagtgtttgtttttatggtttgttttcgagggtaagttagttttgttattaggattcgttgttattttttgttggatttttttagttttatcggttgtttgggtgattgttagttgtttagtatcgtatttaaatagttagatgggttttttgttattggttattttgggtttatttcgattttttaatatttggatcgttaggttttattttttaggttatttcggtttttatttttgtatttatttgtgttaggagataaaatttttagataaaaaaaaaatagtaagataatttattttaagaatttttttggt

SEQ ID NO: 1231 - DNA, 493 bp, Artificial Sequence
  chemically treated genomic DNA (Homo sapiens)
tgttttatttaatttgaggggtagtcggagtattgggagaggtagttttggtttcggaatatggaattcggtggttttgggtgttgtaggaaagggaagtaaatattttgttttaatagaaaataatcgttttgttttttttttttagaaggcggttttaggattgtatgtttttaaattggttatttcgtattttatttatatgaatttattaatagttattgtttttttattgttattattttattattttttgaagtgaattaaattttttttgtggttaataagtattgagttaggttttttatttttttttttatttttaaaatatttggggttttttgaatggtatttttcgtttggttaaggaaaataagagatgaaaaatgttgttttattgtagggaaaaatataagtattttattttattattattagttattttaggtttgtgtttattagataattgtttttaggtggttgttaagggtgg

SEQ ID NO: 1232 - DNA, 493 bp, Artificial Sequence
  chemically treated genomic DNA (Homo sapiens)
ttatttttaatagttatttaaggatagttatttagtgaatatagatttggggtaattggtaatagtaaagtgaaatgtttatgtttttttttgtagtagggtaatattttttattttttattttttttggttagacggaagatgttatttagggaattttaggtgttttgaagatgaaaaggaaggtagggggtttggtttagtgtttattaattatagagagaatttggtttattttaagaaatagtaaaataatggtaatggagagataatgattgttaatgaatttatgtgagtaaagtgcgaggtgattagtttggggatatgtagttttaaggtcgttttttgaagaaggaaagtaaaacgattgttttttattagaatagagtatttattttttttttttgtagtatttagggttatcggattttatatttcgaggttagggttgttttttttagtgtttcggttgttttttaagttaaataaggta

SEQ ID NO: 1233 - DNA, 443 bp, Artificial Sequence
  chemically treated genomic DNA (Homo sapiens)
tgtagttttttttatgttagataggaggtaatatttattggaagttgttggtgtcgtagcgtgttggtttgggttgagatggtgtgaaaattttgttcgtttcgttgttttttaatttttttaggtagtgatagttttttggtttgttttattggtaacgtttgtcgtggggttttattaatttattatatttttaatgtgtagttgttgtaggtagtgcgattttttggcgtttcgttgggttgttatatttggaattgatttgggatttaaaaaggttgtggatcgaggaaattttaaagcgttgtttttttttatttttggttatttatttttgagttgaggtagtgggatttggttaagttgagttaaagtgaaattgttgaaattaagaaagatagtagttaacgtgacggtagtgggtggtgagaattttttttttt

SEQ ID NO: 1234 - DNA, 443 bp, Artificial Sequence
  chemically treated genomic DNA (Homo sapiens)
ggaggaggggatttttattatttattgtcgttacgttggttattattttttttgattttagtagttttattttggtttaatttggttagattttattattttagtttagaaataggtggttagaaatagaagggaataacgttttagagttttttcgatttatagtttttttgagttttaaattaattttaaatgtggtagtttagcgaagcgttaagagatcgtattgtttgtagtaattgtatattggagatatgatgaattggtggaattttacggtaggcgttgttagtggagtaggttaagaggttgttattgtttgggagagttaggaaatagcgggacgggtagggtttttatattattttagtttaggttagtacgttgcggtattaatagtttttaatgggtgttgttttttgtttggtatgggagaagttgta

SEQ ID NO: 1235 - DNA, 469 bp, Artificial Sequence
  chemically treated genomic DNA (Homo sapiens)
attgaagtttgggtggaatttagttgtataattaagaagttgaatttgttttattttatttttttataatataaagagtgtgaaaaggttattttaatgtttagagagtggttttttttggaaaatattttcgaatatattatggagtagtgttaattgtagtataaaatgttttagaaattttgtaatttatgagtttaatggtatatttgaggattacgaggtttttttcgtttatttataatagttcggtgattgatttagtagagaggaagtaaaatgaataattttgattattttttaatattttttttgttttgttgattttagagttttaggggtatagtatttgtaggaattgtatgtttttttggtaatattttaaaattaaatttaaaagatgaagaagaaaaatggttattagatagttataaatatgttattatttgtaaatggtattgttttgtgg

SEQ ID NO: 1236 - DNA, 469 bp, Artificial Sequence
  chemically treated genomic DNA (Homo sapiens)
ttataaagtaatattatttgtaaataatgatatatttataattatttaataattattttttttttttattttttgagtttgattttaaagtattgttaaaaagatatataatttttgtaaatgttgtatttttaaagttttgaagttagtaagataggaaaaatgttaaaaggtgattaagattgtttattttgttttttttttgttaaattagttatcgggttattatgagtggacggaaaaaatttcgtaatttttaggtgtgttattaaatttataaattgtaagatttttaggatattttatattatagttgatattgttttatggtatgttcggggatattttttaagagaagttattttttgaatattaaaatgatttttttatattttttatgttatagaaaaataaaataaaatagatttagttttttaattatgtagttaagttttatttaagttttagt

SEQ ID NO: 1237 - DNA, 442 bp, Artificial Sequence
  chemically treated genomic DNA (Homo sapiens)
aattatagagattgtgaggggagtagttggtttgtaaagttgtttggggtaaatttgttagagtttatgagtaaatataatttgaaaatagaggttgttcgtggggaaattagttgtttttttaataaaataaaaggaagagttttgtttagggtaatgtgacgatgacgtgtaattgttttgtattaattataatttttttttttgtttttttattgtttagtttttttttattttatagtaagaaattgaggttgtatattgtatattgggaatatttaaattggaaataattaaaatatatattttatttatagtgggttttatgtgaggagaagtaaagattgttatagttttttgagtatatgagttaatgatgtgttttgtatttttttgattttttatattttaattgtttttgttttttatttgggggtaggga

SEQ ID NO: 1238 - DNA, 442 bp, Artificial Sequence
  chemically treated genomic DNA (Homo sapiens)
tttttatttttaaatgaggaatagaggtagttaaaatgtggaaaattaagaaaatgtagaatatattattaatttatatatttaggaagttgtggtaatttttatttttttttatataagatttattataaatgaaatatatattttaattatttttagtttagatatttttagtgtgtaatatataattttaattttttgttgtagaataaaggggaattgggtaatgagaaagtaaaaaaaaaagttgtagttaatgtagaatagttgtacgttatcgttatattgttttgagtaaaatttttttttttattttgttgaaaaagtaattgatttttttacgagtagtttttgtttttagattgtgtttatttatgagttttgataggtttattttaagtaattttgtaaattagttgttttttttataatttttgtggtt

SEQ ID NO: 1239 - DNA, 396 bp, Artificial Sequence
  chemically treated genomic DNA (Homo sapiens)
gtataatgggatgaaggggttttttttgttggggaatagatagttgatatgttggatggggttagggtttaaataaaggtttttgttgagtgggagtaggtataagatagatggtttgttaaatattgttagtatgtttgcgtagtgtcgtgcggcggttagagtttggataatggttattagggtattgtgtagtagcgtattggttaattttagtttagttaaagttattgtttatttttgttggttttgtaaagattaaggtagtttttttgttttgaatgtattatagttgtttagtaaagtatttttgaagttttgtttgaatttttattgttaagaggggttaagtaaaaggtggttcgtgtaaggatttgttttaagtttatatgtgaa

SEQ ID NO: 1240 - DNA, 396 bp, Artificial Sequence
  chemically treated genomic DNA (Homo sapiens)
tttatatatgagtttaaaataagtttttgtacgagttattttttgtttggttttttttagtagtgggaatttagataaaattttaggaatgttttgttgggtagttgtggtgtatttaaagtagagaaattgttttaatttttgtaaaattaataaagataagtaatagttttagttgggttgaaattagttaatgcgttgttatataatgttttggtgattattatttaggttttgatcgtcgtacggtattgcgtaagtatgttggtaatgtttaataaattatttgttttgtatttgtttttatttaataggggtttttgtttgaattttggttttatttagtatgttagttatttattttttaataggggaagtttttttattttattgtat

SEQ ID NO: 1241 - DNA, 417 bp, Artificial Sequence
  chemically treated genomic DNA (Homo sapiens)
ggaagttttttattgttgagagtagtagttaaaaaagttgttagttacgtggttgggtttttatttttgtagaggtaggttgagttatagtttggtggtgtggatttaggtaggaattggttaatattttgaattttgagttgttatttgtttcgtagtttgttgggatgtttagtttagataatatataaagttttttggatacgggataaatttaggtttatggaaagagtaggaaggttaaagtgtgtggtattttgggtaatgacgaaggcgtaattagggagttgatatgtttgttttaaagttaagaattttaggataatttgttatttagttgaagttagtgtagttgttataaaaaagtttggggataaaagtatgttttttatttgtttttttgtttttttgtatatt

SEQ ID NO: 1242 - DNA, 417 bp, Artificial Sequence
  chemically treated genomic DNA (Homo sapiens)
ggtgtgtaagaagatagggaaataagtaaaaagtatgtttttgtttttaggtttttttgtagtaattatattggttttagttggataataaattgttttggaatttttggttttggagtaaatatgttagttttttggttacgttttcgttattgtttaaagtattatatattttaatttttttgttttttttataggtttgggtttgtttcgtatttaggaaattttatatgttgtttaaattgagtattttagtaggttacgaggtagatggtagtttaggatttagaatgttgattaatttttatttggatttatattattaagttgtaatttagtttgtttttgtagaaataggagtttagttacgtggttaatagtttttttaattgttgtttttagtaatgaggaattttt

SEQ ID NO: 1243 - DNA, 449 bp, Artificial Sequence
  chemically treated genomic DNA (Homo sapiens)
ttttatttttaatatatttttttagagttaggtgagtttggaagtttaggtttttggaaggtagagttatatagggtaagaggtttaaggagtcgtgaattttggttggagaaattttttttttggttttgttaaatttaataggtataattgtattttgttgattttaatttttttggcgggtttaattggttttggtattgttttattttttgttttgtttttgtagaggtaaagagggtgtttgtatagttggtgtagggcggggaagtttttttttgagggtgggtaggggttttggtagtttttaggtgggtggaggaagttttttcgtgttttatttttgtgtttttaagggagtgttgagaagtttggggatttttagggagtagttggttggagtaggtagtttcgtagattcggaattaggttagatttttattttagtg

SEQ ID NO: 1244 - DNA, 449 bp, Artificial Sequence
  chemically treated genomic DNA (Homo sapiens)
tattgggatgagagtttggtttggtttcgaatttacgggattgtttgttttagttagttgttttttgggagtttttaagttttttagtatttttttggaggtataggggtggggtacggggaaattttttttatttatttaggggttgttagagtttttgtttatttttaagaaggggttttttcgttttgtattagttgtgtagatattttttttgtttttataggggtaggataggaagtggggtaatgttaagattaattaaattcgttaggggaattaaggttagtaggatgtaattatgtttgttggatttaataaggttagagggaaggtttttttagttagagtttacggttttttaggttttttgttttgtgtagttttgttttttaggagtttaggtttttaggtttatttagttttggaagaatgtgttgggggtgaag

SEQ ID NO: 1245 - DNA, 340 bp, Artificial Sequence
  chemically treated genomic DNA (Homo sapiens)
gagggttaaggttaggttgtttttaattttatcgttttttgttttcgttttttttattttttagtagtagagttgtttaaatttggttttaggagggaatgggggaggtagcggtaggcgggtgtcgttagaggttagggcgtcgttttcgtttagtcggttggtatttttgttgtttggaggagggtaggggggttcggtagttttttttcggaaagggagatgttcgtattttttgatatatattgagtaatgtgtaaacgatatgtaaatcgagttttaaattagtattttagttagggaatagtttgagagttgtttttgggatgagagtagaagg

SEQ ID NO: 1246 - DNA, 340 bp, Artificial Sequence
  chemically treated genomic DNA (Homo sapiens)
ttttttgtttttattttaaaagtagtttttaagttgttttttggttgagatgttgatttgaagttcggtttgtatgtcgtttgtatattatttagtgtatgttagaaggtacgaatattttttttttcgggagagggttgtcgggtttttttgtttttttttagatagtaaaaatgttagtcggttagacgggagcgacgttttggtttttgacggtattcgtttgtcgttgttttttttatttttttttggagttaaatttaggtagttttgttattgagagatggggagagcggaggtaggaaacggtgaggttggaggtagtttggttttggttttt

SEQ ID NO: 1247 - DNA, 438 bp, Artificial Sequence
  chemically treated genomic DNA (Homo sapiens)
ggtagtgtggatatgagttaagttttagttattttggatggtggtgggggtggcggggttgatgggtcgtttgaagtcggttgttaggagttcgtttggttatagtcgttagtaggagagattagttggcggtgtagggtttatcggttcgggtttggaatttgagttgtttttagaggtttagtttttttttgggtttttataaattggtttttgtttttgggtcggttaagatttagtagtttgggttttttgtttgttcgcggtattcgcgttgagttggcggggtaaatgggttagttttttttttgtttatgtttaggacgtcgttttaggattaaatggagatgtaattttttatataaatttatgataatttagatggagtgattgtaattggttttttaatgggggttttgtttagagttggtggttaga

SEQ ID NO: 1248 - DNA, 438 bp, Artificial Sequence
  chemically treated genomic DNA (Homo sapiens)
tttagttattagttttggataaaatttttattgaaaagttaattataattattttatttaaattgttatggatttgtatagaaaattatatttttatttagttttaaagcgacgttttgggtatggatagaggggaggttggtttatttatttcgttagtttagcgcgggtgtcgcgggtagatagaaagtttaagttgttgggttttggtcggtttaggaataaaggttagtttgtgggggtttagagagaagttgggtttttgagggtagtttagattttaggttcgggtcgatggattttgtatcgttagttggttttttttgttggcggttgtggttagacgagtttttgatagtcggttttaggcggtttattagtttcgttatttttattattatttaaggtggttggagtttggtttatgtttatattatt

SEQ ID NO: 1249 - DNA, 364 bp, Artificial Sequence
  chemically treated genomic DNA (Homo sapiens)
tggggtgagtgaggtattatttttttagttagaaagcgtagttttgttaggagttttttggttagtgttatttttttttgtatattgcgtcgttttaggtcgcgtagaagtcgtagtttttgtttagttaaaaggttttgggagggtaaaaagatagtatgagcggaaggttttagttaggcgtttttgagttttttttcgaggtcgtattaggttgtgtattaggagtttttttcggtatcgatttagggtattgggtcgggttatcgttttgcgttcggtatcgtggtaaaattgtttgtagtgagtagggatgtgtatagtagataggaattaaaggaaaggagaaggatagtgattttgg

SEQ ID NO: 1250 - DNA, 364 bp, Artificial Sequence
  chemically treated genomic DNA (Homo sapiens)
ttaaggttattgtttttttttttttttttgatttttgtttgttgtgtatatttttgtttattgtagatagttttgttacggtgtcgagcgtaggacgatgattcggtttaatgttttggatcgatgtcgagggaaatttttggtgtatagtttggtacggtttcgggaagggatttaggggcgtttagttggggtttttcgtttatgttgtttttttgtttttttagaattttttggttaagtaaggattgcgatttttacgcggtttgagacggcgtaatgtgtaaaagaaggtggtattggttaagaagtttttggtaaaattgcgttttttggttgaggaggtaatgttttatttatttta

SEQ ID NO: 1251 - DNA, 386 bp, Artificial Sequence
  chemically treated genomic DNA (Homo sapiens)
aggtttttattattttttaggttgttttttgtttagagattaatttgtttatttttttgtttggagatgaatcgagggaattaatcgtttattagcgtaggtttttttaatttcgtatcgtttcgttttaaatgtttattttttggtaaaatatgtttttgtcgttgataaggttgtttggaaaatgttaattttattttcgaattaaaatttgtttttttattttcgttttaataaaaatgaagtattcggaaatattgttacggtgtagaagagaaagatttgatataatttttaaaatgtttttaattacgttgatttttgaacggtttgttttttaattttgattttttttttattttttaattttttgaggtagtatttat

SEQ ID NO: 1252 - DNA, 386 bp, Artificial Sequence
  chemically treated genomic DNA (Homo sapiens)
gtaaatgttgttttagggggttgggagatggggagggggttagggttagaggatagatcgtttagaagttagcgtgattgaaggtattttaaaaattatgttagattttttttttttgtatcgtggtaatgttttcggatgttttatttttattaaaacgagggtaagggaataaattttaattcgaggataaaattagtattttttaagtagttttgttagcggtaaggatatattttgttagaaaatggatatttggggcggggcggtgcgaggttgggggagtttgcgttgatggacgattagttttttcggtttatttttaggtaagggagtaaataaattaatttttgagtagagagtagtttggaagatgatggaagttt

SEQ ID NO: 1253 - DNA, 460 bp, Artificial Sequence
  chemically treated genomic DNA (Homo sapiens)
ttaaagggggagaaatggggatatttcgcgttttttgttttttgttataatgagtgaaatatattaggttgtaaaaggaaatgttgtttgagacgtagtttcgatgttttattgttaagttttatttattgatgtaaacgtaatcgttggaaatcggagtttttattaatatatatatttttatatattcggggttttttttgtttttttttttttttttgggtttgtttatttattttttagggttagttttgttgttttttgggtatgtttatgttaagtttggagtttcgtatcggttttatatttttttatggtagataagattttaatagaattttattgttttttagagtttagtaatgtattttggaaattaggcggttatatattaaagttattgtttttttttataaatgggtttttttaaagttagtgattatgggggttttgataagtt

SEQ ID NO: 1254 - DNA, 460 bp, Artificial Sequence
  chemically treated genomic DNA (Homo sapiens)
agtttattagagtttttatggttattggttttgagagagtttatttataagggggaataatggttttagtatgtagtcgtttaatttttagaatgtattattgagttttgaggagtaatggaattttattaaagttttatttgttatgggagggtatgaaatcggtgcggaattttaggtttggtatagatatgtttagaaagtagtagggttgattttaggaggtgggtgaataagtttagagggagaggggggagtaggaggggtttcggatgtgtgaaaatatgtgtgttaataagagtttcggtttttagcgattacgtttatattagtgaataaaatttggtaataaaatatcggagttgcgttttagatagtatttttttttatagtttggtgtattttatttattataataggaggtagggagcgcgaggtgtttttatttttttttttttaa

SEQ ID NO: 1255 - DNA, 441 bp, Artificial Sequence
  chemically treated genomic DNA (Homo sapiens)
gttaatttttttttgatgttgtatttttttttaaaaattagagtttaggtaggtaatgtttatagtattttattttaataatattggaaatcggtatagttagggttattatagtggtggggcgggagtttcgatggcgattaggggagttgtaagtttttcgttttatttaaattttgggtagtaatttagaaaatttaattaaagggggagaaatggggatatttcgcgttttttgttttttgttataatgagtgaaatatattaggttgtaaaaggaaatgttgtttgagacgtagtttcgatgttttattgttaagttttatttattgatgtaaacgtaatcgttggaaatcggagtttttattaatatatatatttttatatattcggggttttttttgtttttttttttttttttgggtttgtttatttattttt

SEQ ID NO: 1256 - DNA, 441 bp, Artificial Sequence
  chemically treated genomic DNA (Homo sapiens)
ggaggtgggtgaataagtttagagggagaggggggagtaggaggggtttcggatgtgtgaaaatatgtgtgttaataagagtttcggtttttagcgattacgtttatattagtgaataaaatttggtaataaaatatcggagttgcgttttagatagtatttttttttatagtttggtgtattttatttattataataggaggtagggagcgcgaggtgtttttatttttttttttttaattaaattttttaaattattgtttaagatttggataaagcgaaagatttatagtttttttaatcgttatcgaggttttcgttttattattgtggtggttttgattgtatcggtttttaatattattaaagtgaaatattgtgggtattgtttgtttgggttttggtttttaaaaagagatgtagtattaggaagaaattggt

SEQ ID NO: 1257 - DNA, 473 bp, Artificial Sequence
  chemically treated genomic DNA (Homo sapiens)
aatgttgaagttggggatattttttaagttaatttttgtgtttgtggtgtggttacggttttggttattatttttggttatagtgtttcggagatgttgatgttgatttggattagaggtgttagtttgggtattgttagtttttatagttattgattagagttttagggtataggtagttagtaatttatttgggtgttttagggattgttattggtaaagtgatggttttatagggattaaatgtgaagttaaagtaggatacgtaggtcggagataaggttaagaatagattttttttagcgtttaagtgttgtttgttagaaattgatagttttacggttttggtcggtgataggtatagggtgataataatattatatgattagtattattggaggataggttgttattggtttttagagataaggaaataatgggcgatttttttgtttagggaaaggtttgtatgg

SEQ ID NO: 1258 - DNA, 473 bp, Artificial Sequence
  chemically treated genomic DNA (Homo sapiens)
ttatgtaggtttttttttaggtagaggggtcgtttattgtttttttatttttgggagttagtgatagtttgttttttaatgatgttgattatatggtattgttattattttgtgtttgttatcggttagggtcgtggggttgttaatttttgataaatagtatttgagcgttaaagggaatttgtttttggttttattttcgatttgcgtattttgttttagttttatatttggtttttgtggggttattattttgttaatagtagtttttggggtatttagataagttgttagttgtttgtgttttggggttttagttaatggttgtggggattggtagtgtttaggttggtatttttggtttaggttagtattagtattttcggggtattgtggttagagataatggttagagtcgtggttatattataggtatagagattagtttggggaatgtttttagttttaatatt

SEQ ID NO: 1259 - DNA, 500 bp, Artificial Sequence
  chemically treated genomic DNA (Homo sapiens)
tgaaagggaggtatagttaatgatttcgtacgtattttagaaattgatttttttagattttaatagaagttatttaagtgtatagatgtttgttggttttatatggaggttttgttggttatgaaaaaatatttttttttaattttttgtttaatttgttttaagttggtaatgaaatttgtgaatttgtgttttttttttataggaaaaatagaattttgattttttttaaaaattagaacgtaataggataatggagaaattagttttaatagtatattttttgttcgttttagagcggtgatgtaaatacgatgatgttatgtttttggggtttttgaggtttttgttaaaagtatagtagtttaggtggattcgtgtttatcgtatgtttttttggtggatttttgtcgataaattgtatgtttgtttttttgaaatagtattatgaagttgttaatgtttttgtataaagattattttattttgtttgttttggg

SEQ ID NO: 1260 - DNA, 500 bp, Artificial Sequence
  chemically treated genomic DNA (Homo sapiens)
tttagggtaaatagaatggggtggtttttatgtaaagatattaataattttatgatgttattttagaagagtagatatataatttgtcgatagaaatttattaaagaagtatgcggtaggtacgaatttatttaagttgttatgtttttggtagaaattttaaagattttaaaagtatagtattatcgtgtttatattatcgttttgaaacgaataagaaatgtgttattgagattgatttttttattattttgttgcgttttgatttttaaaagagattaaaattttattttttttgtagaaagggaatatagatttatagattttattattaatttaaaataaattgagtaaaaaattagaggggaatgtttttttatagttagtaaggtttttatgtaaaattagtaaatatttgtgtatttgagtagtttttgttaaggtttaaggaagttagtttttggaatacgtgcgagattattgattgtgtttttttttta

SEQ ID NO: 1261 - DNA, 333 bp, Artificial Sequence
  chemically treated genomic DNA (Homo sapiens)
ggagaaatgagaaggaatatagtaatcgaataagacgatgttcgtttatgatatttatgatgttttttaaggtttgagatatattgttttttgtttaattagttattgtgattatatttttatggagattattatgtttgtatttataatagatacgtgtgtatttattaaaggaatatagttgttaaacgtacgttttgggtttagggtggagtggttttttatagtatagttatcggagttgttgtaaaaagtgttagaaaataagtaaggagttgtttttatttatgaagagaggttttttttggtattaggttttgggtttaggggagt

SEQ ID NO: 1262 - DNA, 333 bp, Artificial Sequence
  chemically treated genomic DNA (Homo sapiens)
atttttttagatttagggtttgatattagagagagtttttttttatgaataaggatagttttttgtttgttttttgatattttttgtagtagtttcgatgattgtgttgtaaaaagttattttattttgggtttagagcgtacgtttggtaattgtgtttttttaatggatgtatacgtgtttattgtgagtataaatataatggtttttatggagatatggttataatgattaattagataaaagatagtgtattttaagttttgaaagatattatggatgttataaacgaatatcgttttattcggttgttgtatttttttttattttttt

SEQ ID NO: 1263 - DNA, 492 bp, Artificial Sequence
  chemically treated genomic DNA (Homo sapiens)
tagttttgttaggttttttaggacggtttttattttgagttatatttttaggaatattttgttattttttattttttttttgggtttatattatgaaagttttatgtagagtttgttattttagagggatatatattatttaaatttgataagataatttaattttatttcgtgtttgttatcggcgataaaattaggagatttttatgatttagtatttttagtaagattgttaggaatttattatataaggtttaattggatttttttttgtagatggttgggagttatgggttggaacgtaattcggtaatatatttggggaaataaatgtaaaatgtttgttttagagatttagataaggtagtaggtttttaagttttttaagaatcggatttgttttttttgggttttgaagggcgatttggggaggatttacgttgtcggaggaggagggaatggcgggttttttttttttttattttttgattt

SEQ ID NO: 1264 - DNA, 492 bp, Artificial Sequence
  chemically treated genomic DNA (Homo sapiens)
gagttaagggatgaggggagaaagagttcgttatttttttttttttcgatagcgtaaattttttttaaatcgttttttagggtttaggaaaagtagattcgatttttggggagtttggaggtttgttgttttatttaagtttttggaataagtattttgtatttatttttttaaatgtgttgtcgaattgcgttttagtttatggtttttagttatttgtagagagaaatttagttagattttgtataataagtttttgataattttgttgaggatgttgggttataaaagttttttggttttatcgtcggtaatagatacggagtgaaattgagttgttttattaaatttagataatatatatttttttagagtagtaggttttgtatggggtttttatggtatgagtttaggagggggatagggagtggtagagtgtttttggggatgtggtttagggtgggggtcgttttggaaagtttggtaggattg

SEQ ID NO: 1265 - DNA, 301 bp, Artificial Sequence
  chemically treated genomic DNA (Homo sapiens)
tttagttttggaaataatagtaggtaagacgtggtttgagtttgggtttatttagttgggtttggtttcgtttcgagggtttgtcgtttgttgtgattatagtaggattagtgttttagattttgtttaaagtttggcggttatcgtttgtttcgtagtttatttttcgtagtttttcgaggttttagcgattatgttattgaaaatttcgtttttattttgttaatttcgtagtaaattataggtttggggaggcgtgggttttttttttaaataagatttaattttatttagttgtttt

SEQ ID NO: 1266 - DNA, 301 bp, Artificial Sequence
  chemically treated genomic DNA (Homo sapiens)
ggggtagttaagtggaattgaattttgtttaaggaggaggtttacgtttttttaggtttgtaatttattgcgaggttgataagatgaaagcggaatttttagtggtataatcgttgggatttcggggagttgcgggagatgagttgcgaggtaggcggtggtcgttaggttttaagtaagatttggggtattgattttgttgtgattatagtaagcgatagattttcggagcggggttaggtttagttggataagtttaggtttaggttacgttttgtttgttattgtttttagggttgag

SEQ ID NO: 1267 - DNA, 351 bp, Artificial Sequence
  chemically treated genomic DNA (Homo sapiens)
ttttttttatttttattggagtttaaattataaatagttttagttggaatttgattgtagatttttttagtaaagttagtatttttaggattttttattttggatggggatcgggagtgtttttttattaattatagttttttaattaatagttttgagtttggaataaaaggtgtttatcgggagaacgttagcgggttttgaattttggtcgtttgtttttatttggaggatttggcgttttggggagtaggtatggtatggtttagtgttgagtttggtaggggatggggtttggagggcgagtagttggtaggtcggttgtttgtttttattttggatatttttata

SEQ ID NO: 1268 - DNA, 351 bp, Artificial Sequence
  chemically treated genomic DNA (Homo sapiens)
tgtggagatgtttaaggtggagataggtagtcggtttgttagttgttcgttttttaaattttattttttgttaggtttagtattgagttatgttatgtttgttttttaaggcgttaggttttttaaataaaaataggcggttagagtttagggttcgttggcgttttttcggtaagtattttttgttttaggtttagagttgttaattaaagagttgtgattaatgaggaagtattttcggtttttatttaggatgagaggttttggggatgttgattttgttggaggaatttgtagttagattttaattggagttatttatagtttgagttttagtaggggtgggagaaa

SEQ ID NO: 1269 - DNA, 440 bp, Artificial Sequence
  chemically treated genomic DNA (Homo sapiens)
tagtgttagttgaggaggtttttttttgtttttgtttgttttttttgattgttatgtaatgttcggtagtaggaggtaaatttttttttaatttttaggttcgttatagcgtatgaattttatcgtggggagttatagtgattgagtttagtagttaggttttatgttgagtgttataaattaggtttattattagttttttttggtagatgttatagttaagaatttgtttattgtttgcgagatttagtcgtttttgtatattgttaaattagggttgatagatttatcggggatttaggggatttttatgatattttggttgggtgttgttaggaattttattttgagagagtaggaggtgatatagtttttggtaaggtattttagatttgagattttatagtttgatgtacggggagtagaattagggtatgatt

SEQ ID NO: 1270 - DNA, 440 bp, Artificial Sequence
  chemically treated genomic DNA (Homo sapiens)
gattatgttttgattttgtttttcgtatattaggttgtgagattttaggtttgagatgttttgttaagggttgtgttattttttgtttttttagaataagatttttggtaatatttagttagagtgttatgaagattttttaaattttcggtggatttgttagttttggtttaatagtatgtagaggcggttgggtttcgtaagtagtgggtaggtttttggttatggtatttgttaggagaagttggtaataggtttgatttatgatatttagtatgggatttggttgttgagtttaattattgtggttttttacggtggggtttatgcgttgtaacgggtttggaaattggagaggaatttattttttgttgtcgaatattatataataattaagggaaataagtagaggtaggagggggtttttttagttggtattg

SEQ ID NO: 1271 - DNA, 476 bp, Artificial Sequence
  chemically treated genomic DNA (Homo sapiens)
ggggaagaggtatttggattaattattggttgtttttaaatgtttaaagttggtatttatatatttgattttttttatagttttttttttttagatttaacgtttaggtttttttgattttaaaattgggttatttgaatgttaaattttcgataattttttaatagaggtgtttattaatttgtgttaaattagagtttagcgtttttggaaatatatgtgatatttatatgaatattaaatgtttttattaggtatagtatttatatgatgaatattaaatgtagagtttaacgtagggatatagatttcgtttcgaggatttgttaatatatttttgcgtttttttagcggtatcggttagttttgtttgttgtttatttttaggtgatgagatgtggtaattgtggtattggttgaaataaataaatggtattttaattattaagtttagagatggagtagtaaaggaggtt

SEQ ID NO: 1272 - DNA, 476 bp, Artificial Sequence
  chemically treated genomic DNA (Homo sapiens)
agttttttttgttgttttatttttgaatttggtgattaggatgttatttatttattttagttaatgttataattgttatattttattatttggaaataaatagtaaatagggttgatcggtatcgttgaggaaacgtaaagatgtgttggtaagttttcgaagcgaaatttgtgtttttgcgttgggttttgtatttggtatttattatgtaagtgttgtgtttaatgaaggtatttggtatttatgtgggtgttatatgtatttttagggacgttgggttttaatttagtataggttaatggatatttttattaaagggttatcgaaagtttgatatttaaataatttagttttaaaattagagaaatttagacgttaaatttgaaggagagaaattgtgagagaagttaagtatataaatgttaattttagatatttgagagtaattaatggttgatttaagtgtttttttttt

SEQ ID NO: 1273 - DNA, 497 bp, Artificial Sequence
  chemically treated genomic DNA (Homo sapiens)
attttttgggtggttaattttttttttttatattttagtgttattttaagggaaaagaaatgtaggatatggaataaatagagggaaatttgtttgatttgttgttaatgtgttagtgttttgttttgtgggtttaatttgtagaaggtaggtttttgttttgttattttttggtatttaatagggtttgtttttagtgatttagtcgggtttttttagatagaaaatagttatttagtgttttttatattattaagaaaatgagattattttttgaggagattagtagttttcggttgttgtcgaaagggcgttttgtttgtttgtttggttgaaaggtattacgtagtttaggtttgtttaaaattagtttttttataaattatttgtataatgaagtgtttgtttttgttttttgatatatttgtgtttttgtttatttttaatgatgatatggttttttttgtttttatttggttttttattttttatatttt

SEQ ID NO: 1274 - DNA, 497 bp, Artificial Sequence
  chemically treated genomic DNA (Homo sapiens)
ggagtgtggagagtaaagagttaaatggaaatagaaaaagttatgttattattaaaaataaatagagatataaatatgttagagggtagaggtagatattttattgtgtaagtgatttatgaggaagttaattttaaataagtttgggttgcgtggtgttttttagttaaataaataggtaaagcgttttttcgatagtagtcgagagttgttgatttttttaaggaataattttatttttttggtggtgtaaaaggtattaagtggttgttttttgtttaaggaaattcggttgagttattgaaggtaggttttgttaaatgttagagagtaataagataaagatttgttttttataagttaaatttataaaataaaatattgatatattaataataaattaagtaggtttttttttgtttattttatgttttatatttttttttttttaaaatggtattaggatatgagagagagggattggttatttaggaaat

SEQ ID NO: 1275 - DNA, 396 bp, Artificial Sequence
  chemically treated genomic DNA (Homo sapiens)
atttgtatttaagtaagattgtagtagtttttaattaattaatatgtttattagtatgaagtaattgtgttttgtttgtgatcggtattttatttttatttattaaatatttattgggtattagtgatgtgttaagttttgtgttggaattcgagatgatatagatgattgacgtggttttcgtttttgggaagtatgtagtttaggaaagttatagaatgtagtttttaagaagaagttattggagtaagtagatgaaggttgggaaattatgtaagtttagggtagattagttaaattgtaatgggaatgtagttagttatttattttgaggttttaaagcggaataaaagggattgtaatagtttagattttttttttttttttttagggata

SEQ ID NO: 1276 - DNA, 396 bp, Artificial Sequence
  chemically treated genomic DNA (Homo sapiens)
tgtttttgaggagggaaaggggaaatttaagttgttgtagttttttttatttcgttttagggttttagagtgagtagttagttgtatttttattgtagtttggttggtttgttttaggtttgtatgattttttaatttttatttgtttgttttagtggtttttttttgggagttgtattttatgatttttttggattgtatgttttttaagggcggggattacgttagttatttgtgttatttcgagttttagtatagggtttggtatattattggtatttaataaatatttgatgaataaaaatgaggtgtcgattataggtaagatataattgttttatgttaatagatatgttgattggttaagaattgttatagttttgtttgggtgtagat

SEQ ID NO: 1277 - DNA, 391 bp, Artificial Sequence
  chemically treated genomic DNA (Homo sapiens)
aatagttttgtttttatgggtttgtttgttatagattagttagtgggtagattgtttcggttggaaatggagatttagataatgttagagtggataatggtgttcgaacgttgttaggcgttaattaggattcggtaatgattttgttgtgtagattgaagtgcgagtatttggagttattatttaaggtttgtttttgtaattagatgattgtataattttaatatgattaattttgtcggatgtgaattgtgtagttgtaattataaaataaggtggtatttttgtttttttgttgaatataaatattatatatgcgtaagttataattttataacggtcgtttttggtaagaaagagttttgttagttagaagatgtagttgagggga

SEQ ID NO: 1278 - DNA, 391 bp, Artificial Sequence
  chemically treated genomic DNA (Homo sapiens)
tttttttaattgtattttttgattgataaagtttttttttgttaaaagcgatcgttataaaattatgatttgcgtatatataatgtttgtgtttaataagaaaatagaaatgttattttattttgtggttatagttgtataatttatattcggtaagattgattatattaaggttatgtaattatttaattgtagagataagttttgagtaataattttaaatgttcgtattttaatttgtatagtagagttattgtcgagttttgattagcgtttgatagcgttcgggtattattatttattttggtattgtttaaatttttatttttagtcgaagtaatttatttattaattgatttatgataaataggtttataagagtaaagttgtt

SEQ ID NO: 1279 - DNA, 470 bp, Artificial Sequence
  chemically treated genomic DNA (Homo sapiens)
gtaaaggtttggtggggtggggtaggggttataagagattttttatggaatttttatttggaatagttagatcgagtattaatatatattgaatagttaaattatatattattgatttgttaaacgtatttgtatataaataagtatgattatttatggaggttcgagtagtggtatttttttttagtgttatgattatagatggatggttttagttagatacgaattagggacgttgttatttttgtcgtaaagttagcggttgatttaaaattatatttattggagtatgtaagtgtgatagtttagtggtgagtttgggataattagtttaaaagataagataaacgatttttaaaattggtattgtgacgaagattttattttattttttcgttatagttagtttagttttgatgttaaaaatatagtcgaagataattaattaggaaatgttaataggtaggatt

SEQ ID NO: 1280 - DNA, 470 bp, Artificial Sequence
  chemically treated genomic DNA (Homo sapiens)
aattttgtttgttaatattttttagttaattattttcggttgtatttttggtattagggttgagttggttgtggcgggggggtagggtgggattttcgttataatattagttttaggagtcgtttattttgttttttagattaattattttaaatttattattaggttgttatatttatatgttttaataaatgtagttttaaattagtcgttgattttgcggtaggggtagtagcgtttttggttcgtgtttaattagggttatttatttgtaattatggtattgaggggaggtgttattgttcgggtttttatgaatgattatgtttatttatatgtaaatacgtttgataaattaataatgtatgatttagttgtttagtgtgtgttagtattcggtttggttattttaggtgggggttttatggagggttttttgtggtttttgttttattttattaggtttttgt

SEQ ID NO: 1281 - DNA, 493 bp, Artificial Sequence
  chemically treated genomic DNA (Homo sapiens)
gtaattttgatattatttttttaaggtagtaatagaagggttttttttatttattttttatgtgtttttgatattattttgcgtttttggatttttttattgtatgttttttagaaataaattaagttcgaataagttgttttagttaatgaagtgcgtttttggtttttttttcgtggtttagaattattcggtaaaatattaattgttttaggatgtatttttttttagttttgaaatattgtaatattaagttattataaataaagagtattgagataataatatataagaacgtgtataaatggaaattattgtaatttttttttaaattaaggacgtgtggacgttttatgaataaatatttaggatatttggataaatatatattatgtgtttatatagataaaaatagaaaggagtatttttttttattttatttttttattttaagttatataagtttttcgtagggtataagtttagggtaatt

SEQ ID NO: 1282 - DNA, 493 bp, Artificial Sequence
  chemically treated genomic DNA (Homo sapiens)
gattgttttgggtttgtgttttgcgagaaatttatgtgatttggggtgggggagtgaggtaggaaggaatgtttttttttgtttttatttatgtgaatatatagtatatatttatttagatattttaaatgtttatttatgaggcgtttatacgtttttaatttaaaaaaggattatagtagtttttatttatatacgtttttgtgtgttgttattttaatgttttttatttgtggtaatttagtattgtaatattttaaaattaagagaaaatgtattttaaaataattggtattttgtcggataattttgaattacggagaaggagttaaaagcgtattttattagttggaataatttattcgagtttaatttgtttttaagagatatatagtggaaaaatttagaagcgtaaaatagtattaaagatatatagaaaatgaatgaaaagggtttttttgttgttgttttggaaagatggtattaaagttgt

SEQ ID NO: 1283 - DNA, 385 bp, Artificial Sequence
  chemically treated genomic DNA (Homo sapiens)
ggagatagtgaagttgtttgtgcgggtcgggggagtttgtttttgtttttgttttagtttatttttggtttggtttgagtattttgagaagtgggtttaggagaggtttttggatttttgggtttttggatagttagggtgagggcgttttgttatatttttaggagagagtatatttaaaataatttttttttttaaaaatttagtgttaacggattttagatgttcgtttgttatataatggggtttgttttaatagcgttaatttttagatgtgtagtttggaattaagaagtttattggttttttgaggatattgtgagttaagttgagagttgttcgggggagagatatggacgtgtagaattagggatgggagaggagt

SEQ ID NO: 1284 - DNA, 385 bp, Artificial Sequence
  chemically treated genomic DNA (Homo sapiens)
gttttttttttatttttggttttgtacgtttatgtttttttttcgggtagtttttagtttggtttatagtgtttttagggggttaatgggttttttgattttaggttgtatatttggaagttgacgttattaaaataaattttattatataataaacggatatttggaattcgttagtattgagtttttagaaaaagaaattgttttggatgtgtttttttttaagaatgtggtaaagcgtttttattttggttgtttaggaatttagggatttaggggttttttttgggtttattttttaaggtatttaggttaggttagaggtgggttggggtagagatagagatagattttttcggttcgtataggtaattttattgttttt

SEQ ID NO: 1285 - DNA, 440 bp, Artificial Sequence
  chemically treated genomic DNA (Homo sapiens)
gaaaagaagattttgagtggttaagcgaacggagtagtttttattcgcgttttttgtcgtttagttcggttttttggtatttttggtttttaacgggtttttttttaaggtttagcgtattcgggagttttttagtttcggggattttgtagcgttttggatagattttcgtgaaattaggtgtcgagttatggtgtatttattttcgggtttgtcgtttttattatttttgtagtatttttaaggatagggtttagtgtttggtagagatttaattaattgttatattttcgaatttattcgttagtaggtaatttttgagtgtttattaaattttagatattgatataaaacgggatattgcggttaataagataaagtttttgtttttatggaataggcgaaagattaaatataaggggtaggtagtgataaatgtt

SEQ ID NO: 1286 - DNA, 440 bp, Artificial Sequence
  chemically treated genomic DNA (Homo sapiens)
agtatttattattatttattttttgtatttagtttttcgtttattttatgaaagtaagggttttgttttgttgatcgtaatatttcgttttatattaatgtttggaatttagtgggtatttaaagattatttgttaacgaatgaattcgagagtgtaataattagttgaatttttgttaaatattgggttttgtttttgaggatgttataaggatggtaggggcgataggttcgaaaataaatgtattatagttcgatatttgattttacggagatttatttaaggcgttgtagggttttcggggttggaaaattttcgggtgcgttgggttttgggaagaagttcgttgggagttaggagtattagggagtcgggttgagcggtagaagacgcgggtggaggttgtttcgttcgtttggttatttaggatttttttttt

SEQ ID NO: 1287 - DNA, 422 bp, Artificial Sequence
  chemically treated genomic DNA (Homo sapiens)
ttgtattagaaggaattagtggtttattgttattggtaaagtcgaggtagtgggaggattattttttttttgggtttagtaatttttttagtggttagtagatagtagtataatggttagttagtgtgaaattgtgtaaattgttttataaataattcgtaatgtataggtaatagggagaggttatagtttatggataaatgattttttgttatttcggggtattaaattagggataattcggattttattatggggatttattaattattatgggtttttcgtacgtaagtttgttgggatttaggtttgtttggtgttttttgtggtattatgatgggggtaaaatatttttaagtagggttatgagaaagagaatgtaagtatttttaataaattagttaggggtgaattttgtagga

SEQ ID NO: 1288 - DNA, 422 bp, Artificial Sequence
  chemically treated genomic DNA (Homo sapiens)
ttttatagggtttatttttggttggtttgttaaaggtatttatatttttttttttatggttttgtttggaagtgttttgtttttattatgatgttataagaagtattaagtaggtttgagttttagtaggtttgcgtgcgggaaatttatagtagttaatgaatttttatggtgaggttcggattatttttggtttaatatttcgaaatggtagggagttatttatttatgagttatggtttttttttgttgtttgtgtattacgagttatttatgaggtaatttgtatagttttatattggttggttattatgttgttgtttgttaattattaggagggttgttgaatttagagaaaaaatggtttttttattgtttcggttttgttagtgataatgagttattgattttttttagtgtag

SEQ ID NO: 1289 - DNA, 186 bp, Artificial Sequence
  chemically treated genomic DNA (Homo sapiens)
tttttagttttggattgggttaatgaaagttcgaaaaagaaaaaaaaaaaaaattaaattttaatgtagtcggagtgtaaaggtcgttcggttttgtttttcggcgggggaatgcgttgtgttggaggcgcgaataggagtcgtagacggtgagttttatcgttgtaaatgttagggtagtgaagt

SEQ ID NO: 1290 - DNA, 186 bp, Artificial Sequence
  chemically treated genomic DNA (Homo sapiens)
gttttattgttttggtatttgtagcggtgaggtttatcgtttgcggtttttgttcgcgtttttaatatagcgtattttttcgtcgggaaataaagtcgagcggtttttgtatttcggttatattgagatttaattttttttttttttttttttcgggtttttattggtttagtttaaggttgggga

SEQ ID NO: 1291 - DNA, 420 bp, Artificial Sequence
  chemically treated genomic DNA (Homo sapiens)
tagattttttggtagtttttttgtgtagaatagttattcggttttattttttttgtaaggtcggagttgttgttttatttttttgatttatatataataataaaaaaaattatttttgttatgtgtttttttatttttattaagtggttgaaatttaatttgattgttcgagtatttttggttggatttgggttggagtcgatgggattttatgagggttgtaaaagttaagtttttaatatgttttaaataaattggcgtgtaaaggagaaacgttagaagaaggaatatggttgtagacgggaggtttgggaatgttagtcgtagtattggggtataggtggttttaataatgtatataagtttggttgtaagttgtttttataagagtagaagaggttgtagaattatttttaggag

SEQ ID NO: 1292 - DNA, 420 bp, Artificial Sequence
  chemically treated genomic DNA (Homo sapiens)
tttttgagagtggttttgtagttttttttgtttttgtagaagtaatttatagttaaatttgtgtgtattattaaagttatttgtgttttagtattacggttagtatttttaagtttttcgtttgtagttatgtttttttttttaacgttttttttttatacgttaatttgtttgagatatgttaaaagtttgatttttataatttttataaaattttatcgattttaatttaaatttagttagaagtgttcggataattagattgagttttaattatttgatggagataaagaaatatatagtaagaatgattttttttattgttatatatgagttaagggaataaaatagtaatttcggttttgtaagggagatagaatcggatggttgttttgtataaaagggttgttaaagaatttg

SEQ ID NO: 1293 - DNA, 437 bp, Artificial Sequence
  chemically treated genomic DNA (Homo sapiens)
tagtttggttttttatttttgttggtgttttgcgtttttggttttggagtaggttcgagttggaatgttttgtaagaaagggggttttttagagttttttagagtggttttggttttgggtagttaggggtgtggggttttggggaggggggtttcggttgattgatgagaattttaaatgttttttagtttcggttgttaattatttttagattggtcgggttagggttagggtcgtcgtcgtttggttttataaatagttcgtcgttttagatggcggttggttttagtttggcgagtaggtttatgggggattggggggtggtagtaggtggaggatttttattttattagtcgttttagttgttatatttttatatcgttttgagttggggattttgggttagaaggggtggtagaaattgaatttattgttt

SEQ ID NO: 1294 - DNA, 437 bp, Artificial Sequence
  chemically treated genomic DNA (Homo sapiens)
gagtaatgggtttagtttttgttattttttttggtttagggtttttaatttagggcggtgtggaggtgtggtagttgaggcggttagtgaggtgggggttttttatttgttgttattttttagttttttatgaatttgttcgttaggttggagttagtcgttatttggagcgacgggttgtttatggagttaggcggcggcggttttggttttgattcggttaatttggaagtgattagtagtcggggttggggagtatttggagtttttattagttagtcgggatttttttttttaaagttttatatttttggttgtttagagttagggttattttgagggattttgaggagtttttttttttgtagggtattttagttcggatttgttttaaggttaggagcgtagaatattagtagaggtgggagattagattg

SEQ ID NO: 1295 - DNA, 383 bp, Artificial Sequence
  chemically treated genomic DNA (Homo sapiens)
tttttttttttattttggttttatttttttagaattagtttgtttttgttttttgtttttacggttttataaatgagttacgggtttgatttgatttaatttcgttgtaattgttatttttttaagtttgtttttttttattcggttatttacgagattataaaaatttaaataggacggggttttttttagttcggttttttggtttttcgggatttcgggttagggttagtagtttttggagattgaggtggggtttgtggagtttttgtggggagggatttggtgtttttagtaggattgggtatttcgagtttcgggttgtagttttgttgttggatagttttgagagaattgttcgagttttttgatttttttagtat

SEQ ID NO: 1296 - DNA, 383 bp, Artificial Sequence
  chemically treated genomic DNA (Homo sapiens)
atgttggggaaattagaaagttcgaataatttttttaaggttgtttagtaatagagttgtagttcgggattcgggatatttagttttgttggggatattaagtttttttttatagaagttttatagattttattttagtttttaggagttgttgattttggttcggagtttcgggggattaggaggtcgggttggggaaggtttcgttttgtttaggtttttgtggtttcgtgagtaatcgagtggaaaaaaataagtttgaaaagataataattataacgaaattaaattaaattagattcgtgatttatttatggagtcgtaaaaatagaaaataaaaataagttggttttggagaagtgaggttagggtgaggaagggag

SEQ ID NO: 1297 - DNA, 495 bp, Artificial Sequence
  chemically treated genomic DNA (Homo sapiens)
tttaataagtttgatttttagaatagaatttgtagagaaaaagaaagtaagtaaggaaaaaaaaaaaaaaatttttttttattggaaaaaatatatatatatatagattaaaataatatttggtatttacgtcgtatttttaaaattttttaaacgttttataaatattagttaattaattaagtcgtttaaatttggttgtagtcggtggagagagttcgagaggagttaaaaaaaaaatgggggagttagcgttatataattttagattttattgtcgtttgtttggggtgtgattataggttttcggttgtattataagaatagttttgttttaatatgttgtacgtttgatttcgtagttttttttgcgttttttgtttttttattaattgttgatttatagttttttgtggtgttattgataaggataataataattgtaagttaggttgagtttcgggtttcgggtttgtatttttttttggatatgtt

SEQ ID NO: 1298 - DNA, 495 bp, Artificial Sequence
  chemically treated genomic DNA (Homo sapiens)
ggtatatttaggggagggtgtaggttcggagttcgggatttagtttggtttgtagttattattatttttattaataatattataaggggttgtgagttagtagttggtgagggagtaggaggcgtaggagaggttgcggagttaggcgtgtagtatgttggagtagggttatttttgtggtgtagtcggaggtttgtaattatattttaggtaggcgataataaaatttggagttgtgtagcgttggtttttttattttttttttagtttttttcgagttttttttatcgattgtagttagatttaggcggtttaattaattagttagtgtttataaagcgtttgaagaattttaaaagtgcgacgtaagtgttaaatattattttaatttgtgtatgtgtatgttttttttagtagagaggggtttttttttttttttttttgtttgttttttttttttttgtaggttttgttttgagaattaggtttgttaaa

SEQ ID NO: 1299 - DNA, 491 bp, Artificial Sequence
  chemically treated genomic DNA (Homo sapiens)
ttagatttttgagtttatcgattatattgttttaggtttttttttaagtttttttttaaatgtaattagaattgtttgaagaatgcggggaattttagagatatgcgtcgtttttaggtgggtttggagagagggtttttttttgtaattttatttttttttgatggaggggaggggagggggaagggaaggttgtgattttgttattttgggaaaggtttttaaggtagatttttgtttagttttgtgtttttttagtttggttggtgtttgttgggggtggggtagtttttttttaatttgtgttggttgttaagggaggttttattagagttttatttaagaagatgttaattgtgatatttttatatgattaacgatttaggtaatttgtatagcgtgaagcggagagtagttgtttttagtatatttttaagttgtatattttttttagtgtagggcgggggaagaaggtagttttagtttttttt

SEQ ID NO: 1300 - DNA, 491 bp, Artificial Sequence
  chemically treated genomic DNA (Homo sapiens)
ggagaaaattggggttgtttttttttttcgttttgtattgagaggggtgtgtagtttggggatgtgttaagggtagttgtttttcgttttacgttatgtaaattgtttgggtcgttaattatgtaaaaatgttataattagtatttttttaagtgggattttaatgaagttttttttggtagttagtataagttgagaaggagttgttttatttttagtaggtattaattaggttggggaggtatagggttgggtagagatttgttttggaggttttttttagggtggtagggttatagtttttttttttttttttttttttttttattaggaaagggtggggttgtaaggggaaattttttttttagatttatttggaagcggcgtatgtttttgggatttttcgtattttttaggtagttttggttgtatttgaggaagaatttgaggaagaatttgaaatagtgtggtcggtgggtttaagggtttgg

SEQ ID NO: 1301 - DNA, 395 bp, Artificial Sequence
  chemically treated genomic DNA (Homo sapiens)
gtagagtgaatagttttagaaatggattattttgttttattttgtttttatatatgtgggatttagtatgaggttatttagaaataatagaattaggtcgaggttagttaatatagtcggtagttgttattgaatgtttattgggtggttgtaggtttttggttgattacgtttttaagagttggttaatggagttttcgttatagttttggttaagttagtatatttaatagttcgtagtgtaaatgaaaaatatataggtttgattagggagtattttttttttttgttttttttcgtaaagagaggaaagtgattgttttggaagtttttgatattaatagttatgttggtatgtggttgtaagataatttgagttaagatggtgatatgtt

SEQ ID NO: 1302 - DNA, 395 bp, Artificial Sequence
  chemically treated genomic DNA (Homo sapiens)
ggtatattattattttaatttaggttgttttatagttatatgttaatatggttattaatgttagaaatttttagagtaattatttttttttttttacggaaaaagatagaaagggaaaatgttttttagttagatttatgtattttttatttgtattgcgggttgttaaatgtgttagtttaattaagattgtaacgaggattttattaattagtttttagaaacgtggttagttaggagtttgtagttatttagtgggtatttaataatagttatcgattgtattgattggtttcgatttgattttgttgtttttgaatagttttatgttgggttttatatatgtaaagataggatgagatagaatggtttatttttgaagttgtttattttgt

SEQ ID NO: 1303 - DNA, 469 bp, Artificial Sequence
  chemically treated genomic DNA (Homo sapiens)
ggaggaaggttatgttaaatggttgtgatttattgtttatagggaagagtacgtaatatatatttaggagggtttaggtagtcggaattgtggcggttttatatttttaaagtgaattttaaatttgatttatttatgtcgtttttatagtaataggaaaattgtttcgatttatagttacggaagattttgtaaaagaaattgtaggaggaaaaaaagataatgttaggaaaaaaaaaaatttaatgaagtattatttttttatttatttagttaattgagaataatagtttgtgtatttggtaattaaatgggaagtggtatttcgtgttgtaatatgaatttgtttatattaagtgatttatttttttgtttagatatattgtattgagaattttttttaagtagaaagttattaaaaatgtgagaataagtagtttttattaatttgaagtatttggggatttag

SEQ ID NO: 1304 - DNA, 469 bp, Artificial Sequence
  chemically treated genomic DNA (Homo sapiens)
ttaagtttttaaatgttttaggttagtgaggattgtttgtttttatatttttaatagttttttatttgaagaaagtttttagtatagtgtgtttaaataaaaaaataaattatttaatgtgagtaggtttatgttgtaatacgaaatgttattttttatttgattgttaaatgtataaattgttatttttagttgattgaataagtgaaagaatggtattttattaaattttttttttttttggtattatttttttttttttttatagttttttttatagagtttttcgtggttataggtcggaatagtttttttgttgttatgagaacggtataaataagttaagtttaaaatttattttgggggtatggagtcgttatagtttcggttatttaagtttttttgggtgtgtgttgcgtatttttttttataggtagtggattatagttatttaatatggttttttttt

SEQ ID NO: 1305 - DNA, 485 bp, Artificial Sequence
  chemically treated genomic DNA (Homo sapiens)
gaaagttatttttttgattatgtgtttagattttataaaattatagttcgggtttattggttgggtaatattatttgaagtgagtagaataatttaaatttttttattcgtaatataaaaggaaggggttatttgttttagggatgggtacgttttggtgtaatttggtagagtattttagtaattttattagatgttaggttagggtaaaagtggaaatgcgtttgtttagtatattttgggttgattatttggagtgtatgtttttgatttatttgtatataatttatttagggggtgttgtaagagttatgcgatggttaaaggaatttaatgcgttttttattatgttttttaaataagtttttttacgttgattgttttttggaattaagaagttttatttttttagtttcgtgatagattttaaaatgagatttttataaatttgagaataagttttagttttggttttaggattattt

SEQ ID NO: 1306 - DNA, 485 bp, Artificial Sequence
  chemically treated genomic DNA (Homo sapiens)
agatagttttggagttaaagttagaatttgtttttagatttatgaaagttttattttgaagtttgttacggggttggaagaatgaagttttttggttttaagagataattaacgtagagagatttgtttaaaaaatataataaaagacgtattgggtttttttggttatcgtatagtttttgtaatattttttggatgagttatgtgtaaatgaattagaaatatgtattttaagtaattaatttaagatgtattgggtagacgtatttttatttttgttttaatttgatatttgatagagttgttgagatgttttgttaaattgtattagggcgtgtttatttttgagataaataattttttttttttgtgttacgaatggggaggtttgaattattttgtttattttaaatgatgttgtttagttaatgggttcgggttgtggttttgtggagtttggatatatggttaagagggtgattttt

SEQ ID NO: 1307 - DNA, 500 bp, Artificial Sequence
  chemically treated genomic DNA (Homo sapiens)
ttgagaaggtaatgggagagttaagtttaggatattgttgtttagtttggttttatatgaatttaatattttatatttgtggaattttacgaggggttaagttaggttgtacggtgaattttggtttagtcgtgagaattttgggagaaaatgaagtataatagaaatttttatagaaagttgcgggggtatcgtagttagagtagagagttcggaattcgtcggtttgaattaggatttagttaagtttattttattaaaatttatgaagttaatagttttttttatttggtttttgaaggaatatttttattgtgtaattattttcgtggaaattgtaatattgtgtttgttattatatagtattaatattaaatggttaggtgataaaagttaaggatattaagttaaaagtttatgttgtatttttattgtatattataggttataaattgagagtgtgttttttattattttaaagtttttggggttggattttt

SEQ ID NO: 1308 - DNA, 500 bp, Artificial Sequence
  chemically treated genomic DNA (Homo sapiens)
aaagatttagttttaggaattttaaagtagtggagggtatatttttaatttgtagtttgtagtgtgtaataagaatgtagtatgagtttttagtttgatgtttttggtttttgttatttggttatttagtattaatattgtataatagtagatatagtattgtagtttttacggaagtgattatataatgggagtgtttttttagaagttaagtaaagggggttgttagttttatgagttttgatgaaatagatttagttaagttttaatttaggtcgacggatttcgggttttttgttttgattgcgatattttcgtagttttttatgggaatttttgttgtgttttatttttttttagggtttttacggttaagttaggatttatcgtgtagtttgatttggtttttcgtaaaattttataagtgtgaaatattaaatttatgtgggattagattggataatagtgttttgaatttggtttttttattgtttttttag

SEQ ID NO: 1309 - DNA, 419 bp, Artificial Sequence
  chemically treated genomic DNA (Homo sapiens)
tttaagagtatggattgttttgtattttttaggagtattattgtaaagtcgatttattattttttttatttgtttcgtattatcgtgttggggtttattaacgttttgttatcgggtgttttgtgcgtaagtagaagtgtgttaagaattaatcgttttgatttttattttttgttggtgttttgttattcgtgggttgtttggtttgatatatgaattattttttagttgtttggtgttggggaggtatagttattagtttttaaatattttagatatatgttaattgtaattttaatatatattttttttttatcgttattttggaattgttttattggtaatgtatgaaatatgaataagaggaaataattgataaggtattattgttgattaaggggttaatttttgaggaagat

SEQ ID NO: 1310 - DNA, 419 bp, Artificial Sequence
  chemically treated genomic DNA (Homo sapiens)
attttttttaaaggttagttttttagttaatagtggtgttttgttaattatttttttttgtttatattttatgtattgttaatggaatagttttagggtgacggtagaaaaaaaatgtgtgttgaaattgtaattggtatatgtttgaaatatttgggggttggtgattgtgtttttttagtattaggtagttggagagtaatttatatgttaagttaagtagtttacgaatgataaaatattaatagggaataaaggttagagcgattgatttttaatatatttttatttacgtatagagtattcgatgatagggcgttaatgagttttagtacggtgatgcggaataaatgaaaaaagtaatgaatcgattttgtaatagtgtttttggaagatatagaataatttatgtttttaga

SEQ ID NO: 1311 - DNA, 353 bp, Artificial Sequence
  chemically treated genomic DNA (Homo sapiens)
ttggtaattttaggagtatggaagaaagattttaaataagtttttgattatgtatttttttttaaatttttttgaatgttgaagaaatgttaaattttattaagttttatagttagatttaatatagatataaatttttttaatgttcgttttagttaaaagtgagcggaatattatcgttaaattagtgtatgtgggagaattatttgaggaaaattaaaataggtatagttgggaatattaagtcgtggttatattagacgtaagtaggcgtaatagtaaaattttttaggttttaatggattgggttattttgttttttagtttttatatagatgagttttgttttgggg

SEQ ID NO: 1312 - DNA, 353 bp, Artificial Sequence
  chemically treated genomic DNA (Homo sapiens)
ttttagaataaagtttatttgtatggaaattgagaagtaaaatagtttagtttattagagtttaaagaattttgttattgcgtttatttgcgtttaatatggttacggtttaatgtttttaattgtgtttattttgattttttttaagtaatttttttatatgtattggtttaacgataatgtttcgtttatttttgattgaaacgaatattaaagggatttatgtttatattaaatttggttgtaaaatttaatgaaatttaatatttttttagtatttaaaaaaatttagaaaaagatatatagttagaaatttgtttgaaattttttttttatatttttaaggttgttag

SEQ ID NO: 1313 - DNA, 486 bp, Artificial Sequence
  chemically treated genomic DNA (Homo sapiens)
ttaagtaggttataataaggtggtaattgattttgtttttcgaggatgtttgttcgggttttgttagaagttaagggttttttgatgtggggtttcggttttatattgtggtattttgaataattttttatgggttggtaaaaggcgttttatattttagataggttttaggaggatgatttgttttttttaaggagaattgagaatttttagatgattggaaggttttgtatttttattttagtattttcgatagatttttttatatgtggtaaatatagttatagttggaggtttattgtcggttgttaataggtagtgaattgttgttgaattagatagtttacgtatagggtatttttattattatagaaagttttgttggttagagtatttaaagtatattcggtttttttttttagttattttgtttattttttgtttgtatttttttttggtatttgtgttgttgttattttagtttta

SEQ ID NO: 1314 - DNA, 486 bp, Artificial Sequence
  chemically treated genomic DNA (Homo sapiens)
tggaattggggtggtagtagtataaatattaaggaggaatgtaagtaagagataaatagggtggttagggggagaggtcgaatatgttttagatgttttgattaatagaattttttgtgatgatggaaatgttttatacgtggattgtttgatttagtaatagtttattgtttgttaataatcgataatggatttttagttatgattgtgtttgttatatgtgggagaatttatcggaggtgttaaaatgagagtatagaattttttaattatttgagaatttttagttttttttgaagaaagtaaattatttttttggggtttatttgaagtgtgaaacgttttttgttagtttataaagaattgtttagagtgttatagtgtgaaatcgaaattttatattagggagtttttggtttttagtagaattcgaatagatattttcggggagtaaggttaattgttattttgttgtgatttgtttgg

SEQ ID NO: 1315 - DNA, 457 bp, Artificial Sequence
  chemically treated genomic DNA (Homo sapiens)
attggaaagggagttaggtttgagttatttttttttgtagttagtgtgtagtggaagtggttcgtgggtgttttatatttggattggagagtaaagtataattttagcgttaagggaagttttttatgtttttggaatagtgttttatatttttttgaaaaggtaataaaatatgtgtattcgttgattaggaataaatgttaaagcgtttattatgatggaagtgttcgatttttatggttttgataagtcgttataggattttatgaatttttaatggttggtttatatttaggggtttttagtttttgagggtggtaaaaggtttatagagatgttatttttttagtatattggtttttgttaagatcggtgtttatttaaagtatttttcgtttttcgaatgtatagagattttgttgataataagaaatttttttgggtttgaaattagatg

SEQ ID NO: 1316 - DNA, 457 bp, Artificial Sequence
  chemically treated genomic DNA (Homo sapiens)
tatttaattttaggtttaagaaagttttttgttgttagtagaatttttgtatattcgaaagacgagaggtgttttaaatagatatcggttttggtagaagttagtgtgttaggagaatagtatttttgtggattttttattatttttagaaattgaaagtttttaaatataggttagttattaaagatttatgagattttgtggcgatttattagagttatggaaatcggatatttttattatggtggacgttttgatatttgtttttaattagcgaatgtatatattttattatttttttagggaagtatggggtattattttagaagtataagaggttttttttagcgttgggattatgttttgttttttaatttaaatatggaatatttacgagttatttttattgtatattggttgtaaaaagaggtggtttagatttgattttttttttagt

SEQ ID NO: 1317 - DNA, 431 bp, Artificial Sequence
  chemically treated genomic DNA (Homo sapiens)
ttttttttgttatatgaatagagtagtagttgttgatttaagagcgtcgggaaaagggtgattgttttttatttggtatagatatttttgaggataagattattgagttaataatcgattttatttttttgtaggttttttcgtagtttattcgtgagggtaggaggaagggcgggtgttttggatttatttatagtttttgtttttttaaataattgtgagtaaggaggatagaaggcggtaaacggagttagtgagatagtttaaatgtcgtttgggtgttgtattatttagatataaaatattaattttaaatgttaggttgttttgtgtttgtggatgtttcgaaattttttttttattttgtgttgatttagttcgaatattgatttagtttttaattcgtgttttttttttttttgtagtttttg

SEQ ID NO: 1318 - DNA, 431 bp, Artificial Sequence
  chemically treated genomic DNA (Homo sapiens)
taggggttgtagaagaagagagaatacggattaaaggttgagttagtattcgggttaggttagtatagggtggaaagagggtttcggggtatttatagatatagaatagtttggtatttagggttgatattttatgtttaagtgatgtaatatttaggcggtatttgagttgttttattgatttcgtttgtcgttttttgttttttttatttataattatttaaggaaatagggattgtaaatgagtttagagtattcgtttttttttttgtttttacgaatgagttgcgggagagtttgtaggggagtgaaatcgattattaatttagtagttttgtttttaggggtgtttatgttaagtgaaagataattatttttttttcggcgtttttgagttagtagttgttgttttatttatgtgataggaggga

SEQ ID NO: 1319 - DNA, 402 bp, Artificial Sequence
  chemically treated genomic DNA (Homo sapiens)
tgatgggaatataataggttgtagaattggagaacgttaaatttttgtttttaatggtaaaatatgttttttttatttttattagaatgtgtgatttatgttatttgaaattaaattttaaatataatgagttattagtgtaatagtttattattaatagcggttttataaataatatatttttattatatatatgtagttcgttgtgaagttagtaaaaggtattttaggttatcgaagttttgttgcgttagcgcggttgtagattagaaggatatttttatgtgaattaagatggatgttaattttttttgtcgagagttaggttggtcgtttttttttgtatatatggtagatggattggttaattagcgtttgttgagttttgggtttgaaattata

SEQ ID NO: 1320 - DNA, 402 bp, Artificial Sequence
  chemically treated genomic DNA (Homo sapiens)
tgtaattttaggtttaagatttagtagacgttgattaattaatttatttattatatgtgtagaaagagacggttagtttgattttcggtagggaaaattggtatttattttggtttatatggagatgtttttttaatttatagtcgcgttggcgtaataaaatttcgatggtttgaaatattttttgttggttttatagcgagttgtatgtgtatgataagaatgtattatttataagatcgttgttagtaatgagttattatattaatggtttattgtgtttggaatttgattttaaatggtatggattatatattttgatgaaaatgagaaaaatatgttttgttattaggaataaagatttaacgttttttaattttataatttgttatatttttatta

SEQ ID NO: 1321 - DNA, 471 bp, Artificial Sequence
  chemically treated genomic DNA (Homo sapiens)
gtaatttttagtttttttaggagaataatttgaaatgaaaatgaagattatatatattattaagttgaaaaatataatgttattttttttgagggatggtttaatatgttaatgtttaatttaagaattttaaaaacgtttttttattagtaattttaaaataaaaataagtcgttatataaagtatggttaaaatattattaaaggtatgataaggatcgaaattgtagttaatttagtatatagtatatagattattggattgttttagttttttttatgattaatattaattgatatggttgaattgattttgtagtaaggtgttttaattgttgaaatttattacgtgggtcgtgttttagagtttcggttttttcgtggatatgtttgtaattttgtaggattgattttattagtatagttagaggtttggtaagtgttcgatattaggtaaggttggattttata

SEQ ID NO: 1322 - DNA, 471 bp, Artificial Sequence
  chemically treated genomic DNA (Homo sapiens)
tatggaatttagttttgtttggtgtcgggtatttgttaagtttttgattgtgttaatggggttaattttgtagaattgtaggtatgtttacgaagaggtcgggattttggagtacggtttacgtgatgagttttaataattggagtattttgttgtagaattaatttagttatgttaattggtattgattatgggaagagttggaataatttaatgatttgtgtgttgtgtattaaattggttgtagtttcgatttttgttatatttttagtggtattttagttatgttttatgtagcgatttgtttttgttttagaattattaatagaagggcgtttttaaagtttttaaattaaatattagtatattaagttattttttaagaggaatgatattgtgttttttagtttgatagtatgtataatttttatttttattttaagttgtttttttgaaggagttgaaagttat

SEQ ID NO: 1323 - DNA, 499 bp, Artificial Sequence
  chemically treated genomic DNA (Homo sapiens)
gataagtgaaaaaggaaggaaggaagaaaaaaaaatatgaattatgttttttttaggttaatgtttaagtttgttttaattacgttttttgatatattttaaggtttatattagttaaggtaaatattttaagggatcgagtagatggatgttgtagtttagaaagtgtgtggtaaatttaggatttaagagtggaataaaagatttattttttttataattaagtttttgattaatgttttaggttttttagtatatatttgtaattatttatagaggtatttattgtgttgggatttgtttcggaatattaggtattaagttattcggtagtagatggaagtatatttttgttgatatatgttgtaatgaaaggattcgtgtaaatttggttagtaaggtagtagaatgttatgtatttgaagattaataatgtaaataattatgatgttaattttgttatgtttgtgttaattttatttgttgagatgtggaatta

SEQ ID NO: 1324 - DNA, 499 bp, Artificial Sequence
  chemically treated genomic DNA (Homo sapiens)
tagttttatattttaatagatggaattaatataagtataataaagttaatattatggttgtttgtattattaatttttaaatgtatggtattttgttattttgttagttaggtttgtacgaatttttttattgtaatatatgttaatagaaatgtgtttttatttgttgtcggatagtttgatgtttgatatttcgagataagttttagtataatgagtatttttgtgagtaattataggtgtgtgttgaggagtttagggtattaattagaggtttaattatgaaaaaggtggattttttgttttatttttggattttgagtttattatatattttttaaattgtagtatttatttgttcggttttttagaatgtttgttttgattgatatggattttaaagtgtattaaaggacgtgattaaagtaggtttaaatattaatttggaagaagtatggtttatgttttttttttttttttttttttttttttatttatt

SEQ ID NO: 1325 - DNA, 400 bp, Artificial Sequence
  chemically treated genomic DNA (Homo sapiens)
ggtttttttattttttggattttagttaattattttaacggaatttgttattatgagtaagaaggttggaaagagagggtaaaataatagatggttagtttattttattttgttatttacgtaagatagcgttttgaggagatatagcgtttgtgtgaagtcgttaaagatagtattgggggagggtaaatgggggggttaaagagggaattatatgattagttagttaaattatggttatatgtttgttttcgttgtttttttatattgaagtggaataattcgaagattgtatttttgtgataatattttaaaattaggaataattacgtggtatttaaagaagagtcgttgtatatttttaatagtgggatatttataaaatgttttatttattttt

SEQ ID NO: 1326 - DNA, 400 bp, Artificial Sequence
  chemically treated genomic DNA (Homo sapiens)
agaaatgagtggggtattttgtggatgttttattattgagaatatgtagcggtttttttttgagtattacgtggttatttttaattttaaaatgttattataaagatatagttttcgagttgttttattttagtgtggagaagtaacggaagtaggtatatggttataatttggttgattggttatatagttttttttttaatttttttatttatttttttttagtgttgtttttggcgattttatataggcgttgtgtttttttagggcgttgttttacgtgggtggtagggtagggtaggttagttatttgttattttgttttttttttttaatttttttgtttatagtagtaggtttcgttgaagtgattggttgaggtttagggggtgagggagtt

SEQ ID NO: 1327 - DNA, 490 bp, Artificial Sequence
  chemically treated genomic DNA (Homo sapiens)
ggaagaggatgggagttattatattgatttttaaaaggggataagagatttatatttatatttttaagtttattatagattattaattacgatgtaatttgttataatagggggattttttttgaagagatggtgttaaaatttgattatgaggtttttttatgtgaagagagaaaagggggtgtttggggattatttacgagaatttggggagggttttaattgtataaattagttgtgggttatagaatgtttgtttagtttattagtatttgttgtttatagtgattatttatttaatagattggtcgtgaataagatgatgggattagcgggtttatgttttagagagttttgtttattattaatatgagttacgttttgtttaggaattattttttttgttgaagaaatattgcgatgtaatatgataaatacgtttttattacgagtgtagatttgtttagaaagatttgtattaaggtggttg

SEQ ID NO: 1328 - DNA, 490 bp, Artificial Sequence
  chemically treated genomic DNA (Homo sapiens)
tagttattttaatgtagatttttttagataaatttatattcgtgatggggacgtgtttattatattatatcgtagtgtttttttaataagaggaatggtttttgaataggacgtagtttatgttaatgatgagtaaagttttttggggtatgaattcgttgattttattattttgtttacggttagtttgttggatgaatggttattgtaagtagtaggtgttaatgagttgagtaagtattttgtggtttatagttagtttgtgtagttggagttttttttagattttcgtggataatttttagatatttttttttttttttttatatggaaaagttttatgattaaattttggtattatttttttaaagggaatttttttgttgtagtaggttgtatcgtggttggtaatttgtggtaagtttgggagtatgaatgtgggttttttgtttttttttgagagttagtgtggtaatttttattttttttt

SEQ ID NO: 1329 - DNA, 475 bp, Artificial Sequence
  chemically treated genomic DNA (Homo sapiens)
tggggtaatttataggagagtgaaggcgttttagtttttaaggatttttgagaggttatgtagtttatgttttcgttttttaatatttaatagaggggaattatattttttttatttttttttagatatgaagagatttttcgttttttttagattttttgttttttataatttttggttgtggggaattttttttaaggtatagattggattttttttgttgtagtttttgatttggttttttttattttgttttttgtggttagagaaagtttttttttgggtgattatagcggttttttaggattttttttttaatatttttttatcgttagttggttttttttagaaggtaagtttaattttttttattgtagtttttagtatttttttcgttgtcgtattttacgtttttaaggtagaaatgtatttttttttttattaaataattaatagagataagggagaagaaggg

SEQ ID NO: 1330 - DNA, 475 bp, Artificial Sequence
  chemically treated genomic DNA (Homo sapiens)
tttttttttttttttgtttttgttaattatttggtgaggaagggggtgtatttttgttttggaggcgtaggatgcgataacggagaggatgttagggattgtagtagaagggattgggtttattttttgggaagaattaattaacgatgaaggaatgttgaaggggagattttaaggaatcgttgtgattatttagaagagggttttttttagttatagaggataggataggagaaattaagttagagattgtagtaagagggatttaatttgtgttttaagagaagttttttatagttagggattgtgagaagtagagggtttgggagaagcggagaatttttttatgtttagggaggggtaaagagaatatgatttttttttgttgggtgttgggagacggaggtatggattgtatgattttttaaaagtttttggggattagaacgtttttatttttttgtggattatttta

SEQ ID NO: 1331 - DNA, 498 bp, Artificial Sequence
  chemically treated genomic DNA (Homo sapiens)
tttttaagtttggggtgaaagagaagcgtaagaaggtagtatcgttttagacggtgttttagttgtataaggtaaggttttatttgggagatagatttttttttttggtagtttttagtttcgttttttattttttgttttgttttttgtgttttgggcgggcggttgttaagatttgtagtgatgtttaatttttttttacgtgaatattatagtaagtttgtgttgtttttcgtttttacgttgtttgggtagggtttgtggggaaggggtgggagttttggggttttgggagggacggggatttggtagggaagtgaagattttggtggtggtgatgggagatagcgaagggttttttattattagaatgagagtgaaagagtaaaagtgtagggtatttagggttttgttttcgtttcggttttgattattgcggtatttaattttggttttttgttttttttgtgttttttttttatttttttttattgttag

SEQ ID NO: 1332 - DNA, 498 bp, Artificial Sequence
  chemically treated genomic DNA (Homo sapiens)
ttggtagtggggaagagtgagggaaaggtataaagggggtagagaattagaattggatgtcgtagtggttaggatcgagacgggagtagggttttaagtgttttgtatttttgtttttttatttttattttggtgatgggagatttttcgttgttttttattattattattaaagtttttatttttttgttaaattttcgttttttttagagttttagggtttttattttttttttataaattttgtttaggtagcgtagggacgggaagtagtatagatttgttgtgatgtttacgtggagaggagttaaatattattgtaagttttaatagtcgttcgtttaaggtataggggatagggtagggggtgaaggacggggttggaggttgttaagagggagggtttgttttttagatggggttttattttgtgtagttgggatatcgtttggaacgatgttgtttttttacgttttttttttattttagatttggggg

SEQ ID NO: 1333 - DNA, 282 bp, Artificial Sequence
  chemically treated genomic DNA (Homo sapiens)
ggggaaggaaagagtgttaaggaaaggtttgagaaaatgatatttatgaaatgttcgggaattatttgggggttgtaatgatgatttttttttttacgtttaatatacgggataaattcgaggtttatagaggttaaaataaatacgatagggttttttagacgtgtagacgtggcgtaaagaagggaggatttagaaattgggtttagggttcgtatacgttattagtgtttatagtagtttagtttcgttcggtttttgataagggatattaagttagtt

SEQ ID NO: 1334 - DNA, 282 bp, Artificial Sequence
  chemically treated genomic DNA (Homo sapiens)
agttggtttgatgttttttgttaggggtcgagcggggttgggttgttgtggatattgatggcgtgtacgaattttgggtttagtttttggatttttttttttttgcgttacgtttatacgtttgggggattttgtcgtgtttgttttagtttttgtgggtttcgagtttatttcgtgtattgggcgtgggggagggggttattattgtagtttttaaatggttttcgagtattttataaatgttatttttttaggtttttttttgatatttttttttttttt

SEQ ID NO: 1335 - DNA, 452 bp, Artificial Sequence
  chemically treated genomic DNA (Homo sapiens)
ttgttttttattgtaggtttttttaggtatatagaggagttcgataaattttataaatttttgtattggtatattggggatatagagatcggtattataatttttttgtttttaagttgtttataggtttttacgagagtttgatttatgtttagagaattattgaagttaatggttattttaggtagggagataaaagttatagagggtttagttggcgaggggagttcggtaggagttgtttaagtagaaggttgtgtttatatatatagacgatttttttgtttagtttggtttagtgtggggagatgggaatatttaggcgttattgtttggttgttttgtgaagttgcggattaattagtgatgtagcggttggtttagtcgtttggtttttgtagatggatggatgaagagaggattgaaaagatagtagagtagtgttagttttt

SEQ ID NO: 1336 - DNA, 452 bp, Artificial Sequence
  chemically treated genomic DNA (Homo sapiens)
agaagttggtattgttttgttgtttttttagttttttttttatttatttatttgtagggattagacggttagattagtcgttgtattattggttaattcgtaattttataaggtagttaggtagtgacgtttgaatgtttttatttttttatattaggttaggttgggtagagaagtcgtttgtgtatgtaaatatagttttttgtttaggtagtttttgtcggatttttttcgttaattgggttttttgtggtttttatttttttgtttaaaataattattggttttagtggttttttgggtatgaattagattttcgtagaagtttgtgagtagtttgaggatagggaagttatggtatcgatttttgtatttttagtgtgttagtataaaggtttgtgggatttgtcgaatttttttgtgtatttggagggatttatagtaggaagtaa

SEQ ID NO: 1337 - DNA, 498 bp, Artificial Sequence
  chemically treated genomic DNA (Homo sapiens)
ggtagttgttttttttttattgcgaatatggaaaggtattggttacgaggggttaatggggttgttgtgtgtataaggtttgttttagggagggtaaaagatattgttttgggatttaggaagttgtttttgaatcggtttttttacgatattattttttaggttgtgggatcgttaggttgggcggaagtggattttagttaaggggatgtttttagatgttatgtttttaaattggattcgtttagaaaggtaggtagagataggtttgcgttcgggaaagttttgggtaacgatttaggatggtatttaggttttttttgggtaggggatggttataggtttttttggcggcggtgtttattaatttcgttttaagaaggagagtttgggcgtggaggttttgggtagttgaaggtagagatttattttttttttggttatttatttttattttagtaacgttttttagaacgttttaaagtttttttaagtttt

SEQ ID NO: 1338 - DNA, 498 bp, Artificial Sequence
  chemically treated genomic DNA (Homo sapiens)
gggatttgagaaagttttggagcgttttgggaggcgttgttgaggtgggggtgggtagttagggaagggatggatttttgtttttagttgtttagaatttttacgtttaggtttttttttttgggacgggattgatagatatcgtcgttagggaaatttgtggttattttttgtttaggaaaggtttgaatgttattttgagtcgttatttagggttttttcgggcgtaggtttgtttttgtttgtttttttgggcgggtttagtttgaaagtatgatatttgggaatatttttttggttggagtttattttcgtttagtttaacggttttatagtttggaggatgatgtcgtgggagaatcggtttagaggtagttttttaaattttaggatagtgttttttgttttttttggggtagattttgtgtatataatagttttattggtttttcgtggttagtgtttttttatgttcgtagtgagaggagggtaattgtt

SEQ ID NO: 1339 - DNA, 500 bp, Artificial Sequence
  chemically treated genomic DNA (Homo sapiens)
gagtttatattttttttttattttgttgtagtttataggtagttttgtttaatttttaacgtacgtttttatggtttttaggtaaattataggagatggtatcggtttttttaggagtgatttagtaatgtttaggttttaaggtagatttgtttatgttgttaggttgggttagtttggaggttgttttggtatgagtacgtaggtagatagatgttgacgtcgttttaaagaatcgtttttttaggtgttgagggcggtttttttgatgtttattttgtgttattgtttatttttataaggcgtttagttgttgcggtgatgatatttatattaataagtgttttatttatttgtcggttttagggaatgtttgttagttgcgtatggtagttaattttagggtatttttgagtttgatgtttttgtatttagagaattagtttttaaattttgtattaatatttgggtttgaaagattttttatttatttaggattt

SEQ ID NO: 1340 - DNA, 500 bp, Artificial Sequence
  chemically treated genomic DNA (Homo sapiens)
gggttttgggtgaatgaagaattttttaggtttagatgttggtatagagtttgagaattgattttttaaatgtaaaaatattaggtttagaagtattttgaggttggttgttatacgtagttggtaagtattttttgaaatcggtagatgaatagagtatttattgatataaatattattatcgtagtagttgggcgttttatgaaaataaataatgatataggatgagtattagaaaagtcgtttttagtatttggaggggcggttttttgaagcggcgttagtatttgtttgtttgcgtgtttatgttaaggtagtttttaagttagtttagtttggtaatatggataggtttgttttaggatttgagtattgttaggttatttttgagaggatcgatgttattttttgtggtttgtttgggaattataagagcgtacgttggggattgggtagggttatttgtaagttgtagtaaaataagaagagggtgtaagttt

SEQ ID NO: 1341 - DNA, 477 bp, Artificial Sequence
  chemically treated genomic DNA (Homo sapiens)
ttttttagttaggtattaaagcgttgcgaggataaggatgttaggagttatttatgagatttgggtagtagcggttttgagtttttaaggtttttttttaatatgtagatggtgaagtgatttttttttgtaattttgttatatttttaggtattaatttttagaataattttgttttttttttttttgttgtgagtatttgtaatagtttgattttttagaaatttttatagagagtaaaagtgttttaaatagttggagatggagttgtgcgtatgtattgtttgttttagatagaaattaaacgttttgagaaaaattaaacgttattaagacgtgaagtgagttttgatatgattaaggtgagtgtaatttagtttttaatattttatattatacgttttattttatttgattatttttttaattgtattttttatttattgattttttaggtttgtgggaatgtttttattt

SEQ ID NO: 1342 - DNA, 477 bp, Artificial Sequence
  chemically treated genomic DNA (Homo sapiens)
gggtggaggtatttttatagatttggagggttagtgaatagaaaatgtagttaaaagggtgattaggtggggtgagacgtgtggtgtaaagtgttggaggttaggttatatttattttaattatattaaggtttattttacgttttagtaacgtttggttttttttaaaacgtttgatttttatttagagtagatagtatatgcgtatagttttatttttagttatttgaaatatttttattttttgtaggaatttttagggagttaaattgttataagtgtttatagtagggaaaagaaagatagaattgttttggagattgatgtttgaggatgtggtagaattataggaaggggttattttattatttatatgttgaaggagagttttggaagtttagggtcgttgttgtttaggttttatggatggtttttggtatttttgttttcgtagcgttttgatgtttggttggaagg

SEQ ID NO: 1343 - DNA, 439 bp, Artificial Sequence
  chemically treated genomic DNA (Homo sapiens)
gttggtatgaattatgaagttgttttatattaattatttttatcgtttttattttttgttgtttttttcgatataggttttgggttttttgttgggaaaaggtaggtcgaattggagttggttggggagtttattagtatttcgttagagtcgagggttgtttgttttttaggaggtattttgaattttttttttagttatttttttgtaattaatatgttgtttttgtagttgttttatttattgtttttgtagttatcggaggttataggtttttaagaagaattgttggggtttattaatatatatatttttattttataggaagtagtattttatggtttgtatattggttttttgggtttataatatagtagggtttagatttggggagaagtaggtacgagggatgtattgggagtagggaggaaggttttgg

SEQ ID NO: 1344 - DNA, 439 bp, Artificial Sequence
  chemically treated genomic DNA (Homo sapiens)
ttaaggtttttttttttatttttagtatatttttcgtgtttgtttttttttagatttggattttgttgtgttatgagtttagaggattaatgtgtaaattatggaatgttgttttttgtgaagtgaagatgtgtatgttgataaattttaatagttttttttagaagtttgtagttttcgatggttgtaagggtagtggatggagtaattgtaaaagtagtatattgattgtaaggaagtaattgaagggagagtttaaaatgttttttggaaggtaggtagttttcggttttggcgaggtgttaatgagttttttagttagttttagttcgatttgtttttttttagtaaaagatttagggtttatgtcgagaagggtagtaggaagtgggggcgatggagatgattaatgtagagtagttttatggtttatattagt

SEQ ID NO: 1345 - DNA, 500 bp, Artificial Sequence
  chemically treated genomic DNA (Homo sapiens)
tatttttatttatattttttagcgtatatttttttttttttgtttatttttttaatttttttgtaagtattattttgttttgtttgtcggttgttagttttttttttcgagtttttgcggagttgttagatttttgattatttttttatttttagtttataattgtttttttttggagtttagcgattgttaagtggtttttgtgaaattttattaggataatttttttgtttgtgtttttttttagttgggttgtttttagaaattttagttgtttttttatttataatcggtaaattataggttggtttttgagttatttaatatcgtatttatttataaatatgtttagatgagttttgaatttgtcgaattttgtagtttataagtaagagttaaatttattggagatttaatttatatgtttttttttgtagaaggtgttttttgtttatgcgggatttttattttttttataattttaggaatgatatttgttt

SEQ ID NO: 1346 - DNA, 500 bp, Artificial Sequence
  chemically treated genomic DNA (Homo sapiens)
gggtaggtgttatttttgggattgtagagggaataggggtttcgtataaataggagatattttttgtaggagaagatatatgagttgaatttttagtgaatttaatttttgtttgtgggttataagattcgataggtttagagtttatttaagtatgtttgtgaataagtacgatgttggatgatttaggagttagtttatgatttgtcgattgtgagtaggaagatagttgaggtttttagaggtagtttagttgagaggagatatagatagggagattattttaataggattttataaagattatttagtagtcgttgagttttagggaaaaatagttatgagttgagggtggggaaatagttaagaatttggtaatttcgtagaagttcggagagaaaagttgatagtcgatagatagaataagatgatgtttgtaaaaaggttaaaagaatagataagagagaaaaaatgtacgttgagagatatggatggaaatg

SEQ ID NO: 1347 - DNA, 473 bp, Artificial Sequence
  chemically treated genomic DNA (Homo sapiens)
tttgatttgttttagtgggatttttttgcgtttttgttttagttgtagaggatttattaggtatttagagagaaatgagtggtgttgtgaatattcgattgtgtttatgtggaatttatatatatagtttgtttgaaaatgattgataggatggaaattgataagttattattcgtttcgggtattagcgatgattggttaatatgaatattgtgttgattttcgttagatagaagaagatgttatttgtcgttaatggggtgttatacgtatatttgtttaaaggaaaatgtttttttggtgattgtttttaatttttattttattttatagttataaaaaagaaaagatttagtagaaaggatgaatttatttaggggtaggatggaaaggtattttttttatttatttttttttttttttattagaataattaaaatttagtgaaaatgttggtgtaagttagaagaggg

SEQ ID NO: 1348 - DNA, 473 bp, Artificial Sequence
  chemically treated genomic DNA (Homo sapiens)
tttttttttgatttgtattagtatttttattgggttttggttgttttggtaaagaaagaaggaaataaatgagaagaatgtttttttattttatttttaggtggatttattttttttgttgaatttttttttttttatggttataaaatgaggtgaaaattgagaataattattaaaagagtatttttttttaggtaagtgtacgtgtgatattttattaacgataagtgatatttttttttatttagcggaaattaatataatatttatgttaattagttatcgttggtgttcgaagcggatgatgatttgttagtttttattttattagttatttttaggtaaattgtgtgtgtggattttatatggatatagtcgaatgtttataatattatttatttttttttaagtgtttgatgggttttttataattagagtagagacgtaggagggttttattggggtagattaga

SEQ ID NO: 1349 - DNA, 408 bp, Artificial Sequence
  chemically treated genomic DNA (Homo sapiens)
ttttttttattgggtttttggggagaggtaggtggaatttgatttttatgtatttttttttatttttatagagggagaatgttggattttcggaagggagcggggttaggttataaggaaggtagtggttaggaattattttttttcggggagtggggagaatgttgaacgtttggtattcgtgggggtggaaagttagagaggttaagtgttgtttagagatgattttatgattcgggaattaggagttgtcgggttgttggtgttggaatttaagttttcgtatatagttcgtgtttgtggttttggtttggtagagtaggaggaaggttttttatggttgtttaagtgtttatatttaagggtagggtttttgtgtttttatttttattttttgtggtaaatttt

SEQ ID NO: 1350 - DNA, 408 bp, Artificial Sequence
  chemically treated genomic DNA (Homo sapiens)
gggatttgttataggagatggaggtaggagtatagggattttgtttttaggtataggtatttgggtagttatgaggagttttttttttgttttgttaaattaaagttataggtacgggttatgtgcgggggtttgaattttagtattagtagttcggtagtttttgattttcgagttatgaagttatttttgagtagtatttaatttttttggttttttatttttacgggtgttaagcgtttagtattttttttatttttcgggagagagtgatttttggttattgttttttttgtggtttgatttcgttttttttcgggaatttagtattttttttttgtgggggtggaagagggtgtatgagggttaggttttatttgtttttttttagaagtttagtggggagag

SEQ ID NO: 1351 - DNA, 498 bp, Artificial Sequence
  chemically treated genomic DNA (Homo sapiens)
aagtttttttttgttttagtttagtaattaagttgggtattgtttcgattatcggtggagatagttaggagggggttggtttttttagggttttagagatagaggtgtattgaagttggagtttgtaatttaggtagtagattcgaaatttttgttggattcgagggttagggaggttttcgggatgtaaataaattttttgtgtttttagagtagagtagagagtttacgttgtagttttattttagttgattagattagttttgggtgttggttttttgtttttttttagttttttttatcgatttttaaggaagttattttttagattaggttagtttgttttatagacggtttcggtagggtttttttaaggtaaggagtatttttattttgggtagtcgggttagttatgtgttatatttgtttttacgtttagaggttagagtgatatcgttagttttcgtaggtttggttattgattgttgggttttatta

SEQ ID NO: 1352 - DNA, 498 bp, Artificial Sequence
  chemically treated genomic DNA (Homo sapiens)
tggtgaagtttagtagttagtggttaggtttgcggggattggcggtgttattttagtttttgggcgtgggggtagatgtggtatatggttggttcggttatttagagtggggatattttttgttttggagaagttttgtcggagtcgtttgtgggatagattgatttggtttggaggatggtttttttgggggtcggtgagggaggttgggaagaggtaggaagttagtatttagggttgatttaattagttgagataaggttgtagcgtgggttttttattttgttttgagaatataggaggtttgtttatatttcgagagtttttttagttttcggatttagtagggatttcggatttgttgtttagattataagttttaattttaatgtatttttgtttttgaggttttgagggagttagtttttttttggttgtttttatcggtaatcggagtaatgtttagtttggttattgggttgggatagagggaggttt

SEQ ID NO: 1353 - DNA, 452 bp, Artificial Sequence
  chemically treated genomic DNA (Homo sapiens)
aaatgttgggaggttgttttgagggtgggtgtcgtgagaaggttcggggagaggtgggttagggttgttaatgggggtagggtcgcggaaggagttgtttgtgtggggttttggcgataatcgcggggtttagcggtttttgtgggtgttgataggagtttggcggtgagtgatggaggaggcggttgtaaaataggttatcgtcgggcgttcggggtttattttgcggatggtgttgttgttaagttatttttagaattcgataaggacggatgtttcgagcggttttttggggtggggggaattaggaagtagtgaattaattgaaatcgtggtgaagttttttttttttgaagagtgagagagcgtggtatgagagtgtgtgtttgtatttatatgtgtttatataagtattcgtatatacgagggatttagttggaaaggggataggt

SEQ ID NO: 1354 - DNA, 452 bp, Artificial Sequence
  chemically treated genomic DNA (Homo sapiens)
atttgttttttttttagttgagtttttcgtatgtacgagtgtttgtgtgggtatatatgaatgtaaatatatatttttatattacgtttttttattttttaggaagaaaggattttattacggttttagttaatttattgttttttggttttttttattttagggagtcgttcggagtattcgtttttgtcgaattttaaaggtagtttagtaatagtattattcgtagagtgaatttcgggcgttcgacggtaatttattttataatcgttttttttattatttatcgttaggtttttgttagtatttataggaatcgttgggtttcgcggttgtcgttaaggttttatataaatagtttttttcgcggttttgtttttattggtaattttggtttattttttttcgaatttttttacgatatttatttttaaagtaattttttagtattt

SEQ ID NO: 1355 - DNA, 489 bp, Artificial Sequence
  chemically treated genomic DNA (Homo sapiens)
tttattgtattttatttgtgttaaggttacgggaatttttttatcgtttttgttagtagatgttatttagtatttattttaagatatttatattttgattcggaagagattagaagtattttgtagttcgtgtggataagttttttttttgatttatagtttttttattttcgtatttaggagagggatggtagcgttgagggtcgtgggatttttttttttggaggtttttttattttcgtggtttttgcgcggtttagttttttttcgagttggtttaaggggtaatttgatttaggttagttggtggagtatgaggtagcgtttagttgagcgttacggtattttattaagttcgaaatgtgatcgttattgttgttatattttagcgtttttaataatttttttataaatgagaaaaatagagtttttttaaatgttttttttttgatattaaggaaagcgtatggaattttgtttagaggtttg

SEQ ID NO: 1356 - DNA, 489 bp, Artificial Sequence
  chemically treated genomic DNA (Homo sapiens)
taggtttttgggtagggttttatgcgttttttttgatgttagaggaaaggtatttggggaggttttgttttttttatttgtaaggggattgttgggggcgttaaagtgtgataatagtagcgattatatttcggatttaataaaatatcgtgacgtttagttagacgttattttatattttattagttgatttggattaagttattttttgagttagttcggaggggagttggatcgcgtagaggttacgaggatgggggagtttttagggaagagaattttacgatttttagcgttgttattttttttttaggtacgagggtgaggggattgtaagttagaggggagatttgtttatacgaattgtagggtgtttttggtttttttcgggttaaagtatgagtattttggggtgggtgttgaatggtatttgttggtagagacggtggaagggttttcgtggttttgatataggtgaagtgtagtggg

SEQ ID NO: 1357 - DNA, 458 bp, Artificial Sequence
  chemically treated genomic DNA (Homo sapiens)
ttatattttttttgtattttgtttcgtggtttagtaggtcggttattttttttgtaggtagttttacggtggaggttttacgcggttgtttttttatttgtttgagttaagtgtttttggggaacgattcggagtttgatgggaggaggagatttttttgtttttttttttagttttaaatttaattgaaattgttttgtaataattgtatttgtggtttgtgaaagttgtgtttcgtggcgattagggattgagattagttggtgaaaaatttggtataggggtatatacggtattattggggatattaagtaagttacggataatgggggagatagagggtttttgtaattagaaattattgggaatttcggttatttttttttgttgtagatatgttttcgttatgtcgggtcggcgtaggaatacgttgttttttttagtattagttttttttt

SEQ ID NO: 1358 - DNA, 458 bp, Artificial Sequence
  chemically treated genomic DNA (Homo sapiens)
aagggagaattgatgttgggaggaatagcgtgtttttacgtcggttcggtatggcggggatatgtttgtagtagggagaggtggtcgaggtttttagtggtttttggttgtaggagttttttgttttttttattgttcgtggtttgtttagtatttttagtgatgtcgtgtgtgtttttgtgttaggttttttattagttaattttagtttttggtcgttacgagatatagtttttatagattataaatgtaattattataaggtaattttagttagatttggggttgggagagaaaatagaagggttttttttttttattaggtttcgaatcgttttttaggagtatttaatttagataaatggggaagtagtcgcgtggagtttttatcgtagagttgtttgtaggggaagtggtcgatttgttgggttacgaagtagggtgtaggaaggatatgg

SEQ ID NO: 1359 - DNA, 422 bp, Artificial Sequence
  chemically treated genomic DNA (Homo sapiens)
gtgtaaaagttggtattaatagtagtaatttataaatttttggagaggttcggtattttttatttagtgattgttgagtttgattgatggggttatgtcggtaaattagttattatttagtagagatattttttagagatgttaattgtttagtgtttatgcgtttttatttttttttggtataggcggttggttgtcgattttttgttattattgtttgataatagtgtttgatttgtttatatagattagggtttttgtatgtatgttgttagtatttaattattagttagtacggcgtatgaagtacggtttattaatgtttttgaggggagtaaataggtgttggtagaaatttattttcgtggataaatttgtggatacgtgtatttttatacgtgtttatttagtttttaagtata

SEQ ID NO: 1360 - DNA, 422 bp, Artificial Sequence
  chemically treated genomic DNA (Homo sapiens)
tatatttgggggttaagtgggtacgtatgagggtgtacgtgtttatagatttgtttacgggaatagatttttgttagtatttgtttgttttttttaagagtattaatgaatcgtgttttatgcgtcgtgttggttggtagttagatgttaatagtatgtatgtaggggttttggtttgtgtagataaattaagtattgttattagataataatggtaggggatcgatagttagtcgtttgtgttagggaggggtggggacgtatgagtattgggtaattagtatttttaaagggtgtttttgttgaatggtggttaatttgtcgatatggttttattagttaaatttagtagttattgagtggggaatgtcgggtttttttaaagatttgtgagttgttgttgttggtgttagtttttgtat

SEQ ID NO: 1361 - DNA, 465 bp, Artificial Sequence
  chemically treated genomic DNA (Homo sapiens)
tagattttaggtttttgttggagttttttgcggaagttattttggtggtgagttagtaattaggaggaatggggtagcggttagcgttgagaggaaagttacgtgtaaatatttttttttttttttttttttcgtttttttttttttatttaattttaagtgttttttgaggcggttattttgatttcgtttttttttcgagatggtttttatttcgtagaggagttaggagtggattataaggtggtattttcgggtatcgatgtagggagtcgtttagcggggacgttagattatatttaattttttttagttttgtatcgttttttgtgtaaatatggagatagttaggaaatggttttaggtttgcgaggtttaggaggagttttttgtttaggttatagttcgtggtggagttgggtatcgagtttttttttgaatttttttgttttttttgtttttatt

SEQ ID NO: 1362 - DNA, 465 bp, Artificial Sequence
  chemically treated genomic DNA (Homo sapiens)
ggtaaaagtagagagaatagaaggatttaggaaggaattcgatgtttaattttattacgggttgtggtttgggtaagaggttttttttaggtttcgtaggtttgaagttattttttggttgtttttatgtttgtataggggacggtgtagagttgaggaaagttaaatatagtttagcgttttcgttgaacggttttttgtatcggtgttcgagagtgttattttgtggtttatttttggtttttttgcggaataaaaattatttcgagggaaggacgagattaagatggtcgttttaggaagtatttggggttgagtgagagagagagagcgagagagagagagaggagggagtgtttgtacgtggttttttttttagcgttggtcgttgttttattttttttggttgttaatttattattaaaatggttttcgtagaaaattttagtaagggtttgaagtttg

SEQ ID NO: 1363 - DNA, 474 bp, Artificial Sequence
  chemically treated genomic DNA (Homo sapiens)
tagtgggaaagagggaattttattatttacgcgttttttttaaaaaattaatttgttttttggataggtgatgggagtttttgttattagatcgttttaagaaaatcgtttagtaaaataaaataaaaaattttttttaaataatttaagttttaaagttgagtaatttgatgtaggttagtttttaatttacgttttcgtaggatatatagagttagggagttagttggttaagtttgggggtttgaattaagaaggatttattagtcgaaaaattttaaaattttgtgttatgtgaaggaattttttaaaatattggattttatttaggcgtagcgagtcgtttaaagttatggtaatttttttttcgttgttatattatttttatttttgtgtttttagatttttttttgttttgtaatgttttgttgggattttcgatttcgtttgaggttttgtggttaagggttaggg

SEQ ID NO: 1364 - DNA, 474 bp, Artificial Sequence
  chemically treated genomic DNA (Homo sapiens)
ttttggtttttggttatagggttttaggcggagtcgggggttttagtaaaatattgtaaaataggaaaaaatttaaggatataaaaataaaagtgatgtggtagcgggaaaggggttgttatggttttgagcgattcgttgcgtttgggtgggatttaatgttttggaaggtttttttatatgatatagagttttggaatttttcggttggtaaattttttttaatttaggtttttaggtttggttaattagttttttggttttgtgtgttttgcgggggcgtaggttggaaattggtttgtattagattatttagttttgaaatttaaattgtttgaagagaattttttgttttgttttgttggacgatttttttggaacggtttgatggtagaggtttttattatttgtttagaggataaattgattttttagaaaggacgcgtgggtggtggaatttttttttttttattg

SEQ ID NO: 1365 - DNA, 463 bp, Artificial Sequence
  chemically treated genomic DNA (Homo sapiens)
taataaataagtttgttgttttgtttagaaagggattcgggatttttaattttattagagttttaaaagtattagtttaaagttaaagttagatatacgtaaagttgtagttttcgggggaatttagagtttaaaaataatattttttttgatttaaaaattataagggaatatttacggtatattttttgattaaaaaaggaaagtgaaaaataaggtttttttttttttttttttaattattataaaattaatttgtgtttattttattaagttacgatttttgttggttttaagcgagtttaatttatgttggttatagatacgaggggtcgggaagtttgggtatgttttagtgaattgaatcggttttttttgaatggttgttattttttttttttgttttttttagtataggaaagttattaaggagtcgtttacgttagtatatttattatttaga

SEQ ID NO: 1366 - DNA, 463 bp, Artificial Sequence
  chemically treated genomic DNA (Homo sapiens)
tttgggtgatggatgtgttggcgtaggcggttttttggtggtttttttgtgttaaaggaagtagaggaaggaaatgataattatttagaaaggatcggtttagtttattaggatatgtttaagtttttcggtttttcgtgtttgtggttaatatgaattgggttcgtttgaggttaatagaagtcgtgatttgatggaataggtataagttagttttatgatgattaagaaggaaaaaaagaaaattttattttttattttttttttttaattaagaagtatgtcgtgggtgtttttttgtggtttttgagttaaagagagtattgtttttgagttttgagttttttcgggggttgtagttttgcgtgtatttaattttaattttgaattaatgtttttagggttttggtgggattgggggtttcgggtttttttttgaataaggtagtaggtttgtttattg

SEQ ID NO: 1367 - DNA, 493 bp, Artificial Sequence
  chemically treated genomic DNA (Homo sapiens)
ggtagttttaagtattagcgagggttggaagtttttattgtgaagttttttatagaaagtcgcggttggtagttttcgtttttgtatgggaataaattaatattggtattttaaatataggaaaggaaggaaattggaaatatagtttatatttggttagttttttgaaatattgtattatgttatcgatattaattaatgaaaagtagggttgtgtgagaggttttggtttggaaatgtattaatatacgtttaatatgtttgtataggaatcggattatatgtattttggttttaaaataataaagtaattattttaaagttggtgttttcggagttgttattaatttaatttattttacgcggattagtataggttttgcgcggttttttataatgtttttcgatataaatgttgaaaaggcggtattgtatatgtttgtttgagtttcgtataagtaagtgttaaattttatgtattttaatatttttt

SEQ ID NO: 1368 - DNA, 493 bp, Artificial Sequence
  chemically treated genomic DNA (Homo sapiens)
gggggatattagagtgtatgaagtttgatatttatttatgcgaaatttaggtaagtatgtgtaatatcgtttttttaatatttgtgtcggaaggtattgtggggagtcgcgtaaagtttgtgttgattcgcgtggagtggattgaattaatgataatttcgagagtattagttttagggtaattgttttattgttttggagttagggtgtatataattcggtttttgtgtaaatatgttgaacgtgtgttaatgtatttttaaattagagttttttatataattttgttttttattaattgatgtcggtagtatggtatagtattttaaagggttggttaagtataaattgtgtttttaatttttttttttttttgtgtttggaatgttaatgttaatttgtttttatgtaggagcgggggttgttaatcgcggttttttataaagggttttatagtgaaggtttttagttttcgttgatgtttggggttgtt

SEQ ID NO: 1369 - DNA, 396 bp, Artificial Sequence
  chemically treated genomic DNA (Homo sapiens)
tataaaagtaagaaaagttagtgtgggttaggaggaggtcggggagtttgggtcgaaaatagtttatgagtaagtgttttgaaatttcgttttaaataagtcggtaaatgaatttaattttgttagatttttttttttttacgtagattaaatatttcgttggcgtgttgtttagatatagataataaaggattttttatagcgtatagagacgcgttgataaagtagttatttaaagatgtagtattgttttttcggtttaaaacgatttgttagatggatttaaatgaaaatgttaagttatcggtttggtttggggtttgttggtggattggttggggggagggggttggttgttttagagaattagaaattattatttgtgattgggttgtt

SEQ ID NO: 1370 - DNA, 396 bp, Artificial Sequence
  chemically treated genomic DNA (Homo sapiens)
ggtagtttaattatagatgatggtttttagttttttggagtagttagttttttttttttagttagtttattagtagattttaaattagatcgataatttagtatttttatttaagtttatttgataaatcgttttaggtcgagaaagtaatattgtatttttaaatggttattttgttagcgcgtttttgtgcgttgtaaaaagttttttgttatttgtgtttagatagtacgttagcggaatatttggtttgcgtgaggggagagagatttgataaggttgaatttatttatcggtttatttaaagcgggattttaaaatatttgtttataaattgttttcggtttagatttttcggtttttttttagtttatattggttttttttgtttttata

SEQ ID NO: 1371 - DNA, 500 bp, Artificial Sequence
  chemically treated genomic DNA (Homo sapiens)
gaattagttgtagttgggattttttgtagtttttttcgtagtaagttggggtagttatgagttttgtttgtttaacgtggggttaggcgggtatgtttgttgtgtttggtagttttgatatttttagattttgttggaagatgttcgtggtttgaaagtttattttgtagtcgttttattttgggatgtagtttttgtattggtaggattaacgtaaatagaatttgtttggtttatttttcgtcgggttttaataggtttgtaacgttattgtttgttagggagagttattcggtgatattgttaattaaaattatgattttgggggtaagaaaaaattttaaaacgttgaagttattttttttaatagaaattttattttgaaggtgtttacggaggttaggttgattagaaaaatttataagttataaataagtttaaatagttttatttaatttatttaattcggtgtttggagtttttatggggagaggtgtttg

SEQ ID NO: 1372 - DNA, 500 bp, Artificial Sequence
  chemically treated genomic DNA (Homo sapiens)
taggtatttttttttatgaggattttaggtatcgagttaagtaaattaaataaaattatttgagtttatttatggtttgtgggtttttttggttagtttgattttcgtgagtatttttaaaataagatttttattagggaagatgattttagcgttttaaaatttttttttgtttttagagttatggttttaattaatagtattatcgagtggttttttttggtagatagtggcgttgtaggtttgttgaggttcggcgaggaatgagttaagtagattttgtttgcgttaattttgttagtgtagaagttgtattttagggtagagcgattataaaatgagtttttaggttacgagtattttttagtagaatttgggggtgttaaggttgttagatatagtaggtatgttcgtttgattttacgttggataggtagggtttatggttattttagtttgttgcggggaaggttgtagagaattttagttgtagttggttt

SEQ ID NO: 1373 - DNA, 495 bp, Artificial Sequence
  chemically treated genomic DNA (Homo sapiens)
gtttagttttatgaaggttttgtataagttagtttttttttttcgttatttgatggaataatagatttataggagaatttatttgtaattttaagtttcgagttaaagacgttttaagggatgaacgtgggtgatttgtggaatattgcgatgtatttatgagatagattgtacgtttatcgcggcgtttaaagaaattagatcgggttgtattagaggcggtgttgtaattcggttgttttttgggaaagaatgtaagtttttagtgtgcgaagtatgaggggttgtagaggaaattgttttggtggttttggttttgggagtaagtatttgtttttcgtttatttaagtatattagcgagttttataaatatttaagtggtttacgagatgttttatttttaggtttcgttttatttttttcgttgttatatagaggttattagaaattacggttttttgggtttgatagttaggtagataggattaggttag

SEQ ID NO: 1374 - DNA, 495 bp, Artificial Sequence
  chemically treated genomic DNA (Homo sapiens)
ttggtttggttttgtttgtttggttgttaaatttagaagatcgtggtttttggtggtttttgtgtgatagcggaggaggtggggcgaggtttggaagtgaagtatttcgtgagttatttaagtgtttatgaagttcgttaatgtgtttaaatgaacgagaagtaggtatttgtttttaggattagagttattaaagtaattttttttgtagttttttatatttcgtatattggaagtttgtatttttttttagaggatagtcggattatagtatcgtttttaatgtaattcgatttggtttttttgagcgtcgcggtgaacgtgtaatttattttataaatgtatcgtagtgttttataaattatttacgtttattttttgagacgtttttaattcggggtttagagttgtaaatgaatttttttatggatttattattttattaaatagcggagagaggggattagtttgtgtagagtttttatagagttgggt

SEQ ID NO: 1375 - DNA, 500 bp, Artificial Sequence
  chemically treated genomic DNA (Homo sapiens)
ggttaataaagtttggttggttttcgcgggttgtgtaggagtttattttagggaggtatttagagatatttttggtttggttttgtcgggaaagtgggtcgagtagggagagggggattagagaggaagagatggatagagtttttcggacggtgggttgggttcgaggttcgcggatcgttcgaggggggtttttgggttcgaggtcgttcgtatcgattagtgttgtggttcgggtagtttatcgttttttcgggttttagtttttcgttttggtagatttcgaggcggtttcggagatttcgggtttggcgaatattgggcggggaggggcgttaattttagtttttcgggcggggtttttcggttttcgcggttacgttgtagtttaggcggaggcgcgggatttcgagttgggatcgtttttttgggtttcggtgcgatcggcggcgggaggtgagagtgggttcggcgggtttcgggaggaggtggttttaggg

SEQ ID NO: 1376 - DNA, 500 bp, Artificial Sequence
  chemically treated genomic DNA (Homo sapiens)
ttttggggttattttttttcggagttcgtcgggtttatttttatttttcgtcgtcgatcgtatcgaagtttaagagggcgattttagttcgagatttcgcgttttcgtttgggttgtaacgtggtcgcgggagtcgggagatttcgttcgggaggttggagttaacgttttttttcgtttagtattcgttaggttcgggattttcgaggtcgtttcgaggtttgttagggcgggaaattgaggttcgagagggcggtgaattgttcgagttatagtattggtcggtgcgggcggtttcgaatttagaggtttttttcggacggttcgcgggtttcggatttagtttatcgttcggaaaattttgtttatttttttttttttggtttttttttttttgttcggtttattttttcggtagagttaaattagggatgtttttgggtatttttttagggtgggtttttatatagttcgcgagggttagttaagttttgttggtt

SEQ ID NO: 1377 - DNA, 433 bp, Artificial Sequence
  chemically treated genomic DNA (Homo sapiens)
aggtgttttttttggatttgggttggacggatattggtttttatcgcggcgtgagtcgggttacgttttttatttattcgtttaaggacgagaaggcgtcgtattttaagtaggtggttaggtagatgatttaataggtttagaaggtaggttttcgttttcgtttttatatcgttgggatttcggttttagttttttggatcgggttttattttttaggtagggttcggggtaggtcgttttgagtattttttggaaaatgggttttaattcgtttttattttttggggttgtagtgaggtttgtagagcgaatggttgggaacgtgtttggtaaattataaggtgttggatagatgttagtcgtcggtattttagcgtttagaggtattggttttgttttgtatttttgaaatttttttgtttagtttttt

SEQ ID NO: 1378 - DNA, 433 bp, Artificial Sequence
  chemically treated genomic DNA (Homo sapiens)
ggaaggttggatagggaagttttagaagtatagagtagagttagtgtttttgaacgttggaatatcgacggttgatatttgtttagtattttgtaatttgttaaatacgtttttagttattcgttttataggttttattgtagttttaggaagtaggggcgggttggggtttattttttagagggtgtttagggcggtttgtttcgggttttgtttgggaggtggggttcggtttaggggattggggtcgaggttttagcggtgtgggggcgaaggcgggggtttattttttgggtttgttggattatttgtttgattatttgtttgaggtgcggcgttttttcgtttttgggcgggtgggtgaagagcgtgattcggtttacgtcgcggtagaaattagtgttcgtttagtttaggtttagaggaggtattt

SEQ ID NO: 1379 - DNA, 339 bp, Artificial Sequence
  chemically treated genomic DNA (Homo sapiens)
gtagtagagagttgttgaattttgaacgcgaggtagggaagaaagttgaagtatttgttatttataaattaaaatgaatttattttttttttaaggatagtcgttgtaataggtcgtagttaataggttttatggtgtgatttttgcgtaggaagttattgtttatatcgggtgtggaagtatttgtaatttttaggggatttgttgttttatagaattcgacggaaagttcgaggaaggtcgagtttcgggggttataggtcggatgtcggagttgttttatgggtggtgttcgagggagttttgggaggagtcgttagtttaggtagtgggtggaga

SEQ ID NO: 1380 - DNA, 339 bp, Artificial Sequence
  chemically treated genomic DNA (Homo sapiens)
tttttatttattgtttgggttgacggttttttttagggttttttcgggtattatttatggagtagtttcggtattcggtttgtgattttcgaagttcggtttttttcgagtttttcgtcgggttttgtggagtagtaggttttttgggggttataaatgtttttatattcggtgtgagtagtggttttttgcgtagaaattatattatgggatttgttggttgcggtttattatagcggttgtttttagaggaagagtaaatttattttgatttatagatagtagatgttttaatttttttttttgtttcgcgtttagggtttagtagttttttgttgt

SEQ ID NO: 1381 - DNA, 444 bp, Artificial Sequence
  chemically treated genomic DNA (Homo sapiens)
tgtagtttgaggaattttgattttttggtgatttttagaagtttttggacgtagttgttcgtgaggcggatttgttcgtcgtcggtttcggggttggacgatacgttcggagttttagggaggtcgcgaggagtttgtttttcggttaggaagtgatcgttgtttgcgtcgcggtttttaaggataatttttgggcggtaattatttttttttatttaggagattaatttttttgttgaggttttatttaaggttgtagtatttatttattgaggtttttaagaaatttgtttgttttaggaaattttttattgagatttgtttcgtattgttatttggtggtaagatataaaaatatattttttacggtgggattagattgcgcgtttgtttcgtttttatttcgtttttttttcggtggtggggtagagggatggtggaaag

SEQ ID NO: 1382 - DNA, 444 bp, Artificial Sequence
  chemically treated genomic DNA (Homo sapiens)
ttttttattatttttttattttattatcggggagagggcggggtgggggcggagtaggcgcgtaatttgattttatcgtggagggtgtgtttttatattttattattaggtggtagtgcggggtaggttttagtaggaggttttttaggataggtaggttttttaggaattttagtgagtgagtgttatagttttaggtggaattttaataaagaaattgattttttgggtggaggaagatggttgtcgtttaggggttgtttttaagggtcgcgacgtagatagcggttattttttggtcgaggggtaggtttttcgcggtttttttgggatttcgggcgtgtcgtttagtttcgaggtcggcgacgggtagattcgttttacggatagttgcgtttagaggtttttggaaattattaaaggattagaattttttaggttgta

SEQ ID NO: 1383 - DNA, 414 bp, Artificial Sequence
  chemically treated genomic DNA (Homo sapiens)
aggtgtatagggtgagatatttaggaattttgttgtttaggagaattttaggttaatgatttgtcggtttttgattagtttttgatgttgttttgtgttaggtagcgcgttaggtagatgattttttttttgattttaggagaggttggagtaagcgtgtttttagttaggacgtgtaaatggtatgtagtggaggaagttagggagtatgaattgttgggatttagttgtttgttttggaagagggtattttttttttttgtttatgttaattttatttttagtttgtatttagaattttatcgttgtttatcggttgggtagatagaggttgttttgtttggttgttaatacgaaatggtattttgttcgaggtgttttttttttttcgtttttttttgtttttaaatttag

SEQ ID NO: 1384 - DNA, 414 bp, Artificial Sequence
  chemically treated genomic DNA (Homo sapiens)
ttgaatttagaggtagggaaaggcgagggaggaggaatatttcgagtaaaatgttatttcgtgttggtagttaggtaaggtagtttttgtttgtttaatcgatagatagcggtggagttttgggtataagttaaggataaagttaatatgggtaggggggaaaaatgtttttttttagaatagatagttgggttttagtaatttatgttttttggttttttttattgtatgttatttgtacgttttggttggagatacgtttattttagttttttttggggttaaagagggggttatttgtttggcgcgttgtttgatatagagtaatattaggggttaattaggggtcggtaggttattggtttaaaatttttttgagtagtagggtttttgagtgttttattttgtgtattt

SEQ ID NO: 1385 - DNA, 440 bp, Artificial Sequence
  chemically treated genomic DNA (Homo sapiens)
aggaaaaaggtgggttagtttaggatgttaagtaaagggagagttgagatttataaattggaataatttgaataacgagtggattagttgaggttaggagtttaagattaatttggttaatatggtgaaattttatttattgaaaatataaaaaattagttaggtatggtggtgtgtatttgtagttttagttattcgggaggttgaggtacgagaatcgtttgaatttgggaggtggaggttgtagtgaggtaagattatattattatattttagtttgggcgatagaaattttgttaaaaaaaaaaaagaagaagaagaaagaaaagaaaagaggagaattttttgatgaagtataagtgtttggttcgaatgataatagtattttgatttttttgtttatatatttattttttatgaatttgtttagtgtgtattga

SEQ ID NO: 1386 - DNA, 440 bp, Artificial Sequence
  chemically treated genomic DNA (Homo sapiens)
ttaatatatattgaataaatttataagggatagatgtgtaaataagaaagttagaatgttgttattattcggattagatatttatgttttattaggaaatttttttttttttttttttttttttttttttttttttttttttgatagaatttttgtcgtttaggttggagtgtagtggtatgattttgttttattgtaatttttattttttaggtttaagcgattttcgtgttttagtttttcgagtagttgggattatagatgtatattattatgtttggttaattttttgtatttttagtaaatggggttttattatgttggttaggttagttttgaatttttgattttagttgatttattcgttatttaagttattttagtttgtgggttttaattttttttttgtttggtattttggattgatttatttttttttt

SEQ ID NO: 1387 - DNA, 382 bp, Artificial Sequence
  chemically treated genomic DNA (Homo sapiens)
tgagtggttgtggatgtttaaggatttacgatttttgattttataaagtttagggtgaaaataaaaaataaaataaggagattattgttttaaagtggtcgttgtagttaattattttaagaaagtaaataggttggtattgaaagttatataggcgggcggttttttgggagggttgtttagttttttttttttgagatttgagtagggagtagttagaggagtttgaagggatggtgtttagggtatgggaataggttgtatatatttttacggagtacggtgtttgtttagtttgagaagggaaagaaacgggagtagagggttgatgagaaggtagtagatggatagtgcgggattgaaaaggggatttatttgaaga

SEQ ID NO: 1388 - DNA, 382 bp, Artificial Sequence
  chemically treated genomic DNA (Homo sapiens)
tttttaaatggattttttttttaatttcgtattatttatttgttgtttttttattagttttttgttttcgtttttttttttttttaaattggataagtatcgtatttcgtgaagatgtgtgtagtttgtttttatgttttgaatattatttttttaagtttttttggttgttttttgtttaggttttagaaaaggagagttgggtaatttttttagggagtcgttcgtttgtgtaatttttagtattagtttgtttgtttttttgagataattagttataacggttattttaaaataatggtttttttattttgttttttgtttttattttaaattttataaagttagaaatcgtaagtttttgagtatttatagttattta

SEQ ID NO: 1389 - DNA, 303 bp, Artificial Sequence
  chemically treated genomic DNA (Homo sapiens)
gataaatatgttggttgggtagataggtagtttttatgtttttggttgacgtagatgttacgtattattttatgtgttattatattttttagtaaatacgtaatataagagaataattaattattattaagcgtttttattttgagataggaagatgtagaggaaagattttgatgtgtgtgttagttataaggatgtatattagtgattgatatgatttggtgtaaattttgggtagagatttatatttaagttttttatttttatttgtcgaggcgtaagggtttagagggggttttatgg

SEQ ID NO: 1390 - DNA, 303 bp, Artificial Sequence
  chemically treated genomic DNA (Homo sapiens)
ttatggaattttttttgagtttttacgtttcggtaggtgggggtgaggagtttaagtataggtttttatttaagatttgtattaagttatgttagttattggtgtatatttttgtaattgatatatatattaaggttttttttttatatttttttgttttaagatgagaacgtttgatagtggttaattatttttttatgttacgtgtttattggagagtgtgataatatatgaaatagtacgtaatatttacgttagttaaaagtataaggattgtttgtttatttaattagtatatttatt

SEQ ID NO: 1391 - DNA, 496 bp, Artificial Sequence
  chemically treated genomic DNA (Homo sapiens)
gggtttagagttggtaggtgttttggtagggataggtttggtgttcgcgtttgttcgttggatcgttcgtttcgcgttttggcggtttttttcgggcgatgttttcgttttgggttttgttggttttcggttgtttgcggttcggttcgggtaggcggtgaagggtaggagggggttgagtttagaaagagcgggtagttttgttttggggcgttcgtcgtttggattttgatttttggcgttggggatttagatattattgttatgaataatagtgatagttaacgtttacgggttttttttgttgggaattcgagggtttatagatggttgtagttttgcgatgtgtgttgtaagagattaatatgtaggggggttgcggtaggatagagaagggattagttttagttttatggtgacgtttggacgggggtagatagagagatatttcggtcgaggaagtagtatgggtaagtttatggaggggagataatat

SEQ ID NO: 1392 - DNA, 496 bp, Artificial Sequence
  chemically treated genomic DNA (Homo sapiens)
atattgttttttttttatgaatttgtttatgttgttttttcggtcgaaatatttttttatttgttttcgtttaggcgttattatggggttggggttagttttttttttgttttatcgtagtttttttgtatgttggttttttgtaatatatatcgtagggttgtagttatttgtgagttttcggatttttaatagaggaggttcgtaaacgttggttattattattatttataatagtaatatttgggtttttagcgttaggaattagggtttaggcggcgggcgttttagggtagagttgttcgttttttttgggtttagtttttttttgttttttatcgtttattcgagtcgaatcgtaggtagtcgagggttagtagggtttagagcggaggtatcgttcgggaggagtcgttagagcgcggggcgggcggtttagcgagtaggcgcgggtattagatttgtttttgttagggtatttgttagttttgggttt

SEQ ID NO: 1393 - DNA, 499 bp, Artificial Sequence
  chemically treated genomic DNA (Homo sapiens)
attgtaaggtttggggtgatagttttttggttattttttttagtttttttgtgtttttatagttagagatgattaaagtttatttttaagaaaatagtaagttacgtataattgaagtttatgggggtaggatgttgttttttttatcggggtaatttaagtatttgagtgtttgatattatttattatttaggggattcgagttgaattttaaagattggaattaaagatgatagagtgcgtggttggagagagggggaagtttatagagtttaggtaaatttttgaattatatttttattacgtttataatgtattgtattgaagtatatcggaagttaaagattaaaaaggaattagatttttagttttgttatttaaagtagaaattgagggttttatttatcgtatagattttagtttaagtgttatgtttttagttttatagttttattagtagtttaagtaaaatggtttggatattaaagatggtttttgg

SEQ ID NO: 1394 - DNA, 499 bp, Artificial Sequence
  chemically treated genomic DNA (Homo sapiens)
ttagaggttatttttagtgtttaggttattttgtttgagttgttggtgaaattgtgaaattggaggtatggtatttgggttaaagtttgtgcggtgaataaggtttttagtttttgttttaggtggtagagttgaaaatttgatttttttttggtttttagttttcggtgtattttaatgtagtatattgtgggcgtggtggggatgtggtttagaaatttatttaaattttgtggatttttttttttttttagttacgtattttgttatttttggttttagtttttagaatttagttcggattttttgggtgatgggtggtgttagatatttaggtgtttggattgtttcggtggagagaatagtattttgtttttatgggttttagttgtacgtgatttgttgtttttttggaggtgggttttagttatttttagttataaagatataaaaaaattgggaagaatgattaggaaattgttattttaagttttgtagt

SEQ ID NO: 1395 - DNA, 499 bp, Artificial Sequence
  chemically treated genomic DNA (Homo sapiens)
tggtatgtttgaaaagtattgtgacggttgaattttgtgggtttggggagattgtagattttttgattttaaggggaatgatgtgattttagagttgtaaagaataagtgatagtggaggcgtttatgttttgtgattgtattagagataaggaagatataattagaataatggggagtaggaatggagcggttaatagaatatgtgattgttagggatttttgatgaaggttgatttttagggagtgaattagattagtgattaattatttgtttttatataattgggtaatgtggatggattttaataaagggattatttatagtatagtaggaaagttataaagaaattagatagaagagtgtaagtagtaaggggttaagtagttatttgattagagatagtgttagtttgttaagaaggtattagatagaagttgtgatttttagtaaagggatatagtttgtttgtgttgattttgtaggggtagaggtgggg

SEQ ID NO: 1396 - DNA, 499 bp, Artificial Sequence
  chemically treated genomic DNA (Homo sapiens)
ttttatttttgtttttgtagggttagtataggtagattgtgtttttttgttgaagattatagtttttgtttggtgtttttttggtaagttggtattgtttttagttaggtgattgtttggttttttattatttatatttttttgtttggtttttttgtgatttttttgttgtgttgtaagtagtttttttattagaatttatttatattatttagttatataaagataaatagttggttattgatttagtttattttttgagaattagtttttattaaagatttttaatagttatatattttgttggtcgttttatttttgttttttattattttagttgtgttttttttgtttttagtgtagttataaagtataagcgtttttattgttatttgttttttgtaattttaggattatattattttttttgaaattagagaatttgtaatttttttaagtttataaaatttagtcgttatagtattttttaagtatgtta

SEQ ID NO: 1397 - DNA, 279 bp, Artificial Sequence
  chemically treated genomic DNA (Homo sapiens)
aagttttattggatataggtaggtaaatttttatcgggtatttgatttttgtattaggttttagcgtggacgttgttaagttagtatgtggtttcgtatatgtggagttttatagttattttgaagtaagttttgggatttcgaatttgatttcgaagtttttgttgggttgattttttattcggtgttgatttgattttatacgggagttagtgtagttatgggttcggaaagtatttagataaaaggtgttttatttagtgatgaagaatgtgttga

SEQ ID NO: 1398 - DNA, 279 bp, Artificial Sequence
  chemically treated genomic DNA (Homo sapiens)
ttaatatattttttattattgggtggagtattttttatttgagtgtttttcgagtttatgattatattgattttcgtgtaaggttaagttaatatcgagtagggagttagtttagtaagaatttcggggttagattcggggttttagggtttgttttagagtaattgtaagattttatatgtgcgaagttatatgttggtttagtaacgtttacgttaaaatttggtgtaagaattaagtgttcggtgagggtttgtttgtttgtgtttagtgagattt

SEQ ID NO: 1399 - DNA, 443 bp, Artificial Sequence
  chemically treated genomic DNA (Homo sapiens)
ggtttagggtagttgaaatggatttttaatttggagttagagtttttattatttttatagtatttatgagggttaacgttttatttttttagtatagaatatggatttttagtttttaattacgagattgggtttagggcggttattttgaagttttttataattttttttttatggttttgggtagggatttatttttggtttttttgaaattataatataaattaagtagggaatatcgaagtttttagatattagagattttaggttgattgataggttttagaaagtgagggaaggagagaggattggagttgggattttattttagttttagttttatagatagtagttatgtagagggtgtttgtagagttatatttcgggtttgtggttgtggggtaagaaagatagatgtttggttgtttggttggggattatag

SEQ ID NO: 1400 - DNA, 443 bp, Artificial Sequence
  chemically treated genomic DNA (Homo sapiens)
ttgtagtttttaattaggtagttagatatttgttttttttattttataattataaattcgggatgtggttttgtagatattttttatatggttgttgtttgtagggttggggttgaggtgggattttagttttagtttttttttttttttttattttttggagtttgttagttaatttaaaatttttggtatttgaaagtttcgatgttttttatttaatttatattgtggttttaaaaaagttaagagtaagtttttgtttaaggttatagaggggaagttatggaaagttttagggtgatcgttttgaatttagtttcgtggttgaaggttaggagtttatgttttatgttagagaagtgaaacgttagtttttatgggtattgtggagatggtggggattttgattttagattaaaggtttattttagttattttgggtt

SEQ ID NO: 1401 - DNA, 480 bp, Artificial Sequence
  chemically treated genomic DNA (Homo sapiens)
gtttgtttggagtggtttatattttttttcgttgattttagttgatgtttatttttttggtgatttgtgaggcgtttttagaatttatgaggttaggggttaagtgagaggttgtaggttataagtttattaagaggttaaggtagatgaaagggaagcgtttttgtttgttaatttattagttttgtgatttgttttttatttttatttataggaagtttaggtaggagtgaagtcggttcggggagcggtagtgaaggttgtagacggcgaatacgtatagggtaatttttttttttcgggatatatcggttttttgttttaagggaggattggtttaattttgatttcgtttattttaaatacgggtatgtagtaatatagaatagatttaagaatataaatattttgttagttgtaataaagataaaaacgtttaaagttaaaaattaaataaataaatggaaatgaggaagtttg

SEQ ID NO: 1402 - DNA, 480 bp, Artificial Sequence
  chemically treated genomic DNA (Homo sapiens)
taggtttttttatttttatttgtttgtttgatttttaattttagacgtttttgtttttattataattagtagggtgtttgtgtttttaaatttattttgtgttgttgtatattcgtatttaaagtggacggggttaggattgagttagtttttttttggaataagaggtcggtgtgtttcgggggaaggaggttgttttgtgcgtgttcgtcgtttgtagtttttattgtcgtttttcgagtcggttttatttttgtttgagttttttgtgggtggaggtggaaggtaggttatagagttggtgggttggtagatagaggcgttttttttttatttgttttggttttttgatggatttgtgatttataattttttatttgatttttgattttataaattttagaaacgttttataaattattaggaagataaatattaattgaggttaacggaagggggtatgagttattttaggtagat

SEQ ID NO: 1403 - DNA, 487 bp, Artificial Sequence
  chemically treated genomic DNA (Homo sapiens)
tttaggtaggggttagtatggtcggggtttttttgtttgagtttaggattcgtgtaatattaggaagataatagttgaaggttttttagtgagttaagggaagtatatataaatttattatataaatattagaaagtgttgttcgtaaaaaatacgtttttatagagttaataagtagagaaatagttgtttagtgttaggaagtgtattatgatttagaggtttagttcgtgtgtagcgtatagatttgaggttttagagagatcgaggacgtagattagtggtacgacggaaacgtagaacgtttatgagaaaatttttttattaattgagataaagttgtaaagaggtagatagttttattgggtgtgtacgtttgaaatttgtgttttttgggttagggtattcggggtgtggtttttagttttttgtagttgttgtttggaaatcgttgttatttatttattttttttttttgtttttttat

SEQ ID NO: 1404 - DNA, 487 bp, Artificial Sequence
  chemically treated genomic DNA (Homo sapiens)
gtggaagagtagagggaggaggtgggtgggtggtagcggtttttaggtagtagttataggggattgagggttatatttcgaatgttttagtttagggggtataagttttaaacgtatatatttagtggggttatttgtttttttatagttttattttaattagtaggaaagtttttttataaacgttttgcgttttcgtcgtgttattggtttgcgttttcggtttttttggggttttaggtttgtgcgttgtatacgggttgaatttttggattatgatgtattttttaatattgggtagttatttttttgtttgttggttttgtgaagacgtgttttttacggatagtattttttaatgtttatgtagtaagtttgtgtatattttttttagtttattaaggaatttttaattgttgtttttttggtgttgtacgaattttgggtttagatagagggatttcggttatgttgatttttgtttggg

SEQ ID NO: 1405 - DNA, 429 bp, Artificial Sequence
  chemically treated genomic DNA (Homo sapiens)
tgggatttttgagatgagattatagttgtagagtatatagtatagggaggagtttattagtatttttttatttgtggtgttttggtttagttttttttcggttggggttggattcgttttggtagttaggttttgcgttatttgttttattcgttttgtaatttatttgtttaattgttatttcggtggtcgtgaggttagttgatagaatggagaggggtaagtatttttcgtttggagaggatgggcgtgtggttatttgattgtttttgtaagtttggtggttgtgtgtaggttgttttggtggttttagttttttggggtaggcggggttttgtgtaggatgtagagattgggcgtggttttttgtagatgtttagatgtttttgggttgtggtttttgagatttagggtaaggttgttgattgg

SEQ ID NO: 1406 - DNA, 429 bp, Artificial Sequence
  chemically treated genomic DNA (Homo sapiens)
ttagttagtagttttgttttgggttttagaggttatagtttagaagtatttgaatatttgtaggaagttacgtttagtttttgtattttgtataggatttcgtttgttttaaggggttaagattattagggtagtttgtatataattattaggtttgtagaagtagttagatggttatacgtttattttttttaggcggaaaatgtttatttttttttattttgttaattggttttacggttatcgggatagtagttgggtaagtaggttatagggcgggtggggtaggtgacgtaaaatttggttgttagggcgggtttaattttaatcggaaggaggttgggttagggtattataggtgggaagatgttgatgagtttttttttgtgttgtgtgttttgtagttgtgattttattttaagagtttta

SEQ ID NO: 1407 - DNA, 267 bp, Artificial Sequence
  chemically treated genomic DNA (Homo sapiens)
ttttagaaggaaggtaataaggaacggtttcgtagtttgtttcgggcgttgtgtttagcgtatattttaggttttattattgaatagttgagtttgagattttattttttattagttaatttcgacgagtggatttagatgataatatgttatttataagggatatagttaggtgttgtgttggttttagttaacgattttgttagtagtttttaggaagtagtttatttttaaaagtacgaggtttgggatggttttatagagtag

SEQ ID NO: 1408 - DNA, 267 bp, Artificial Sequence
  chemically treated genomic DNA (Homo sapiens)
ttgttttgtgaggttattttaggtttcgtgtttttggggataggttgttttttaggggttgttagtaggatcgttaattgaagttaatataatatttagttgtgttttttgtaagtggtatgttgttatttgagtttattcgtcggggttggttggtgagaagtggggttttaggtttagttgtttagtgatgaggtttggaatgtgcgttgggtatagcgttcgagatagattgcggaatcgttttttgttgttttttttttgaga

SEQ ID NO: 1409 - DNA, 426 bp, Artificial Sequence
  chemically treated genomic DNA (Homo sapiens)
tattttagttatttttgattataaggttgtttttagaaggaaggtagtagagaatggttttatattgttcgattcgggcgttgtatttagcgtttattttgagttttattaacgaatagttgggtttgaaattattttttttttaggtttgtatagtaatttaagttatcgtaaagtttatttttgtagtttttgtttttggttatttcgatgacgtcgattattttattttgtttaaatatttggtttataggtatttgttgtttaagtttttcgcgggtttagtttagtttttcggttatagtgttttcgtttatttggatttttattaggtgggtttttttttggcgtagaggaagtaggcgtatttaggagaaggtagatatagtttagttttagttgttagcgttttttttatagtagagg

SEQ ID NO: 1410 - DNA, 426 bp, Artificial Sequence
  chemically treated genomic DNA (Homo sapiens)
tttttgttgtgggaggagcgttggtagttggagttgagttgtgtttatttttttttagatgcgtttgttttttttgcgttagaagaaggtttatttgatggagatttaggtgaacggaggtattgtggtcgagaagttggattgggttcgcgagaggtttgagtagtaggtatttgtgaattaagtgtttgggtaggatgagatgatcgacgttatcggggtgattaagggtaaaggttataaaggtgagttttgcggtggtttgagttgttgtgtaaatttgggggagaagtggttttaggtttagttgttcgttgatgaggtttagagtgagcgttgggtatagcgttcgaatcggatagtgtagaattattttttattgttttttttttgagaatagttttgtggttagaagtggttgggata

SEQ ID NO: 1411 - DNA, 306 bp, Artificial Sequence
  chemically treated genomic DNA (Homo sapiens)
ttttagtgtagagttttttggggatattatggttatttttgtttagatgagagggagtcggttgtttgtgatagcgtcgtaaaatgtcgttagggttttttttttttttttttttttttttttttcgtttttttttggttggtggttttttgtaggttttcgtttttgttggtgttggttataatgtttttatttttagggtttcggcgttttagttttttgcgtttatcgcgtttgttcgttagaatttttgtgtttttggtgcgtgtggtttgtcgagtttcgagtttttgttttttttagttt

SEQ ID NO: 1412 - DNA, 306 bp, Artificial Sequence
  chemically treated genomic DNA (Homo sapiens)
gggttgaggagaataggggttcgaggttcggtaggttatacgtattaagggtatagggattttggcgggtaggcgcggtgggcgtagggggttgggacgtcgaaattttgggagtggggatattgtggttagtattagtagggacgggagtttgtaggaaattattaattagagagggacgaggaagagagaaaggaggagggagggaaagttttggcggtattttgcgacgttgttataggtagtcggtttttttttatttggataggagtggttataatgtttttaaggaattttgtattggag

SEQ ID NO: 1413 - DNA, 473 bp, Artificial Sequence
  chemically treated genomic DNA (Homo sapiens)
gggtagtttggatggtgttttgattttaatttttttagggggtttttagttaagggttttttttgtatggaatttttaaagttagtaagaaatagaagttttttgaatattgttaacgttttgaatatttagtatttacgaaatttaagcgaattagttaaaaataaaaacgtggtgatgattatttgttgtgggtttaatttaatttgaggatttatttaaaataaaattttggggaatgaaaatagaagttagtagtatatttttagggttagtagggagtatatttgtttagtatttgagtttttgttaggtgttagattttgtttttgatagttgtgttgggcgtgcgtatataagtttcgggcggaggttagggttgtatttagcgtatatgagatgttacgtgggattggaaatgttttttgcgtttttttgagttatatgaaattattgagaagtttttgatttgg

SEQ ID NO: 1414 - DNA, 473 bp, Artificial Sequence
  chemically treated genomic DNA (Homo sapiens)
ttagattaagaattttttagtagttttatgtaatttaagggagcgtaggaggtatttttagttttacgtagtattttatatgcgttaagtgtagttttggttttcgttcggggtttgtgtgcgtacgtttagtatagttgttaggaatagggtttggtatttggtaaggatttaggtgttgggtaaatgtgttttttattagttttggaggtgtgttattgatttttgtttttattttttaaggttttattttaagtaaatttttaaattggattaaatttatagtaaatgattattattacgtttttatttttaattagttcgtttgggtttcgtggatgttggatatttaggacgttagtaatgtttaggaagtttttattttttattggttttgggggttttatgtagggaagatttttgattaggagttttttggggggattggggttagaatattatttaggttgttt

SEQ ID NO: 1415 - DNA, 498 bp, Artificial Sequence
  chemically treated genomic DNA (Homo sapiens)
atatggtttgtttggtaattgttcgtggagaattcgttattatatatatgtagagtagaaggtgtgattaatgcgtttttaaatattattagtattgttgtcgtgattttgaggagttttttaatattaacgagggattgatttttttagttttatataaatagggaatttaagaagtgggtatatggggttagggtatttaaaattttaaggagttttagaaaatgtataatttttgttttagatttatttttttattggttggcgttgtaatatatttagtcgttgagggaatttttgttagttgtcgcggttatttttttttttttgaacggtatttaagattatttttttaaatttcgtaggtaaattttttattgtttattggagaatgagttattttatagggggacgtttatttttttttattttatgtaacgtgttatttttttttttttataggttttcgatgttttttgtgtaggaggagaagtattt

SEQ ID NO: 1416 - DNA, 498 bp, Artificial Sequence
  chemically treated genomic DNA (Homo sapiens)
agatgtttttttttttgtataggaagtatcgggaatttgtgaggggagggggatgatacgttgtatgaagtggagaggagtgggcgtttttttgtgggatggtttattttttagtgggtagtgagagatttgtttgcggaatttaggagggtggttttgggtgtcgtttaggaaagagaaagtggtcgcggtagttggtagaaatttttttaacggttagatgtgttataacgttaattagtgagaaaatgaatttgagataaaaattgtgtattttttggaattttttagagttttaaatattttggttttatatatttattttttagattttttgtttgtgtagggttggaaaaattagtttttcgttagtgttgggaaattttttaaaattacggtaataatgttaataatatttaagagcgtattaattatattttttattttgtatatatatggtgacgggttttttacgggtagttattagataaattatgt

SEQ ID NO: 1417 - DNA, 460 bp, Artificial Sequence
  chemically treated genomic DNA (Homo sapiens)
agagtaatttggggtgagtttataaggtggcggttagttatttatttttttatatttcgtggttatttttaggtgagttgagcgaagtttttggtttcgttatattttttaaggtaaaggtagttttcgttattatttttttgtttttatttgtttagaaatttttagtaggtatttttttttttttttaggaggaatggaatgggattttttgttttgttatcgtaggatttcggcgaggtttgtttaggggttttggtgagagaaaagcgtgataggaagcgtatgttagtaggtatttggagatgtatttttggtgatatgtataggtacggtagtcgttttatttattataggttttcgttcgggatagcggggtatacgtataatatagacgaggtttagagatgtagagatttttaataaattttttttatgttagggagataggagatttagt

SEQ ID NO: 1418 - DNA, 460 bp, Artificial Sequence
  chemically treated genomic DNA (Homo sapiens)
gttggattttttgtttttttagtatggagaaggtttgttgggggtttttgtatttttgggtttcgtttgtattgtgcgtgtgtttcgttgtttcgagcggaggtttgtggtgggtggggcggttgtcgtgtttgtgtatgttattaagggtatatttttaagtgtttgttggtatgcgttttttgttacgttttttttttattagaatttttagataggtttcgtcggaattttgcggtgatagaataagaagttttattttattttttttgaaaaaaagaaaaaatatttgttgggaatttttgagtaagtgggaatagggaggtggtggcgggagttgtttttgttttaaaaggtgtgacggagttagggatttcgtttagtttatttggggatggttacggggtgtagaggggtgagtggttggtcgttattttgtgggtttattttaaattgtttt

SEQ ID NO: 1419 - DNA, 300 bp, Artificial Sequence
  chemically treated genomic DNA (Homo sapiens)
ggtggagtttatgtgtagtgaaggtttagtttgcgttagggacgttgggatggagtgaggcggtaagtttaggtgttttttacgttttgaagttttttgtttgagttcggaagtgaggtatgtggttggtgttttttgtaggtttttttgatttttgttagatagggtttagttaagaaataagattaggaaattaggcgtttatatagagattttgttattatttgaggtttattattttttcggtgtttattaaatattagttagtgtggtttttatggtttgttttaaggaatagag

SEQ ID NO: 1420 - DNA, 300 bp, Artificial Sequence
  chemically treated genomic DNA (Homo sapiens)
ttttattttttgagataaattatgggaattatattgattaatatttagtgggtatcgaggagatgatgggttttaaataataataaaatttttgtgtagacgtttggttttttggttttgttttttggttgggttttgtttggtaggagttaggaaagtttgtaggaggtattaattatatattttattttcgggtttagataggaagttttagagcgtgggaagtatttgagtttgtcgttttattttattttagcgtttttgacgtaggttgagtttttattgtatatgggttttatt

SEQ ID NO: 1421 - DNA, 300 bp, Artificial Sequence
  chemically treated genomic DNA (Homo sapiens)
aggaaggtagtagagaatggttttatattgttcgattcgggcgttgtatttagcgtttattttgagttttattaacgaatagttgggtttgaaattattttttttttaggtttgtatagtaatttaagttatcgtaaagtttatttttgtagtttttgtttttggttatttcgatgacgtcgattattttattttgtttaaatatttggtttataggtatttgttgtttaagtttttcgcgggtttagtttagtttttcggttatagtgttttcgtttatttggatttttattaggtggg

SEQ ID NO: 1422 - DNA, 300 bp, Artificial Sequence
  chemically treated genomic DNA (Homo sapiens)
tttatttgatggagatttaggtgaacggaggtattgtggtcgagaagttggattgggttcgcgagaggtttgagtagtaggtatttgtgaattaagtgtttgggtaggatgagatgatcgacgttatcggggtgattaagggtaaaggttataaaggtgagttttgcggtggtttgagttgttgtgtaaatttgggggagaagtggttttaggtttagttgttcgttgatgaggtttagagtgagcgttgggtatagcgttcgaatcggatagtgtagaattattttttattgttttttt

SEQ ID NO: 1423 - DNA, 487 bp, Artificial Sequence
  chemically treated genomic DNA (Homo sapiens)
ttgttagagaataaagagtgggtttgttatattgtttttttttaagagggtttatttgttttcgtttttttggtatacgttaggggatatatattgtttagtatatttttgtagagttatattttattttatattttattataattttgttgaatgttaggtattattaagaaaatgtttatttatttttttttcgttatgtttaatgtgtgaattgataatatatttaaatttaaagaaaattaatagatattattttaattaatttgaaaagtttggtgatttatttttattttttttacggggtttttgttgggttgtttggtttttcggaattagtttttaggttttttgtagtcggggtgtagtttagtgttcgagttttttttttgttgtttattagatgagtgttgattttttttggtataggtatttgagttgtatttgaattgtagaatatgttgtttttattttgtgttgattgtga

SEQ ID NO: 1424 - DNA, 487 bp, Artificial Sequence
  chemically treated genomic DNA (Homo sapiens)
ttatagttagtatagaatgggggtagtatgttttgtaatttaaatgtaatttaaatgtttgtgttaaagaaagttaatatttatttgatgggtagtagagagggggttcgaatattgagttgtatttcggttgtaggaggtttggaggttggtttcggagaattaggtagtttagtaggagtttcgtgagaagggtgggaatgagttattagattttttaggttgattgaggtgatgtttgttgattttttttgaatttagatgtgttattagtttatatattgggtataacgggaagaagatgagtgaatatttttttgatagtgtttgatatttagtagggttgtgataagatgtggggtaagatatgattttgtaagaatatgttggatagtgtgtgttttttagcgtgtattaaaggagcggaggtagatggatttttttgggagaaaatagtgtgataagtttattttttgttttttgatag

SEQ ID NO: 1425 - DNA, 435 bp, Artificial Sequence
  chemically treated genomic DNA (Homo sapiens)
tgagaagagtagagggtggttttttaggcggttgcgtagtatagagtagaaggttacgttggtgttaatttttttagaggggtttggggagtttttaggtttgtttgtataaggagagaagtagtagtaggcgtggcgggtttttaatttttgggaaggggaagggggttatgaagtaggggtaatttatttgtatatatgtattgtttaaatttgtattttatgtatataagttttcggaggagcggtggtcgagtaagtttttgggttcgagcgttcggtgtttttattttatttaggtatagtgttttttggaatcgggaggttgttagttgttagtttttttgtcgtttatacggtgtcgttagtagttttgttaggtgttttcgttacgttattatggtttttgttagttagtttggatttttgagaggt

SEQ ID NO: 1426 - DNA, 435 bp, Artificial Sequence
  chemically treated genomic DNA (Homo sapiens)
gttttttaggggtttaggttggttggtagaggttatagtgacgtggcgggggtatttgataaaattgttgacgatatcgtatgagcggtaggagggttggtagttggtagtttttcggttttagggaatattatatttgagtgaagtggagatatcgaacgttcgggtttagaggtttgttcggttatcgttttttcgggagtttatgtatatgggatataaatttgagtagtatatgtgtgtaggtgagttgtttttgttttatagttttttttttttttttagaggttgagagttcgttacgtttgttgttgtttttttttttgtgtagataaatttggaagttttttagatttttttggggaggttaatattaacgtggttttttgttttgtgttacgtagtcgtttgggaagttattttttgtttttttta

SEQ ID NO: 1427 - DNA, 476 bp, Artificial Sequence
  chemically treated genomic DNA (Homo sapiens)
ttttgaatttgggttatttaggtagtgtgtttaaagttgaaatcgtatatagtataatttaagtttgtattagattgggaagcgaatttaagttagcggtgcgtggtttaggagtgggaaaggaaatggatgtttgaagtggaagaggtggtgtagagggggtatcgtttatgttgttttgtttttaattgttgcgtatagggggcggtaggggcggtgatttttatattttttattttttcgtcggggttggttgtatttatcgtttgggttatagggtcgatttgtgtgatgtggttttgcggttttagtaggagtttggttttatttttgggatttacgtcgaattgtatgtcgagtttcggggtgatgattggagggttagtttggaagattatagtagttaaggtgagtattaagtagggtagttttgtttttgggtggttgaagcgttaggttggaatgagtaaggtttt

SEQ ID NO: 1428 - DNA, 476 bp, Artificial Sequence
  chemically treated genomic DNA (Homo sapiens)
gagattttatttattttagtttggcgttttaattatttaggggtaaagttgttttgtttaatgtttattttggttgttgtggttttttaggttgattttttagttattatttcggggttcggtatgtagttcggcgtggattttagagatgaggttaggtttttgttggggtcgtagggttatattatataggtcggttttgtggtttaagcgataggtgtagttagtttcggcgggggggtggaaggtgtagagattatcgtttttgtcgttttttatgcgtagtagttggaagtagggtagtatgggcggtgttttttttgtattattttttttattttaggtatttatttttttttttatttttgggttacgtatcgttggtttaagttcgttttttagtttgatgtaaatttgagttgtgttgtatgcggttttaattttgagtatattatttgaatagtttaaatttagag

SEQ ID NO: 1429 - DNA, 460 bp, Artificial Sequence
  chemically treated genomic DNA (Homo sapiens)
tgtttttgtagttgaagttggagttgtcgttcgatcgggtggttattatcggtatcgtgttggtgtttattttgttggttattttggtttttattaagaatttcgtaggtgaggtcggcggtcggggcgcggggcgcgggtagagggggcgttcgtaggtgttcgggagttggcgtttttcgcgttttcggcggtttcgtttagtcgcgtttatcgtggtttggttgcgttcgcggcgttttaggtattttttatagtcgtttttattttagtaggtgtcgttggtcgtatagatttttcgtttttattttattgttgtttttttttttattcgttcgtttatggtcgcgggtgggattaggtttgtttggatttaggggttttaaatgttatgagatacggggtttggtttggagaatgttataagtagcgtttgaggggatgtagggtggttaggtgg

SEQ ID NO: 1430 - DNA, 460 bp, Artificial Sequence
  chemically treated genomic DNA (Homo sapiens)
ttatttggttattttgtatttttttaggcgttgtttgtgatattttttaaattagatttcgtgttttatgatatttgggatttttgggtttagataggtttagttttattcgcggttatgggcggacgaatggaaggaagaataataataaaatagagacgaggggtttgtgcgattagcgatatttgttaggatgggggcggttgtggaaggtgtttgggacgtcgcggacgtagttaggttacggtgggcgcggttggacggagtcgtcggggacgcgggaagcgttagttttcggatatttgcggacgttttttttgttcgcgtttcgcgtttcggtcgtcggttttatttgcgaagtttttggtgaagattagggtgattagtaggatgggtattagtacggtgtcgatggtgattattcggtcgaacggtagttttagttttagttgtagaagta

SEQ ID NO: 1431 - DNA, 474 bp, Artificial Sequence
  chemically treated genomic DNA (Homo sapiens)
ttttgtatttgggaaagaggtacgtagtaataattttttttttttgaagttagttaggatatttttgttggagtcgacgtttgtgtggatagggttagtacgtgagttgggttgaatttgttagttgatttatgtttaagtgtgaatattttaattttcgatacgaaagtttatttttttttttatttttagggtggattagtggtatttgttttatttttttttatttttttaggaagtataagtggcggtgttatgtgtacgttgagttgtagtttttgtcgttttatcgagtttttattggattgttaaggaaagggttttaggagatcgaggtgtggtgggcgagtttgttcgttggtcgtgaattttgggtttggtgtgagtgggttagggagggaggttttgattttttatttaggtaggttcgggagggtttggattgggatagtagggtggaatgatagttaatga

SEQ ID NO: 1432 - DNA, 474 bp, Artificial Sequence
  chemically treated genomic DNA (Homo sapiens)
ttattagttgttattttattttgttgttttaatttaagttttttcgagtttgtttgagtaagaaattaaggtttttttttttggtttatttatattaaatttaaggtttacggttagcgggtaaattcgtttattatatttcggttttttaagattttttttttggtaatttaatgaaagttcggtggaacgataaaagttataatttagcgtgtatatgatatcgttatttgtgttttttaggagggtgagaggagatgaggtaggtgttattaatttattttaaaaatagggagaaggatgagttttcgtgtcgggggttggggtgtttatatttaaatataaattaattggtaaatttagtttaatttacgtgttggttttgtttatatagacgtcgattttagtaaaaatgttttgattgattttaggagagaggaattattgttacgtgttttttttttaggtataggg

SEQ ID NO: 1433 - DNA, 293 bp, Artificial Sequence
  chemically treated genomic DNA (Homo sapiens)
aggtttttttttgtgatagatcgggcggggttaggaggaggggtagggcgggtatttcggttcgaagatttaggaattgttttggtttggtttggggtttatatttgacgtttggcgagggttggtttcgggtttggttttatcgggtttgggagggacgggcggttggaaataaatggttttttttagttttaggtaggacgttttaagggacgaaagtttagtaaattttaaggtttatttttttgataattattaataagagttttttttttttttttttgttttttagg

SEQ ID NO: 1434 - DNA, 293 bp, Artificial Sequence
  chemically treated genomic DNA (Homo sapiens)
tttggagagtaggagaagaaaaaaggagtttttattggtggttgttaaggagatgggttttggggtttgttgaattttcgttttttaaagcgttttgtttggaattgagaggggttatttatttttagtcgttcgttttttttaggttcggtgggattagattcgaagttaattttcgttaggcgttaggtgtagattttaggttaggttagagtagtttttgggttttcggatcgggatgttcgttttgtttttttttttggtttcgttcggtttgttatagggggaggttt

SEQ ID NO: 1435 - DNA, 265 bp, Artificial Sequence
  chemically treated genomic DNA (Homo sapiens)
tggagtttatttttttttgttcgtatcgcgggattttatagtcggtggggcgggggagttttacgagggttgttagggaggggttgttgattgttttatcgtttttgatttttttagttaagttttttaatgtttttcgggttgtagatggtgggcgttgttgtttttttttatcgttcgttttggaggtagcgttgggataattttgttttttacgttttttattgtcgttaacgtttttatttattttattgtggattgattt

SEQ ID NO: 1436 - DNA, 265 bp, Artificial Sequence
  chemically treated genomic DNA (Homo sapiens)
aggttagtttatagtgggatgaatgggggcgttggcggtagtagagggcgtgggggatagggttgttttagcgttgtttttagggcgggcggtgagaggaggtagtaacgtttattatttgtagttcgagggatattgagaggtttggttgggggaattaggggcggtggggtaattagtaatttttttttagtagttttcgtgggattttttcgttttatcggttgtgaggtttcgcggtgcgggtaagggagggtgggtttta

SEQ ID NO: 1437 - DNA, 401 bp, Artificial Sequence
  chemically treated genomic DNA (Homo sapiens)
gtttttgagatagatagaaatgtggttttttttagagagagagatagacgtttttttcgtttttttgtaatttattgggaggaaagggatggagggtcggggcggggaagaggcgcggttttttttttatttagagggtgtgtatagagatataggtacgtagaagtttgtgaatcgtagttttttcgtcgttagttggtttaggttgggagtggtagagttggggtgtttatagtagtttaggtttttatagtcgaggtcgtcggtaaagattagtacgatgttgggcggacgggtaacggttaggttagtagttagggttaggaggagggatcgcggtgtttttatggatatgggatcgaggggtttgttttaagagagggagggttatttggttttag

SEQ ID NO: 1438 - DNA, 401 bp, Artificial Sequence
  chemically treated genomic DNA (Homo sapiens)
ttggagttaagtagtttttttttttttgggatagatttttcggttttatgtttatgggggtatcgcggtttttttttttggttttggttgttggtttggtcgttgttcgttcgtttaatatcgtgttgatttttgtcgacgatttcggttatggggatttgggttgttatgggtattttagttttattatttttaatttggattagttggcggcgggagggttgcggtttatagatttttacgtgtttgtgtttttgtgtatattttttaggtaaagagggggtcgcgtttttttttcgtttcgattttttatttttttttttttaatggattgtaggggggcgggaaaaacgtttgtttttttttttagggaaggttatatttttgtttgttttagggat

SEQ ID NO: 1439 - DNA, 493 bp, Artificial Sequence; identical to SEQ ID NO: 857
  chemically treated genomic DNA (Homo sapiens)

SEQ ID NO: 1440 - DNA, 493 bp, Artificial Sequence; identical to SEQ ID NO: 858
  chemically treated genomic DNA (Homo sapiens)

SEQ ID NO: 1441 - DNA, 499 bp, Artificial Sequence
  chemically treated genomic DNA (Homo sapiens)
atttgtaagtgttatattttattgggtgaaattttaagattttttttaggggattttattcgttttttttttttcgttattatgtagcgtcgagaaatagagttttgaacgaatttttagatgttcgtgcgttggggtttttttaggacggcggcgtttagtcgtttttgggttagggcgacgtttggaattgggtagggtttttggtatcgggatttcgaaaagtagatttgtttttttttgtttagtcggttttttttttttttgtagtcggttttttgtattcgcgttttttttgttagtcgagggtttttagttttaattttatttttttagttgtgcgtttatagcgatcgttttttttgtagggacgtacggatttggtggtggagttttggtcggtaggattggataggaatcgaaggggcgaggcgggttcgggggtggtgcgttttaattgggtgttgtttttagggggtggggtttgattttttatttt

SEQ ID NO: 1442 - DNA, 499 bp, Artificial Sequence
  chemically treated genomic DNA (Homo sapiens)
gaaataggggattaggttttattttttggggatagtatttaattggagcgtattattttcggattcgtttcgttttttcggtttttgtttagttttgtcggttaagattttattattagattcgtgcgtttttatagggagggcggtcgttatgaacgtatagttgggagggtggagttggagttggggattttcgattggtagggaggacgcggatgtagggggtcgattgtaaggggaaggggaatcggttggatagggagaagtaggtttgtttttcgggatttcggtgttagggattttgtttagttttaggcgtcgttttgatttagaaacgattgggcgtcgtcgttttggaaaggttttagcgtacggatatttgagggttcgtttagagttttgtttttcggcgttgtatggtggcggaagggagggagcgaatgggattttttaaaagggattttagagttttatttagtgggatgtgatatttgtaggt

SEQ ID NO: 1443 - DNA, 299 bp, Artificial Sequence
  chemically treated genomic DNA (Homo sapiens)
gttttgtagaggtgtaggggtattttatttagaaggggttatttattggttttttgtggttaaaattagttttaagtaggattttttatggttggagtcgtttttaaaggggcgtcggtttttatttaggtgtgattttgagcgttgtttagttgaaaaggcgtgatgatagggagtatacgtgaggttattcgggaagaatattttgttaagtgtagaggtcgtaaaaacgtggaatatggttttgttttttatgttttattgaaaatgattattagaagtagaaattgggtttgtgt

SEQ ID NO: 1444 - DNA, 299 bp, Artificial Sequence
  chemically treated genomic DNA (Homo sapiens)
atataagtttagtttttgtttttgatgattatttttaatagagtataaaaaatagagttatgttttacgtttttacggtttttgtatttggtaaaatatttttttcgaatggttttacgtgtgttttttattattacgtttttttagttaggtaacgtttagagttatatttgagtggaggtcgacgtttttttggaggcgattttagttataaaaagttttgtttggagttggttttagttatagagggttaataaatggttttttttgaatgaggtgtttttgtatttttgtagagt

SEQ ID NO: 1445 - DNA, 270 bp, Artificial Sequence
  chemically treated genomic DNA (Homo sapiens)
tttttggtttttttttgttatgtaatcgtatcgggagggtggagtgttggtgtttttagtttatttaatttggatggagttgcgggtttattagtttggggattggttttatcgtttgttttgtttagtagtcgcgttttttcggattttttgttttagtttgaattttttttttgttttggttttattttaagacgaagattgtgtaatttagaaaatgtagcgtaagtaattatgtttagtgtgatgttaaatattttttaaaggtag

SEQ ID NO: 1446 - DNA, 270 bp, Artificial Sequence
  chemically treated genomic DNA (Homo sapiens)
ttgtttttgggaaatgtttagtattatattggatataattatttgcgttgtattttttgaattatatagttttcgttttagagtggagttagggtaaaagaggaatttaagttggaataaggagttcgagaagacgcgattgttggatagaataagcgatgaagttagtttttaaattgatgagttcgtagttttatttaaattaaatgggttgagaatattaatattttattttttcggtacgattgtatggtagggaggaattaaaaa

SEQ ID NO: 1447 - DNA, 471 bp, Artificial Sequence
  chemically treated genomic DNA (Homo sapiens)
ggagttttgtgtagtatttgggttttttttgtgtgtgtgtgtatcgggtacggaggtattttttttttttgtcggagtttagtttgtgcggacgtagtgtatattcggtataggaagtagagtcggagatgttggtattgttagttgtgtcgtttttagggcgttttattttaattttttagagtggattattttttattgtaagtagaaataaagtttggttaaaggtttatcgtataaattagtagaaaacgttcgtagttgttgatttgggaagtggtttttgaatgtttataaaatttggttttgagtagtagcgaagttagtatatgttcgagcggtttttagtaggcgcgtagaagtcgcgtcgttttcgggaagtagggttagaggttaaggattgtgaaaagtttttatttttagtattaattatgttaggtagattgtttgggggatgtttattttgaaagt

SEQ ID NO: 1448 - DNA, 471 bp, Artificial Sequence
  chemically treated genomic DNA (Homo sapiens)
atttttaaaatgagtattttttagatagtttgtttggtatgattgatgttgggggtggaagttttttatagtttttggtttttgattttgtttttcgagggcggcgcggtttttgcgcgtttgttgggggtcgttcgggtatgtgttgatttcgttgttgtttagagttaggttttgtaaatatttaggagttattttttaggttagtaattgcgagcgttttttgttggtttgtacgataagtttttaattaagttttatttttatttgtaataaaggatgatttattttgggaggttaaaataaagcgttttaggggcggtatagttggtaatgttaatattttcgattttgttttttgtatcgggtgtgtattacgttcgtataagttgggtttcgataggaaggggggatgttttcgtgttcggtgtatatatatatagaaggggtttaggtgttgtatagagtttt

SEQ ID NO: 1449 - DNA, 343 bp, Artificial Sequence
  chemically treated genomic DNA (Homo sapiens)
tttattattattttgtatttttttgtttttattttcgttttttatttagtagagagagtgagtttattataaatataagttattttagttgtttttttgagaattttttatggttatttgtttttcgttaaataaaatttatagtttcgatcgcggtttagggattttatgtaacgagttttagtttgcgttttcgttattcggtttttttttcgttttaaagtattagggtttttatttgaaatttatcggtgtcgcgagtttttagtaggttatttcgggtttttttttttatttttagtttggttaggtattttttgttttggtagttttttttagagtt

SEQ ID NO: 1450 - DNA, 343 bp, Artificial Sequence
  chemically treated genomic DNA (Homo sapiens)
ggttttggagaaggttgttagagtaggggatgtttaattaggttgaaggtgaagagggggattcggagtggtttgttagggattcgcggtatcggtgagttttagatggaggttttggtgttttagaacgagaagagggtcgagtggcggaagcgtaggttgaggttcgttatatggggtttttaggtcgcggtcgggattgtggattttatttgacgaagaataggtggttataggaggtttttaaggaggtagttgggatgatttatgtttgtaatggatttattttttttgttgagtagggggcgagggtggaagtaggggagtataaggtgatggtggg

SEQ ID NO: 1451 - DNA, 399 bp, Artificial Sequence
  chemically treated genomic DNA (Homo sapiens)
tagaagtgggtttggtttattttgaagatttttttttgttgtggtattttttggtgttggaggaatgagtgttagttggtgttttttgtttggtttgaaaggttgatatgaattgtgtatttgattttggtagttgattgtgttgattttttagttttaattataatgagtatgagtatgaatgttttgaaatatagacgtatacgagttgttaaatacggtgagttattatatttttaatttttaggtaagtttaggtgttaggggaagcgatttatatattaaagagatgaagttttggtttttgcgggcgggggcggggagagggttggggagttgttggttttggggtgggagcgtatatttttgtttgttagattagaggatgtttgagaggtg

SEQ ID NO: 1452 - DNA, 399 bp, Artificial Sequence
  chemically treated genomic DNA (Homo sapiens)
tattttttaggtattttttgatttgatagataggaatatgcgtttttattttagagttaatagttttttagtttttttttcgttttcgttcgtagaaattaggattttatttttttgatgtataggtcgttttttttggtatttaagtttgtttgaaagttgggaatatgatgatttatcgtatttggtagttcgtatgcgtttatattttaagatatttatgtttatgtttattataattagggttggagaattagtatagttaattgttaaaattaagtgtataatttatattaattttttagattagatagagagtattagttgatatttatttttttagtattaggaaatgttatagtagaagagagtttttaagatgggttagatttatttttg

SEQ ID NO: 1453 - DNA, 431 bp, Artificial Sequence; identical to SEQ ID NO: 843
  chemically treated genomic DNA (Homo sapiens)

SEQ ID NO: 1454 - DNA, 431 bp, Artificial Sequence; identical to SEQ ID NO: 844
  chemically treated genomic DNA (Homo sapiens)

SEQ ID NO: 1455 - DNA, 497 bp, Artificial Sequence
  chemically treated genomic DNA (Homo sapiens)
gattgggtatgggaggaggtttttggggagttagtgttttttagagtttaggttcgtgggtgagttgagtagagggagtcgttgtcggattttttcggtgttcgtttcgtgtttgatttcgagggattttattggttgttgtttttgtagttgcgattatggataggttttagttttagattggttgttttttaaagtgaggggaggggttttgtttggtaaagttagaaggataattaagttgtaaagttttttgtgtttttttgggaaaaagagtgggttttttatttacgtgttaggttacgtatatggtattattggaggtttttatacgtagatttgagttagtgttatttagggtgttttcgtgattaaggatttatatataattatatatagaatttagaggtaaattgaaattaaaaacgggttaattatttaaatatttaggtaaaattattatgtttataaatgagttattaggttaatgtggggtt

SEQ ID NO: 1456 - DNA, 497 bp, Artificial Sequence
  chemically treated genomic DNA (Homo sapiens)
gattttatattggtttggtgatttatttatgagtataatggttttgtttgaatgtttggataattggttcgtttttggttttaatttgtttttgggttttgtgtgtggttgtgtgtgagtttttgattacggagatattttgagtggtattggtttaagtttgcgtgtggggatttttagtagtattatgtgcgtggtttggtacgtgggtgaaagatttatttttttttttagggaagtatagaaagttttgtagtttaattgtttttttgattttattagataagatttttttttttattttaaagagtagttagtttaaggttgggatttgtttatggtcgtagttgtaagggtagtagttagtggggtttttcggagttaggtacggggcgggtatcgaagggattcggtagcggttttttttgtttagtttatttacgagtttgggttttggagggtattgattttttaggagtttttttttatgtttagtt

SEQ ID NO: 1457 - DNA, 272 bp, Artificial Sequence
  chemically treated genomic DNA (Homo sapiens)
aatagaggtggttgtttgttttttaagttagtttggttttgtttggtatgtataggtttcggggatcgatatgttgttttgattgagatcgttttgattttgttaaattttacgtttggtttgggttatagaagtataagttttttgggtggtattattggttgttttttggattggaatataaagttttttttaagatgatttgtggtttgttttttggtaattaataagttcgtagtgttatacgatttatgagatatggattgaaggtt

SEQ ID NO: 1458 - DNA, 272 bp, Artificial Sequence
  chemically treated genomic DNA (Homo sapiens)
ggtttttagtttatgttttatgggtcgtatgatattgcgggtttgttggttgttaagaggtagattataggttattttgaggaggattttatgttttagtttagaaagtagttagtggtattatttaggggatttgtgtttttgtggtttaggttagacgtagaatttgataaagttaggacggttttagttagagtagtatgtcggttttcggggtttgtgtatgttaggtaaggttaagttggtttaaagagtaagtagttatttttgtt

SEQ ID NO: 1459 - DNA, 313 bp, Artificial Sequence
  chemically treated genomic DNA (Homo sapiens)
agagttgttttttttgttttatttggggttttagggcgttgtagttcgttattagagggattagatgttcgtggttttttaagggtttagtgtggagttatttatttttattagtatagagaagatttacgttttgtggttgaagtaggggggtagttttttcgatagttgtaggtcgttcggtttcgcgtttggggtatagttggcggggttttgtcggtttcgttttagcgtgggtattcggttataggttagtttttttttgaatggtttttgggttatggtatttggggatattatagttgtgttgaat

SEQ ID NO: 1460 - DNA, 313 bp, Artificial Sequence
  chemically treated genomic DNA (Homo sapiens)
atttagtatagttgtggtgtttttaagtgttatgatttaggagttatttagagaggagttggtttatgatcggatgtttacgttggagcggggtcggtaagatttcgttagttatgttttagacgcgaagtcgagcgatttgtagttgtcgaagagattgtttttttgttttagttataagacgtgggttttttttgtgttgatgggggtgagtagttttatattaagtttttggagggttacgagtatttggtttttttggtgacggattgtagcgttttggagttttaggtgggatagagagagtaatttt

SEQ ID NO: 1461 - DNA, 492 bp, Artificial Sequence
  chemically treated genomic DNA (Homo sapiens)
ttaaggattttaattttggggggtttcgtttttttatttgtttatattaggtattgtttattttattgggcgggcgttgttcgatgtttttttttaggattttttttgttagatttagtagtagtagtttttggaggggaacgtcgttttattttttattgtttttaggtttgcggtttatagtggggttacgttttttgagtttggtttttatagtcgttttggttcgtttagtttttttatttgtcggagtaggagtagtataaacgttggagttgtttagttttgggtagatttcggttttgtatacgcgttgtttgtttacgcggagttttcggtttttttgggtgataaatggggttttttttggttttttaagatgaagttgaagattgtggttttttttgggtttgtcgggggtatgtgggtttggtagttgtttttgtatattttaagggtcggtttaggggaggtttagaggaaagaggaggt

SEQ ID NO: 1462 - DNA, 492 bp, Artificial Sequence
  chemically treated genomic DNA (Homo sapiens)
atttttttttttttttaggttttttttaaatcggtttttagggtatgtagaggtagttgttaggtttatatattttcggtaggtttaaggagggttataatttttaattttattttggaggattagggagagttttatttgttatttagagaggtcggggatttcgcgtggataggtagcgcgtgtgtagggtcgaggtttgtttagggttgggtaattttagcgtttgtgttgtttttgtttcggtaagtggaggagttgggcgggttagagcggttgtgggagttaagtttagagggcgtggttttattgtgagtcgtaggtttgaggatagtgagaagtaaagcggcgtttttttttaggggttgttgttgttgggtttggtagagagagttttgggggagggtatcgggtagcgttcgtttagtaaggtgggtaatgtttggtataggtaggtgggagggcggggttttttagggttggggtttttga

SEQ ID NO: 1463 - DNA, 410 bp, Artificial Sequence
  chemically treated genomic DNA (Homo sapiens)
agagtatgaatttggtaggggtttttggaatcgtatgtgttgtttgtttgcgtttttaagtgttgtttttggagtgaattagagtttgtaggcggatcgtattataggttgtggtggaattatttttaggtttatggtagttggatttatagatagttgagaggataattgtttttttttagtggcgagttttggttttattttttaagagttgggtcgattttagagtagggttttggaaagggtttgtttttgggaagagtttgcgaatgtttggagattgggtaggtaagagtttttttaaagttggttagttttggaaaaatggtatcgggtttttgggttatttggaaattattatttgtttttattttgtaaagtagggataggagggaaatgttaagtaaaaa

SEQ ID NO: 1464 - DNA, 410 bp, Artificial Sequence
  chemically treated genomic DNA (Homo sapiens)
tttttgtttgatattttttttttgtttttgttttgtagagtaaagatagatggtaatttttaggtagtttaggagttcggtgttatttttttaagattgattagttttgaaaagatttttgtttgtttagtttttagatattcgtaaattttttttaaagataaattttttttaaagttttgttttaaaatcgatttagtttttaggaggtgaggttagggttcgttattgaaagggagtaattgtttttttaattgtttgtgggtttagttgttataggtttggaggtggttttattatagtttgtggtgcggttcgtttgtaggttttgatttattttagggataatatttaaaaacgtaagtaggtaatatatgcgattttaggagtttttgttagatttatatttt

SEQ ID NO: 1465 - DNA, 327 bp, Artificial Sequence
  chemically treated genomic DNA (Homo sapiens)
ttttttagggtttttagtgtagagttttttggggatattatggttatttttgtttagatgagagggagtcggttgtttgtgatagcgtcgtaaaatgtcgttagggttttttttttttttttttttttttttttttcgtttttttttggttggtggttttttgtaggttttcgtttttgttggtgttggttataatgtttttatttttagggtttcggcgttttagttttttgcgtttatcgcgtttgttcgttagaatttttgtgtttttggtgcgtgtggtttgtcgagtttcgagtttttgttttttttagttttttttttttt

SEQ ID NO: 1466 - DNA, 327 bp, Artificial Sequence
  chemically treated genomic DNA (Homo sapiens)
ggaggaaagagggttgaggagaataggggttcgaggttcggtaggttatacgtattaagggtatagggattttggcgggtaggcgcggtgggcgtagggggttgggacgtcgaaattttgggagtggggatattgtggttagtattagtagggacgggagtttgtaggaaattattaattagagagggacgaggaagagagaaaggaggagggagggaaagttttggcggtattttgcgacgttgttataggtagtcggtttttttttatttggataggagtggttataatgtttttaaggaattttgtattggagattttaggagg

SEQ ID NO: 1467 - DNA, 426 bp, Artificial Sequence
  chemically treated genomic DNA (Homo sapiens)
ggagataaatttatagtggtttagatttatatgatttagtggatgggtatcgtgaggaggtttttttaggaagtttttaatttggtgattattacggtgggttacgaacggacgagtgtagagtcggttagtcggattttttttaagcgtatttttttttttcgatatttggtttttcggagtcgggaattttttcgtcgtttttttgttcgtagttaatagagattttttttattgaggaaaaggtatatagattcggaatcgttagatattgtaagtttattatgttttaaaaaatattaaaataatattgaaagttttttttttttagtttttttagggagggggttttagatattaaatcggggaagttattttttttagaatagttgttagttaaagtttaggtattttttgttttttgta

SEQ ID NO: 1468 - DNA, 426 bp, Artificial Sequence
  chemically treated genomic DNA (Homo sapiens)
tataggggataggaagtgtttgggttttgattgataattattttggaagaagtaattttttcggtttgatgtttgggattttttttttgggaggattggaggggaggagtttttagtgttgttttaatattttttaaaatataataagtttataatatttggcggtttcgaatttgtatgttttttttttagtgaagaaaatttttgttggttgcgagtagagaagcggcggaaggattttcgatttcgggaagttaggtgtcggaaggaggaagtacgtttgaagggggttcggttggtcgattttgtattcgttcgttcgtggtttatcgtggtggttattaaattgagggttttttggaaggatttttttacggtgtttatttattgggttatgtgggtttgggttattgtgagtttattttt

SEQ ID NO: 1469 - DNA, 397 bp, Artificial Sequence
  chemically treated genomic DNA (Homo sapiens)
gggttttaggatttgttaggtttacggaagtggtttttgtaattttttttttggtggtagtttttggtgtatttcggtaggggtagtttttttttattatagggattttgtgtgttaggttttagttgcgttgtcgttgaattatggatttaatagtagagaagttttgtaggtcgtttgtgttggttcgggaaatcggggtttagtcggggtttgttacggttttggtgtcgttttgttttttgtcggcgttacggagtaagcggagagatttattttttcggttttaagaggtattaacggaggaggttgagaggtaggagttgaataattgatggttttttttggtttaggatttgttgaaaatgatacggtgtaaggtagaggggttgagagt

SEQ ID NO: 1470 - DNA, 397 bp, Artificial Sequence
  chemically treated genomic DNA (Homo sapiens)
atttttagtttttttgttttgtatcgtgttatttttagtagattttgagttagagaaggttattaattatttagtttttgttttttagtttttttcgttagtattttttaaagtcgggaagataaattttttcgtttgtttcgtggcgtcgataggaagtagggcggtattaggatcgtgataggtttcggttgggtttcggtttttcgagttagtataggcggtttgtaaggtttttttgttattaaatttataatttagcggtaacgtagttggggtttggtatatagggtttttgtgatgaggaggggttgtttttgtcggaatgtattagaggttgttattagggagagagttataaggattattttcgtggatttggtaggttttagggttt

SEQ ID NO: 1471 - DNA, 354 bp, Artificial Sequence
  chemically treated genomic DNA (Homo sapiens)
gtgttttattttttgatttttgttaagtcgtttttagtagtagttggaattttttgaagtggttgttatagatgttggtaaagttcggtttgggatgtttttattttgtattaggtacggggttgtttttgttgtatatttatttggaaattatttatatgttaagtatcgtagaggtaaggggagtttgttattggattgcgtttaatacggttgtagggatatagataagtatattttttggtagaggtacgggttcggttggttggagttgtagtagttgtgtgtggttatagagtttttaaatgagggagatggatggtttcgttttatagtgtgtttagagtatgttta

SEQ ID NO: 1472 - DNA, 354 bp, Artificial Sequence
  chemically treated genomic DNA (Homo sapiens)
tggatatgttttgggtatattgtgaagcgaggttatttattttttttatttggaagttttgtgattatatatagttgttgtagttttagttagtcgggttcgtgtttttgttagggaatgtgtttgtttgtatttttgtagtcgtgttgaacgtagtttaatggtagattttttttgtttttgcggtgtttggtatgtggatgatttttaggtgaatatgtagtagaggtagtttcgtgtttggtgtagggtggaggtattttaggtcgggttttgttaatatttgtggtagttattttaaagagttttagttgttgttgaagacgatttggtaaaggttagagagtgagatat

SEQ ID NO: 1473 - DNA, 382 bp, Artificial Sequence
  chemically treated genomic DNA (Homo sapiens)
tttttgtagagggtggggaagaaaaggatgtttggggtagtttagttttacggtgtggtggggttaggggttgtgtttattatggatttgattttttttttttttgtgattttgttttattgtacgtgtcgggacgggttttaaagattagtttatattagaaattttgattgaggtttttgagaaatgttattttgaattttgttttagtatttggatgtgtttttttatttgatagagttataaagatttttttagttaaaaataaaagtaaagttttgttagattcgtgttcgtggttttaaatttgttttagttattgagtaggagttgagagggaagagagagagaagaatataagatttatatggggaaggatttt

SEQ ID NO: 1474 - DNA, 382 bp, Artificial Sequence
  chemically treated genomic DNA (Homo sapiens)
gaaatttttttttatatggattttgtgtttttttttttttttttttttttagtttttgtttagtggttgaagtagatttggagttacgaatacgagtttggtagagttttgtttttgtttttaattgggaaaatttttataattttattaggtgaaaagatatatttagatattaaggtagagtttagggtaatattttttaggggttttagttaaagtttttgatgtaggttggtttttgaggttcgtttcgatacgtatagtgagataggattataaggaggggaggagttaagtttatggtggatatagtttttgattttattatatcgtggggttggattgttttaggtattttttttttttttattttttgtagagg

SEQ ID NO: 1475 - DNA, 369 bp, Artificial Sequence
  chemically treated genomic DNA (Homo sapiens)
tagagataggtttttgggaattagttgcgtcgggcgggatgaaagtcgttttgatgttttggagcgagagagtagagagaaggaggaagatagatattatttgttagtcgtagggtttcgggtagtagtagtacgttaaggaggagttagggggttgcggggagtttaggagggcgtgggaggtttggtagggttcgttattttataggttggttttttatttgggggtttgtttgtttgcggcgattttttagtttataggaggggacggtcggcgttgatagttttttttttgttttttttacgaagtttttttttggtagtttttgatttttcgtttagaagtaaagttggaatagtttagtaggg

SEQ ID NO: 1476 - DNA, 369 bp, Artificial Sequence
  chemically treated genomic DNA (Homo sapiens)
ttttgttgggttgttttagttttgtttttgagcggaaggttaggggttgttagggaggagtttcgtggggaaagtaaaggggaagttgttagcgtcggtcgtttttttttgtgaattaaagagtcgtcgtagataagtaggtttttagatggagaattagtttgtgaggtggcgggttttgttaggttttttacgtttttttgggtttttcgtagttttttggtttttttttggcgtgttgttgttgttcgggattttgcgattggtaggtagtgtttgtttttttttttttttttattttttcgttttagaatattagagcggtttttatttcgttcggcgtagttaatttttagggatttgtttttg

SEQ ID NO: 1477 - DNA, 425 bp, Artificial Sequence
  chemically treated genomic DNA (Homo sapiens)
ttagaatgaggtaggaggtggaggggttgttttgggcgtttgggggttgttagggattgagttttgagttagtttgagatttaggaaatttcgttaggagggagaagggagaagtagattttggatattagaaagttaggggaagggttataaaaggagtggatgtgacggaagggcgggtttttgggtttttttagaatatattttttgtgtttagggggattagaggggtagagtttattgcgtgaaagttttattgttatgattaggtagtcgggacgtggggtggatgttagaaaagattttacggaataagagagagtttaggatagtaggtaggtttttcgatttttttaggtttttgttttatatacgggttttagaatatatatttggttggaatagtttgagggattaaaaggttt

SEQ ID NO: 1478 - DNA, 425 bp, Artificial Sequence
  chemically treated genomic DNA (Homo sapiens)
gggttttttggttttttaggttgttttagttaaatgtgtgttttggagttcgtgtatggggtaagggtttggggggatcggagagtttgtttgttgttttgggtttttttttatttcgtggagttttttttggtatttattttacgtttcggttatttggttatagtagtggggtttttacgtagtggattttgtttttttgatttttttgggtataggggatatgttttgaagagatttaggagttcgttttttcgttatatttattttttttgtgattttttttttggttttttggtgtttagagtttgtttttttttttttttttttgacggggttttttgagttttaggttggtttagggtttagtttttggtagtttttagacgtttagggtagtttttttattttttattttattttgg

SEQ ID NO: 1479 - DNA, 425 bp, Artificial Sequence; identical to SEQ ID NO: 1477
  chemically treated genomic DNA (Homo sapiens)

SEQ ID NO: 1480 - DNA, 425 bp, Artificial Sequence; identical to SEQ ID NO: 1478
  chemically treated genomic DNA (Homo sapiens)

SEQ ID NO: 1481 - DNA, 473 bp, Artificial Sequence
  chemically treated genomic DNA (Homo sapiens)
gggattgttattatatgggttgtggggaggtagagtttttttgtgttttcgagagtattttttttcggggttttattagtttttaattcgtttttcgaatttttatttttttttttgttttgcgtttttggaaatttagatagcggttttattttcgtgatttatttagtaggaatgtgggagttttcgaattgttttagttaaagttttttaattttttttcggtgatgaatgggtgaggtttttaaatgaaatgtggaggtttttagttttagttcgcggtttttttttttttcggcgtaattatttttgtgtagaatatgttaagtgttttgtttttcgggaatttgtttcgtatgtaaatatttggtgattaagcgaggtttatttaattaagtattttgtaatgatttttaaattaaagaatagtggattaggagtttagttcgtgttggtgatgggaaaggtagttt

SEQ ID NO: 1482 - DNA, 473 bp, Artificial Sequence
  chemically treated genomic DNA (Homo sapiens)
aagttgttttttttattattagtacgaattggatttttaatttattgttttttggtttaagagttattataaagtgtttaattaagtaagtttcgtttaattattaaatgtttgtatgcgaaataagttttcgggaagtagggtatttgatatgttttgtatagaaataattacgtcgaggagggggagggtcgcgggttgggattgggagtttttatattttatttgagggttttatttatttattatcgaaggggaattaaaaggttttagttggagtaattcgagaatttttatatttttgttggatgaattacgggagtggggtcgttgtttgggtttttaaaggcgtagagtaaggggagaggtgggaattcgagaggcgagttgggggttggtggggtttcggggaggggtgttttcggggatataggggagttttgtttttttatagtttatgtgataataatttt

SEQ ID NO: 1483 - DNA, 439 bp, Artificial Sequence
  chemically treated genomic DNA (Homo sapiens)
tgtggtgtgaattaagatatggtgttttttgtttttgttttttttttgtagggagaggggttattttggttttgagtatttttaattttatgtgaattacgcggacgggtggatagttggagggttagtagtagtagtaggagtttttgtttatttgggggtttcgagtgttggtatgatttgattttatggtgtgggcggggttcgggtttatttggaggagtaggatatgtcgtcggattatagttgggggtgttagatttaggttacgttatatttggtgttagagtttaagatttaggaatagaaattgtgtatggggttaagttggtcgtagtttaatatttaggtgattttaggtttaaagtatgtttttggttttcgagacgggtttcgtagttgtagtttatgttttggattttgttagttgggtttggta

SEQ ID NO: 1484 - DNA, 439 bp, Artificial Sequence
  chemically treated genomic DNA (Homo sapiens)
tgttaagtttagttgataaggtttaggatataggttgtaattgcgaggttcgtttcgggggttaggagtatgttttgggtttgaggttatttggatattgggttgcggttaatttggttttatatatagtttttatttttgggttttgggttttgatattaaatatggcgtggtttgagtttggtatttttaattgtggttcgacgatatattttgtttttttaagtgggttcggatttcgtttatattatggagttagattatgttagtattcggggtttttaagtgggtagaggtttttgttgttgttattggttttttaattgtttattcgttcgcgtggtttatatggggttaaaagtatttaggattaaaatagtttttttttttgtagaagaaagataggggtagggggtattatgttttggtttatattata

SEQ ID NO: 1485 - DNA, 188 bp, Artificial Sequence
  chemically treated genomic DNA (Homo sapiens)
gggtggttgtgatgtgtttttttaagaatggattttgtaggtttttttttttttcggttttcggtgtcggaaggaggatatcgcgagtgttgtttgtttgtttatagagagtgtgtagtagtagtagtagtagttcggggttagttttgggaggattaaggatattttagggttttaagttaggggat

SEQ ID NO: 1486 - DNA, 188 bp, Artificial Sequence
  chemically treated genomic DNA (Homo sapiens)
attttttggtttaaaattttgaaatatttttagtttttttaaagttggtttcgggttgttgttgttgttgttgtatattttttgtaagtaaataagtaatattcgcggtgtttttttttcggtatcggagatcgggaggaagaagaatttgtaggatttatttttaaagaaatatattataattattt

SEQ ID NO: 1487 - DNA, 449 bp, Artificial Sequence
  chemically treated genomic DNA (Homo sapiens)
ttttaggttgagtggtttataggttagttggtcgggggttggggagttatatagggtgaacgggtagtagtcggttttatgttttattgttttggttgatgagtttttcggtggttttagtgtgtacgtttgtttgttcgtttgtgtttgtggttatgagcgtgtgtttttatttattttacgattcgtgattattgtgtaagttggttaggaggtaggtggagggtaaggttattagatttggtttcgcgttgtttattgtttttttttttttttttttgtcgtagatacgtaggattcgttcgtttttttgtttattcgtttttacggtgattgagttgcgagagtttgcgttgggtttattttttggttttcgtttttgagttgtttcgtgttagtttttggttcggagttaggttttttgtgttatttatattttttttttttgg

SEQ ID NO: 1488 - DNA, 449 bp, Artificial Sequence
  chemically treated genomic DNA (Homo sapiens)
ttaagggagggagatgtaagtagtatagagagtttggtttcgggttagggattgatacgggatagtttaggggcggaggttagggagtgagtttagcgtaggttttcgtagtttagttatcgtggggacgggtaagtaggagggcgagcgggttttgcgtgtttgcggtagggaggggaggagagaggtagtggatagcgcgaagttaggtttggtggttttgttttttatttattttttggttagtttgtatagtagttacgggtcgtggggtgggtggaggtatacgtttatagttataagtatagacggatagatagacgtgtatattgaggttatcgaaggatttattagttagggtagtggggtatggagtcggttgttgttcgtttattttgtgtggttttttaattttcggttagttggtttgtgaattatttagtttagga

SEQ ID NO: 1489 - DNA, 488 bp, Artificial Sequence
  chemically treated genomic DNA (Homo sapiens)
gattggtgtaggtggttagtagtttaatttgtattgagcgtttattgggtttttatagcgattttgaattgtgtttttgtttatagtgattcggtcggttcgggtatggtagatttagtggcgggtatcgcgggttcggcggttaagagcgtgcggttatttcgttttagtgaggtttacgtggaggttatgaaggaggatttggtcgagtggtttaatgttttgtacggtttgggtttttcgggtggtggcgatggttttttgatagggttggttacgggtacgattttgtgttaatatgttaacgtcgtgatcgaggttgttcgtgtattggtagtcgttcgttcggttcgaggtgtggttttttaggcgtatagtgtagtgtttggtttttttatggcgcgcgataacgtggttatttttatcggttggtgtcgcgtggagttgggtgtgtcggaggtgtttatgtttgagattgaggatttggt

SEQ ID NO: 1490 - DNA, 488 bp, Artificial Sequence
  chemically treated genomic DNA (Homo sapiens)
attaggtttttagttttaaatatgagtattttcggtatatttagttttacgcggtattagtcgatgaaggtggttacgttgtcgcgcgttatgaaggagttaggtattatattgtgcgtttggaaggttatatttcgggtcgggcgggcggttgttaatgtacgggtagtttcggttacggcgttggtatgttggtatagggtcgtgttcgtggttagttttgttaggaagttatcgttattattcgggagatttaggtcgtataaggtattgagttattcggttaggtttttttttatggtttttacgtaggttttattggagcgaaatggtcgtacgtttttggtcgtcgagttcgcgatgttcgttattgggtttgttatgttcggatcggtcgagttattgtgggtaggaatatagtttaggatcgttgtggggatttagtaagcgtttagtataaattaagttgttggttatttgtattagtt

SEQ ID NO: 1491 - DNA, 355 bp, Artificial Sequence
  chemically treated genomic DNA (Homo sapiens)
ttttagggttttttttttaatttattttcggtttttttaaggtttttatttacgcggacgagttttttagtttgtcgtagagttagtcgttttgggtttcgggtattaatatttttattacgtttttagcggagaagcgtagtagcgtgtggttggcgtttttcgagtgggagattagggcgcggatttttttggcgttttcgtcgtcgttcgggcgttcgttaaaggagttggagcgcgagttttgggcgttgtcgttgtagagcgaggttgtgggcgggagagcgcggcggtacgtgggtaggaagttttttttggcgtttgttttcgattttttttgttgtagttttatttt

SEQ ID NO: 1492 - DNA, 355 bp, Artificial Sequence
  chemically treated genomic DNA (Homo sapiens)
ggggtggggttgtagtaggagggatcgagggtagacgttaggaagaattttttgtttacgtgtcgtcgcgttttttcgtttatagtttcgttttatagcggtagcgtttaaagttcgcgttttaatttttttggcgagcgttcgggcggcggcgggggcgttaggagagttcgcgttttggttttttattcggagggcgttaattatacgttgttgcgttttttcgttggggacgtggtggaggtgttggtgttcgaggtttagaacggttggttttacggtaagttggagggttcgttcgcgtgagtgggagttttggaggggtcgggggtgggttgagaagaaggttttgggg

SEQ ID NO: 1493 - DNA, 385 bp, Artificial Sequence
  chemically treated genomic DNA (Homo sapiens)
attagtgattatagggtaatttgtagtatttgttgggggtttagtaggtaagatgttttttgtttgttgttgtttgttatggttgtttggtggttatggtcgggggcgggtttgttatgttgggaattgtttagaggttgcggttagtttgaggtttttcgttttggcgagttagttttcgagtgtagattgtcgtcgatgatttttgttttttggggtattcgtgcggttatgtgggttgggtaggattggtatttttttttttttatcgttgttatggttaggggcgggtttatttttcgaggttgtgcggagaggattttaggttgttgtatgtgagtagagtagtcggtgtttggttcggatttttttgttatttggggtt

SEQ ID NO: 1494 - DNA, 385 bp, Artificial Sequence
  chemically treated genomic DNA (Homo sapiens)
ggttttagatggtagaggggttcgggttagatatcggttgttttgtttatatgtagtagtttggggtttttttcgtatagtttcgggaggtgggttcgtttttggttatggtaacggtggggaggggagaatgttagttttgtttaatttatatggtcgtacggatgttttaggaggtaagaattatcggcgatagtttgtattcgggggttggttcgttagggcgaggggttttaggttggtcgtagtttttgagtagtttttagtatgataagttcgttttcggttatggttattagatagttatgatagatagtagtaggtaggggatattttatttgttgagtttttagtaggtattgtaaattgttttgtagttattggt

SEQ ID NO: 1495 - DNA, 452 bp, Artificial Sequence
  chemically treated genomic DNA (Homo sapiens)
gtggagttttggggttattagagaagatatagtttagagaatttgagtaagaaattttatagtttgagtttagtagttattaagcggagggaaagtttcgttttttcgtgaaattaaacgaaggtagttgagtattgtgattattgtattatttttgacgtttttgttggtttttaatttagttataaattttacgggcgggggacggtataacgttttatttgtttggttacgcgattcggtagtatttggattttgtttagttagttggtaggaaaattatattttttatgattgatggagtgcgtgtttgtggggattaagaggcgggggttgtgtggggttgagttattgtcgttagggtttttaatattgttgtttagcggtggtttgggggttgtttcggggtttttatttattaaatttaaggggtttttgagaggggaggttgt

SEQ ID NO: 1496 - DNA, 452 bp, Artificial Sequence
  chemically treated genomic DNA (Homo sapiens)
atagtttttttttttagaaattttttgggtttggtgggtgagggtttcgaggtagtttttaggttatcgttgaatagtagtattgaaggttttggcggtagtggtttagttttatatagttttcgttttttggtttttatagatacgtattttattaattataagaaatgtgatttttttgttagttggttgggtaaaatttaagtgttgtcgaatcgcgtggttaggtaggtggggcgttgtgtcgtttttcgttcgtgggatttataattgagttaggagttagtaggggcgttaggagtggtgtaatggttataatgtttagttgttttcgtttaattttacggagaagcggggtttttttttcgtttagtagttattgaatttagattgtgaagttttttgtttagattttttggattgtgttttttttggtgattttaagattttat

SEQ ID NO: 1497 - DNA, 482 bp, Artificial Sequence; identical to SEQ ID NO: 1023
  chemically treated genomic DNA (Homo sapiens)

SEQ ID NO: 1498 - DNA, 482 bp, Artificial Sequence; identical to SEQ ID NO: 1024
  chemically treated genomic DNA (Homo sapiens)

SEQ ID NO: 1499 - DNA, 499 bp, Artificial Sequence
  chemically treated genomic DNA (Homo sapiens)
taaggttatgattgagaagttggagaaggagggcgcggtcgggtgagttgtagaagtgggttgggtagtggggggcggggcgtgataggtagtggggggcggggtttgatagttggttcggtagaggcgggaagatcgcgcggttagatttgtggtgtaaaggttcgaaggttatggaaggcggggtttgggatttattgggtgggtttatcgaggtatgttttttatagtcgtgtgatttggttttgatatcgtttttatagtagttttggcggatttcgcgtagtcgtgtagcgatttattagtttcggggtttttaacgttaatagtattaagtagatgttgttggattggtgtcgagttaagattcgcggttacgaggtgagtttcgggaggttagggggtttggaggtttttttagattttagtttaatattttttttttagtagagtttttattatttagtatattttttgttattgtgtggttttataggga

SEQ ID NO: 1500 - DNA, 499 bp, Artificial Sequence
  chemically treated genomic DNA (Homo sapiens)
tttttgtgaggttatatagtggtaggaagtgtattgggtaataggagttttgttaagaaggaggtgttgagttggggtttggggaggtttttaggttttttggtttttcggggtttatttcgtagtcgcgagttttggttcgatattagtttagtagtatttgtttgatgttgttggcgttggggatttcgaagttggtggatcgttgtacggttgcgcggggttcgttagggttgttgtaggggcggtgttaggattaggttatacgattataaggggtatgtttcggtgggtttatttagtggattttaggtttcgttttttatgattttcgggtttttgtattatagatttagtcgcgcggttttttcgtttttgtcgggttaattattaagtttcgttttttattgtttattacgtttcgttttttattgtttagtttatttttgtagtttattcggtcgcgttttttttttttagttttttaattatggttttg

SEQ ID NO: 1501 - DNA, 397 bp, Artificial Sequence
  chemically treated genomic DNA (Homo sapiens)
atatgttggtggtagttttggtatgttatcggggggtacggcgttttatgttaggcggtattcgttgtcgagttttattgtttagttttatttttggtacgtttatggtttgcggtaacgtgggtttaagggttgtgtttttggatttggtataattggttattattattatatttttgtttattttggttttgtcggcgttgttgttgggtcgtcgttattatttattttagttggtcgttatgggttcgttttgtttgggggtcgtttgtagtttggttggagagtttcggatattttttatcggttgtggttttttgttcgtagttatttgttttcgcggatttaagtcggtttagtaaagtaagtgtttgggtggttaattgagaaggtgggg

SEQ ID NO: 1502 - DNA, 397 bp, Artificial Sequence
  chemically treated genomic DNA (Homo sapiens)
ttttatttttttaattggttatttaggtatttattttgttgaatcgatttgagttcgcggaggtaggtggttgcgagtaggaagttatagtcggtagggggtgttcggaattttttagttaggttgtaggcggtttttaggtagagcggatttatggcggttaattgaagtgggtggtggcggcggtttagtagtagcgtcgatagggttagggtgaatagaggtgtggtggtagtaattagttgtgttaggtttaggggtatagtttttaggtttacgttgtcgtaggttatggacgtgttaaaggtgagattgagtagtaggattcggtagcgagtgtcgtttggtatggggcgtcgtgtttttcggtggtatgttagggttgttattagtatgt

SEQ ID NO: 1503 - DNA, 353 bp, Artificial Sequence
  chemically treated genomic DNA (Homo sapiens)
agaatagtgaatgtggattattttgttttatttattttatttagtatttacggtcggtataggttgggttgttgtagaagatgtagttagtggttcggttgtagttacgtagtacgatgaagtggttttggtagttaggagtgcggtagaagtagtggtggttattgggggtgaagtagtagtatttgatagggttggagtataggttatagtgtagtattttcgagtttattagtacgatggttatatggttttgagttaggtgcgtttggatgttttttatatttattgtgttgtgggcgggaggggggttagttggtgttgttgggtttttattttttattttttaaatg

SEQ ID NO: 1504 - DNA, 353 bp, Artificial Sequence
  chemically treated genomic DNA (Homo sapiens)
tatttgagggatggggaatgggggtttagtagtattagttgatttttttttcgtttatagtatagtgagtgtgaaggatatttaggcgtatttggtttagggttatgtggttatcgtgttggtgaattcgggggtgttgtattgtgatttgtgttttagttttgttaagtattgttgttttatttttagtggttattattgtttttgtcgtatttttgattattagggttattttatcgtgttgcgtggttataatcgggttattggttgtattttttataataatttagtttatgtcgatcgtgagtgttgggtggggtgggtgaggtagagtggtttatatttattgtttt

SEQ ID NO: 1505 - DNA, 483 bp, Artificial Sequence
  chemically treated genomic DNA (Homo sapiens)
tttagagatatttttttgggaagatagttggaaggtagggttgagtcggggttatttgtgatttagcggtgaggtgatgaggtattgacgaaagtattgtattttttttttttgagaaacgttttggtattagatgagttttgggggagggaggagaggaatttggtagggatttggttataagttatttggagggtggcgtgaggatcggaaaagtcgttgttcgttttgtttggttttattttttgaatgaggttattgaatgtgtacgggaggtttagcgttgttttattttagtttgatggagaaattttattcgaaattttaaagtagggtagggatatttttattagatatttttgtagtttttgttttgtgggacgaagtaagggatgatgatatattcgtttgtttattcggaagtgagttttaggttattgtattagaagggtgataatttaatataagttattgttaagtaat

SEQ ID NO: 1506 - DNA, 483 bp, Artificial Sequence
  chemically treated genomic DNA (Homo sapiens)
gttgtttagtaatgatttgtgttaggttgttatttttttgatgtaatgatttgagatttattttcgggtgggtaggcgagtgtgttattattttttgtttcgttttataggataaaggttgtaaaagtatttggtgggaatgtttttgttttgttttgggatttcgggtaggatttttttattaggttggagtggggtagcgttgagtttttcgtgtatatttagtgattttatttaggggatgagattaaatagaacgggtagcggttttttcggtttttacgttattttttagatggtttataattagatttttgttaaatttttttttttttttttttaagatttatttgatgttaaagcgttttttaaaagggggaaatatagtattttcgttagtattttattattttatcgttgggttataaatgatttcggtttagttttgttttttagttgtttttttaaggggatgtttttgaa

SEQ ID NO: 1507 - DNA, 498 bp, Artificial Sequence
  chemically treated genomic DNA (Homo sapiens)
attaatttttttaatttatttattttgtagatgaattatggcgcgtattaagtagacggttcgtaaatttataggcggtaaagtatcgcgtaaatagttggttattaaggtagttcgtaagagcgtttcggttacgggcggcgtgaagaagttttatcgttatcgttttggtatcgtggttttgcgcgagattcgtcgttattagaagtttatcgagtttttaattcggaagttgtcgttttagcgtttggtgcgagaaatagtttaggattttaagatcgatttgcgtttttagagtttcgcggtgatggcgttgtaggaggtttgcgaggtttatttggtggggtttttcgaggatattaatttgtgcgttatttatgttaaacgcgtgattattatgtttaaagatatttagtttgttcgtcgtattcgtggggagagggcgtgaattgttttgagtataaattttaaatttaaaggttttttttagagttaatt

SEQ ID NO: 1508 - DNA, 498 bp, Artificial Sequence
  chemically treated genomic DNA (Homo sapiens)
ggttggttttgagaagagtttttggatttaaggtttgtatttaaaataatttacgttttttttttacgaatgcggcgggtaagttggatgtttttaggtatgatggttacgcgtttggtatgaatagcgtataggttggtgttttcgaaaagttttattaagtaggtttcgtaggttttttgtagcgttattatcgcggaattttggaagcgtaggtcggttttgaagttttgagttatttttcgtattaggcgttgaaacggtagttttcggattagaagttcggtagatttttggtagcgacggatttcgcgtagagttacggtgttagggcggtagcgatggggtttttttacgtcgttcgtggtcggagcgtttttgcgagttgttttagtggttagttgtttgcgcggtgttttatcgtttgtggatttacgagtcgtttgtttagtacgcgttatagtttatttgtaaagtaaatgagttaggaagattggt

SEQ ID NO: 1509 - DNA, 433 bp, Artificial Sequence
  chemically treated genomic DNA (Homo sapiens)
ggatgtaatttggagagtaggagaaagtaatttttattaaatttataaatttttttacgttagatgttagggattttttgaattgaggttgaatttttgtgttttagtggaataattattttagtcggtttaaattagtttatcgttaaatgtagtaaaaatgttggtaaaagttttattttttggtgcgtcgaataaaaggaagtaaaaatggattaaagtaatttttaagaggagtaaggttagaggtgcggaattgttttttatgtttacgttaatgagtttttttttggatttattttaagtttacggttattattatttgttttagttgagggttggatttggatagttttttgtttttattttttgtggttgaatttttgaaattttagggttcggtatttgcgtgggttgtttatatggttgagat

SEQ ID NO: 1510 - DNA, 433 bp, Artificial Sequence
  chemically treated genomic DNA (Homo sapiens)
attttagttatatagatagtttacgtaggtatcgagttttggggttttagggatttagttataggaagtgggggtaggaagttgtttaaatttagtttttagttaaagtaaataataatggtcgtaagtttaaaatagatttagggaggagtttattaacgtgaatatagaaagtagtttcgtatttttggttttattttttttggaaattgttttggtttatttttatttttttttattcgacgtattagaaaataagatttttattaatatttttattgtatttgacgatgaattaatttagatcggttaaaataattgttttattgggatataggaatttaattttagtttagaaaatttttgatatttgacgtaggaggatttataggtttagtggaaattgtttttttttgttttttagattgtattt

SEQ ID NO: 1511 - DNA, 461 bp, Artificial Sequence
  chemically treated genomic DNA (Homo sapiens)
ttttagtttgtttatggttaggagtcgtttaaaaagttgtatttattttagttatattttgttatatttttaagtttgtggatgatttcgtttgagtttttagtagttttaaagttttgttaatagtagacggaggtattacgttgagttttgtggagagaaagttttgtattgtgtaagtgatttatttggtattagagagggggaggggaagagaaattttgatgggttttagggattttttatttatttattttttttcgggatttttttttggagggtttttgtaaatatagttgtttcgttacggtggaggattattaatagaaatttacgaaataaggttatgtttcgtggtattttgagttagtttcgtagcgtgatttattagttttttgaaaaaagaaatttgttaggatttgggttggaatcgtaagatgtaaagatgttaagttgaaaaa

SEQ ID NO: 1512 - DNA, 461 bp, Artificial Sequence
  chemically treated genomic DNA (Homo sapiens)
ttttttaatttgatatttttatattttacggttttagtttaggttttagtagatttttttttttagagagttggtaaattacgttacgggattgatttagagtgttacggggtatggttttgtttcgtgggtttttgttgatgattttttatcgtggcggggtaattgtgtttgtaagagttttttaggagaggatttcggggagaagtagatggatgaggagtttttggagtttattaggatttttttttttttttttttttttggtgttaaatgggttatttgtatagtgtaaagttttttttttatagagtttagcgtgatattttcgtttgttgttggtaaagttttaagattgttgggaatttagacgaaattatttataggtttggaggtgtggtagggtgtaattagaatgagtgtaattttttaaacggtttttaattataggtaggttggga

SEQ ID NO: 1513 - DNA, 440 bp, Artificial Sequence
  chemically treated genomic DNA (Homo sapiens)
tatttataattttttattagtaaagatttgattattaaataaaggtagtttgattagattacggttttatgatgggtttgagaggggttttgttttatattttggttgtatttttagtggggtttatttttaattgttttatgatttggggagatatattgttgattttattgtttagagttttttttttttttttttttgtggaatgagtgatgttttatacggaagattaagatatataataataaaatagaaatttttacgtttagttgtagttagatttatggttaagtttatggagattatttagggttgggaatatacgtttaagaacgtttttgtagttataattgtgtatggagtgagatgttgttatagattatggatagtaaatatttttgaggttgtgtgttattttttgtaggtttatgagttttttt

SEQ ID NO: 1514 - DNA, 440 bp, Artificial Sequence
  chemically treated genomic DNA (Homo sapiens)
agaaagatttatgggtttataggaagtgatatataattttagaggtatttattgtttatagtttgtaatagtattttattttatgtatagttgtaattgtagagacgtttttggacgtgtgtttttagttttaagtaatttttataaatttaattataaatttaattatagttaaacgtgagagtttttgttttgttattatatattttaatttttcgtgtggaatattatttattttataagaaaaaggagaagaaaggttttgaataataaaattagtaatgtgtttttttaaattatgaaatagttaagaatgagttttattgaaaatataattagaatgtgaaataaagttttttttaagtttattataaaatcgtggtttggttaagttgtttttgtttagtagttaggtttttgttagtgaaaagttgtaaatg

SEQ ID NO: 1515 - DNA, 334 bp, Artificial Sequence
  chemically treated genomic DNA (Homo sapiens)
attatttgtttttttaaaatgttttaattgtattggtaaaaggagtattttttattttttaaagtttattgtaattggattgttagagtagtattattaaaaggataatgacggtgttatttttaaatagatttttttaaaataattgtttttttttattgagtgttggtacggtattcgtgaaattttgatggggttagcgggttttttgatgttgtttattagaagattgttttttttcgatttattttttttttttttgttttttttttatttatatttacgttggttttatttagttattgtaatttgtttttgtatttgaattaagtta

SEQ ID NO: 1516 - DNA, 334 bp, Artificial Sequence
  chemically treated genomic DNA (Homo sapiens)
tggtttgatttaggtgtaaagataagttgtagtagttaaataaaattaacgtgagtgtagatgaggaaaaaataaaaggagagagagtggatcggaaagagataattttttggtgggtaatattaaagaattcgttgattttattagaattttacgagtgtcgtgttagtatttagtaaggaaaagtaattattttaagaaaatttatttgagggtaatatcgttattatttttttaatggtattgttttaataatttagttatagtaggttttaaaaaataagaagtgttttttttgttaatataattaaggtattttggagaggtagatggt

SEQ ID NO: 1517 - DNA, 308 bp, Artificial Sequence
  chemically treated genomic DNA (Homo sapiens)
gagtttttttttaattttgagaatttgtggttttaaaagcgtggatggtttagtaggggtaaaattttagttttgttttatagtttttgtcgttatgaggcgagttgtttttttttgagggtattagagggttttatttagttaggtattgttttttaagtatgtgttttatgtgttggggtaggtttattattggattttatttatgttttggtagttagtgggtttagtggaatattcgtgattgggaatacggtgatattgtattgatttggatttttattttttttttttatagttgtatatag

SEQ ID NO: 1518 - DNA, 308 bp, Artificial Sequence
  chemically treated genomic DNA (Homo sapiens)
ttgtatgtagttgtgagaaaggagagtggaaatttaagttaatgtagtattatcgtgtttttaattacgagtattttattgggtttattggttgttaagatatggatgggatttagtggtgagtttgttttagtatatgaaatatatgtttgggaaatagtgtttgattggatggagttttttggtatttttaaagagaagtaattcgttttatgacggtaagaattgtaaaataaagttaggattttatttttattgggttatttacgtttttagaattatagatttttagggttagggaagaattt

SEQ ID NO: 1519 - DNA, 496 bp, Artificial Sequence
  chemically treated genomic DNA (Homo sapiens)
gtgtgtgggaagaggttgggtgttttttagattattgtattatgtttttttatatttgtttaagtttttgtgcgaatattgaaataaagtgttatgaattttgtttttggtatttgtcggttatagttgtggtttcgggttgtatatttgttgtggttttagagtttttgagaagttattggttgggagggcgttaagaatggttggtgtacgtggtaattgagtgtttaaggggaggaggatgatttttagtgtatttattgttttttagtttttattttaattttgttataatttagagagacgtttttttggtgtgtttatagagagatggatgcgtgtttaggaatgtataatttagtgagtagtttgaatatttagatgttgggaatattgttgagtatttatttttaaagtttaagttttttatgtttagttagtgttagtttgtaagaaagaattagttgtttttaatggattatgttagttggatttg

SEQ ID NO: 1520 - DNA, 496 bp, Artificial Sequence
  chemically treated genomic DNA (Homo sapiens)
taagtttagttaatatgatttattaagaataattagtttttttttataggttaatattgattagatatggagaatttgaattttaaaaataaatatttaataatatttttaatatttagatgtttaaattgtttattaaattatgtatttttaagtacgtatttatttttttgtggatatattaggaaaacgtttttttaaattataataggattgagataaagattggagagtaatgagtgtattaagaattatttttttttttttaagtatttaattattacgtgtattaattatttttagcgtttttttaattaatggttttttagagattttgaaattataataaatgtgtaattcgaagttatagttgtggtcgataaatgttagaagtaaaatttatgatattttattttagtattcgtatagaagtttggataggtgtgaggaagtatggtataatgatttgaggaatatttagtttttttttatatat

SEQ ID NO: 1521 - DNA, 472 bp, Artificial Sequence
  chemically treated genomic DNA (Homo sapiens)
aatttaattttttttttattgttatgttggaaaatatattttggaaatttttattttttacgtaatatgtaaatttttttattaagataagtgttgtttggacgcgtattgtttagagttttgtaatttgttttattattttattaattattttagttgttttttttaaatttaagttttgttttttttcgttttttttcgttttttgttacgcggatgttaagtttttttaaatattttattaaatttaacgatagattgttattagttgagagcgtttttcggcgaagagtcggagcgacgcgttgttttgggtgtagagcgcgtgtttaataaatatgggtgatgaagggttacgtagttttatagtacgcggttttattttatttatttggtatacgtaggttaacgaggttgagagagttgtgggtggtatgtttagtgaaggattaggatatttgtttaaggtttt

SEQ ID NO: 1522 - DNA, 472 bp, Artificial Sequence
  chemically treated genomic DNA (Homo sapiens)
ggagttttgggtagatgttttgattttttattaggtatattatttatagtttttttagtttcgttagtttgcgtgtgttaaataaataaaatagaatcgcgtgttatgaggttacgtgattttttattatttatatttgttgagtacgcgttttgtatttaggatagcgcgtcgtttcggtttttcgtcgagaaacgtttttagttggtggtaatttatcgttagatttagtaaaatgtttagagggatttaatattcgcgtgatagagaacgaagaaagacggagagggatagaatttagatttggaaagagtagttaaaatggttaataaaataataaagtaaattataaggttttggatagtacgcgtttagataatatttgttttggtaaagagatttatatgttacgtaaagaatgagaatttttaggatatattttttagtatggtaataggaagaggattagatt

SEQ ID NO: 1523 - DNA, 241 bp, Artificial Sequence
  chemically treated genomic DNA (Homo sapiens)
ttttttttgttaatatttgttttagagtgtatatataggtttttgttagagatattcgtttgttgggtttttacgtaaatggtagattgaagggtagcgtgattgttttagtttttaatgtcgtattatatattttgagtttttggttttttattagattttaaggaatgattttatgttttgtggtttggggttttacgtatttagttttgtttgttttttttgttttttttttttagtt

SEQ ID NO: 1524 - DNA, 241 bp, Artificial Sequence
  chemically treated genomic DNA (Homo sapiens)
gattggagggagagaataggaaaagtaagtagaattaaatacgtaggattttaaattataagatatgaagttattttttgaggtttaatagagaattaaggatttagagtatgtgatacggtattaggaattagaataattacgttattttttaatttgttatttgcgtaagagtttagtaggcgaatgtttttggtaaagatttatgtgtgtattttgggataagtattgataagagagg

SEQ ID NO: 1525 - DNA, 395 bp, Artificial Sequence
  chemically treated genomic DNA (Homo sapiens)
ttatatgatttatttttagtaaaaaaattgtttatttaagtataggaaagttaattttcgtattaaaagagaattgagaaatttaaatagtttatgatttttattgttttggtttttgttgtaaagcgttattgtgaaaaattggttttgattttagtaattaatgtttttttattgtatagagatggtttggcgttattgtgttattgtggttgttaagggtagggttttttagtaatgtataatggttagaataagttttttttaattttgtattaagggtaggtttttagttttaaattatttttttattttattttagttttttttcgggagttgtggtttttttttgtggttgaacgtggtttagttttttttgaattttgttttttttt

SEQ ID NO: 1526 - DNA, 395 bp, Artificial Sequence
  chemically treated genomic DNA (Homo sapiens)
gggggaggatagggtttaggaaaagttgaattacgtttaattatagaaagaaattatagttttcgaagagaaattggaataagatggggaaatgatttgggattgggggtttgtttttagtgtagggttggggaggatttgttttggttattatgtattgttaaggaattttgtttttagtagttataatggtataatgacgttaggttatttttgtgtagtgggaaagtattgattgttgggattaggattaattttttatagtgacgttttgtagtagaggttaaagtaatgaagattatgggttgtttaaattttttagtttttttttagtacgaaggttggtttttttatgtttaagtaaatagtttttttgttgagagtaaattatgtga

SEQ ID NO: 1527 - DNA, 258 bp, Artificial Sequence
  chemically treated genomic DNA (Homo sapiens)
atttttaatatttatgtatatttatgggaatttattagagggggaagtttggatttaaaatttttttttatgaaatagttaaagattaagaggtgaatcgtgtgggatatgaagtatgttatggttgagttgttgacgaggtttcggttgtgttttgtattatgtaagggtttagtattttgagaaggtgtttggtaaatgttattggttgatcggacggtagttttcggaaggtttgttgattagaaatagagtttt

SEQ ID NO: 1528 - DNA, 258 bp, Artificial Sequence
  chemically treated genomic DNA (Homo sapiens)
aaggttttgtttttgattagtaggtttttcgagaattgtcgttcgattagttagtggtatttattaggtatttttttagggtgttgagtttttatatgatgtaaagtatagtcgaggtttcgttagtagtttagttatgatatgttttatattttatacgatttattttttgatttttaattgttttatggagggaaattttaaatttaggtttttttttttaatgaatttttataaatgtgtatgggtgttaaaaat

SEQ ID NO: 1529 - DNA, 498 bp, Artificial Sequence
  chemically treated genomic DNA (Homo sapiens)
ttttggtttattttttatttttatttatagttttaacggaagggtttaggtttttaagtgggtttgcgtatttttagaatattatttaagttattttaaggtatgaagttttttttgggtgtatttgttaacgagttaatcgttggtttcgttggaaggttttattttgattatggttcgttggtggttattaataaaatattttggattttataagttttacgtttgaattttataagatttgtattttattaattagttatacgcgggttgatattgaaaggtatatgttgatatttgttcgtttaggggaaatttattatttttttattttagttagggggcggcgtgtaggtcgcggaattttttaacgagcgcgtttttttttattttttgggttcgcgtggattttcgtttatttttatacgttttggggggggggtcgggtttatacgttttggaagtttttagaggtgattttttttgggatttttgtat

SEQ ID NO: 1530 - DNA, 498 bp, Artificial Sequence
  chemically treated genomic DNA (Homo sapiens)
gtataggggttttagggagagttatttttaggggtttttagggcgtgtgggttcggttttttttttagggcgtgtgggggtggacgggggtttacgcgggtttagggggtgaagagaaacgcgttcgttagagaatttcgcggtttatacgtcgttttttaattaaaatagagagatggtagattttttttgggcggataggtgttagtatgtgttttttagtgttaattcgcgtgtggttgattggtgagatataagttttgtgaaatttaaacgtgaaatttgtgaaatttaaagtgttttattaatggttattagcgagttatgattaaggtggagttttttagcgaaattaacgattggttcgttggtaggtatatttaagggaggttttatattttgaggtgatttagatggtgttttggagatacgtaggtttatttggggatttgggttttttcgttgggattgtaaataaaaataaaaggtgggttagag

SEQ ID NO: 1531 - DNA, 380 bp, Artificial Sequence
  chemically treated genomic DNA (Homo sapiens)
ttttgatagtggttttgttttttaggattttttttttttttatagaatttagtatattggagagatggtagagatggtatttgatttgttgttgatgtgatcgttttttttaaaatgtttagatttcgatttattaatgttaaagtttttttacgagatattggtgttagggtggtattgggtaatatcgttgtatgtttataaatagttgtagtgaaagtgttttggtagttggtttttgagatatagaaaagtaaaattgttacgtaagttggtaattgagtagttatgttgaagtttaatgagtgttgaaaaatagagtatgttttggtatttatagaaagaagatacgtggtgtttagaatttagtattttaaatt

SEQ ID NO: 1532 - DNA, 380 bp, Artificial Sequence
  chemically treated genomic DNA (Homo sapiens)
agtttaaggtattaagttttggatattacgtgttttttttttataaatattaggatatgttttgttttttagtatttattggattttagtatgattatttagttgttagtttacgtggtaattttgtttttttatgttttaagagttagttgttaggatatttttattgtagttgtttatgagtatgtagcgatattgtttaatgttattttaatattagtgtttcgtgaggaggttttggtattaatgaatcggaatttggatattttggaaggagcgattatattagtagtagattaggtattatttttattatttttttagtgtattggattttatgagaaaggagggggttttaggagatagggttattgttaggg

SEQ ID NO: 1533 - DNA, 405 bp, Artificial Sequence
  chemically treated genomic DNA (Homo sapiens)
gtattgtttgaatgttaggtaggatttcgttttgggtaatggttacgtcgtttaaaagtttattgagttttttattattgcggatcgttagttgtaggtggcggggaataatgcgagtttttttgttatcgcgagacgtattgtttgttagtttaaggatttttgttgtgagatattttaatattgtcgttaaatatattggtgcgtttgtttttattcgttttgtatagttttttttacgaagtagacgatggattcggtttacgggaaattgtaaattcgttttagaagagcgagatttagatttggcgcgtgttttttttttttgtttttttcgtttagatattttttcgtattaaattgtagtaatacgagaattatatttttagggttgttattgggttt

SEQ ID NO: 1534 - DNA, 405 bp, Artificial Sequence
  chemically treated genomic DNA (Homo sapiens)
aggtttagtagtagttttagaaatgtggttttcgtgttgttgtaatttgatgcgaggagatgtttggacgagggaagtagggaggaaaagtacgcgttaagtttaagtttcgtttttttagagcgggtttgtagtttttcgtaggtcggatttatcgtttgtttcgtaagggaaattatgtagagcggataggggtaggcgtattagtgtatttggcggtagtgttagagtattttatagtagaaatttttgagttggtaggtaatgcgtttcgcgataataaaaaaattcgtattatttttcgttatttgtagttagcgattcgtaatgatgaggaatttaataagtttttgggcggcgtgattattgtttagggcggagttttgtttaatatttaggtagtgt

SEQ ID NO: 1535 - DNA, 500 bp, Artificial Sequence
  chemically treated genomic DNA (Homo sapiens)
gatttatttgtgttggtggaaatggtaatgtaggtattgtttgagggagttttagaaattattgttttggggtagaattcgtaattattttgtgtggttttttaaaacgttttttatttttcgttttcgaataaaatgtttttataaggaaatattagggagaattcgggtttatcgattgtatgttttaggtattttttttggggtaggtaagtagggggttgtgttttttttcgcgttggttgcgcggttttttatcgggattttttcgatggcgtgaggtaaggagtggatcgagaggttttcgagttttgagttgagcgcgtgtgggtcgtgtaggaggttttcgtgtcgtttgtagtttttgcgaggatttaggttcgatagttggtgaggtagttttcggtgcgtgtgtaggagtttagatttttggttttgtttttggtcgggttagtttgggtgttgcggttgcggttgggcgtgtagggggtttaggttgt

SEQ ID NO: 1536 - DNA, 500 bp, Artificial Sequence
  chemically treated genomic DNA (Homo sapiens)
atagtttgaattttttgtacgtttagtcgtagtcgtagtatttaggttggttcggttagaggtagagttaggagtttgggtttttgtatacgtatcgggggttgttttattagttgtcgggtttggattttcgtagggattataggcggtacgaggattttttgtacggtttatacgcgtttagtttaggattcggagatttttcgatttattttttattttacgttatcgaggaggtttcggtaagaggtcgcgtaattagcgcgggagggaatatagttttttatttatttattttagaaaggatatttggaatatatagtcggtgggttcgggttttttttagtatttttttataaaaatattttattcggaggcggagagtgagggacgttttgaggaattatataaagtagttgcgagttttattttagaataatggtttttggagtttttttaaataatgtttgtattattatttttattaatatagataaatt

SEQ ID NO: 1537 - DNA, 475 bp, Artificial Sequence
  chemically treated genomic DNA (Homo sapiens)
ttttgattttagaaggtttggagaaagcgtgagaagggagattagattagaatagattgatggaagggaaaggcggtgagggtgaagtaagagaaattcggttttagtgaaaaggatttattattgtattttagaacgtaatttgtattttatatgtaaatgaggaggttttttagaggttggattgggttgggtttagttgagtttttgtaaatagtagggatttaattttggggaattgtagattaaagtgagagagggacgtatcgtatttttaggtatatttaaaaaggatggacgagatatcgaagtagaggatataggaggattaaaggatttaggaaagtaagtagtttttcggagaagttgtcgaaatttaagattggtaagagaagtaaatttaattttttatatcgattattttttattttttgaaaagaagagattgtttttttagggaagtgaaaataatgaa

SEQ ID NO: 1538 - DNA, 475 bp, Artificial Sequence
  chemically treated genomic DNA (Homo sapiens)
tttattatttttatttttttggggaaataattttttttttttagggaatgagaaatgatcggtgtgagaggttgaatttgttttttttgttagttttgaatttcgatagttttttcggagggttgtttgtttttttgaattttttaatttttttgtattttttgtttcggtgtttcgtttattttttttggatgtgtttggagatgcggtgcgttttttttttattttggtttgtagttttttagggttgaatttttgttgtttgtaaaggtttagttaagtttagtttagtttagtttttaggaagtttttttatttatatatgaaatgtaaattacgttttggaatgtaatgatgggttttttttattggagtcgagttttttttgttttatttttatcgttttttttttttattaatttattttgatttgatttttttttttacgttttttttaagttttttagaattagag

SEQ ID NO: 1539 - DNA, 426 bp, Artificial Sequence
  chemically treated genomic DNA (Homo sapiens)
tttttattattttatagatttagatatttttgattttttaatgttaaagtttatatatttgtattaatatttatataaattaatttattttatgtatatatttatattaattttattattatttaatttatatttatattaattgtttggttttataagtatttagttcgtgattttgaatatgtttaggtattaattatggttttttttaggttatgagtcgtttttaatttttttttttttttggtttgttttgtttaattttgttaaaataaataaatatggtttttgtaataatggagaaagacgttattttaattaaaaagtaataataatgtggtttgtggttttttgggttgtttgggttacgttttattggtttttattgagtttggtttttttgggttgttgttttttttgtttttt

SEQ ID NO: 1540 - DNA, 426 bp, Artificial Sequence
  chemically treated genomic DNA (Homo sapiens)
gggaggtaggaagagtagtagtttagaaaagttaggtttagtgggggttagtggagcgtggtttaaatagtttagagggttataggttatattgttattattttttaattaaaatggcgtttttttttattattataaaagttatgtttgtttattttagtaaaattagatagggtagattaggaaaaagaaaaaattaaaaacgatttatgatttagagagaattatagttaatgtttgggtatatttagagttacgaattaaatgtttatggggttaggtagttgatataaatgtgaattgggtggtagtaaaattaatataaatgtgtgtatagggtgagttaatttatataaatattaatataaatatgtgaattttgatattaaaaaattaggaatgtttgaatttgtgaagtaatggaga

SEQ ID NO: 1541 - DNA, 422 bp, Artificial Sequence
  chemically treated genomic DNA (Homo sapiens)
gatatttatttttagggtaagtggttaattttttttttaagttcgaataataaatgtttaattatttttttattttttttaaatagtaatgtgttttgtatttagtttgtgtttgtttgtcggtgtagagttgatattatttgattttattttatagagattttgtgtttgttagatgtttaaataagtggttgatttagggtaaaaatattagttaagttatttgttttatttagttaaagaattagtgtaggtaaagtaggcgagttagtagtttagcgtaggtaaagttgcgtgttttcgaatgatttttttagtcgttatttttgggagggttgggtttttggggtatttttaaaggaattgttttgggtttaaggtaatatttttttttagtagtttttttttttttatttttagtg

SEQ ID NO: 1542 - DNA, 422 bp, Artificial Sequence
  chemically treated genomic DNA (Homo sapiens)
tattggaaatggggaaggagaagttgttgagagagaatgttgttttgagtttaaggtagtttttttaggagtgttttaaaagtttagtttttttaggaatgacggttggaaagattattcgaggatacgtagttttgtttacgttgggttattgattcgtttattttatttgtattgattttttaattgagtgaaataaatggtttgattaatatttttgttttgaattaattatttatttggatatttagtaaatatagggtttttgtgaaataggattaggtaatgttagttttgtatcggtagatagatatagattggatgtagagtatattattgtttaggaaaaataaaaagatgattaggtatttattattcgagtttaggaaggaaattagttatttgttttgagagtggatatt

SEQ ID NO: 1543 - DNA, 365 bp, Artificial Sequence
  chemically treated genomic DNA (Homo sapiens)
ttttataggtgtatgagagaaaattgtagttttaagtattagagtattattaaatataatatatttcgtatgtaggggtagttatttaatattaaattaataaaatattattagtgtcggtgagagttttggttgttgatagtaggttaggtgttttatagttatgtcgtttttttgtttgtaggttaattttatatagttgtttttttttggaaattatgttttatttgaagttttcgtaagtatgataaatagtttttttaagttttagcgacggtggagaaatttgaaaatatttaggagtatttattaattagaatatgaaagaagatttagtttaattgtagtttttgattgtgtggagg

SEQ ID NO: 1544 - DNA, 365 bp, Artificial Sequence
  chemically treated genomic DNA (Homo sapiens)
tttttatatagttaaaagttgtagttgaattaaatttttttttatattttagttaataaatgtttttaaatatttttaagtttttttatcgtcgttaaggtttagagaggttatttgttatatttgcgaaggttttaaatgaggtatgatttttagaagaaagtagttgtgtaaaattggtttgtaaatagaaagacggtatggttgtgggatatttagtttgttgttaataattaaaatttttatcggtattggtaatgttttattggtttaatattaaataattgtttttgtatacggagtgtattatatttaatggtattttaatatttggaattgtagtttttttttatgtatttgtaaaa

SEQ ID NO: 1545 - DNA, 356 bp, Artificial Sequence
  chemically treated genomic DNA (Homo sapiens)
gggaagttatttaatgtagatgtttaaggaattttacgtttaaatacggttattgttgaatttgatgggagaaaaaaaggattgtatttttgttggttaatgcggtatttttggatgtttattaagttgttaaaaaatgtgaaatgatgatttattgtgaagtttttttaatttttttttttgttttaatttgtttgcggtttgaaggaatgtatattgatttgagttaaagaagaaatttgtggtttttattatagtttgtaaatatcgattgttgaaagttttaagtgtgttattattttttgttatatatatgttttatatatagtttattttggaaaatagattgggagagt

SEQ ID NO: 1546 - DNA, 356 bp, Artificial Sequence
  chemically treated genomic DNA (Homo sapiens)
gtttttttaatttgttttttaagatgaattgtatataaagtatgtgtgtggtaggagatgatagtatatttgaggtttttagtaatcgatgtttatagattataatggaaattataagttttttttttaatttaagttagtatatatttttttaagtcgtaggtaaattggagtagggaagggggttgggaaggttttatagtgagttattattttatattttttaatagtttaatgaatatttagaaatgtcgtattagttagtaaaaatatagtttttttttttttttattaaatttagtaatgatcgtatttggacgtgggattttttgagtatttatattaagtgatttttt

SEQ ID NO: 1547 - DNA, 474 bp, Artificial Sequence
  chemically treated genomic DNA (Homo sapiens)
tgatgtttttggggtaggtttattttagaagttttaagaaattttaaaatgagttttatgatgtttgtcgtgtttggatataaaatgagaaatagaaaatttgtttttttattttatgggtggagtgttgtttttttatattttaattttttttaataagaaaagggcgttttgaatgtggtgggaaagggtagattatatggtgggaagttatgtaatataagatatattttattgtatggcgtgtttttgtattatagatgtgtatatagatgtgattattaatagagataattagtttataagttttttttggaaattttttatcgtttttagtagaaaagtgatttttagttaaggtttgagttgaagtttagtttatgattaaagtatttttaattgttttatattgaaaagaaagaaaagagaaatgattagtagtggttttttagttaaggtgtgagattagaggtt

SEQ ID NO: 1548 - DNA, 474 bp, Artificial Sequence
  chemically treated genomic DNA (Homo sapiens)
gatttttggttttatattttggttggaaaattattgttggttattttttttttttttttttttagtgtggaatagttggaaatgttttaattatgggttgagttttagtttaggttttggttgaaaattatttttttattaaaaacgatgaggagtttttagggagggtttgtaaattagttatttttgttgatgattatatttgtgtgtatatttgtggtatagaaatacgttatgtaataaagtgtattttgtgttatatgattttttattatgtggtttgtttttttttattatatttaagacgttttttttttattaaaaagaattaaaatatagaggagtaatattttatttatagggtgagaaggtagattttttgttttttattttgtgtttaagtacggtaaatattatagaatttattttgagattttttaaaatttttaaagtaagtttgttttaaaggtatta

SEQ ID NO: 1549 - DNA, 412 bp, Artificial Sequence
  chemically treated genomic DNA (Homo sapiens)
aattattttatgatatatttttttttttttagatgtaaaaattgaggagttagttgttagttgaatattttagtattatttttttagtaattattttaaggaatgtatttgaataaaatgtagttttggtattattttaaaaaatggatgatgatttatgttttttttgcggggataagatggttgtgggtatgagttatgattgtacgttgggaagatttcgatgggaattttgtttttgttggttgagttataatttatacggatttgagattgtgcgtggtttttattaatatgtttattttgtttgttaaggttcgagttttattttttttttttcgattaaagttttgtttgtattttatatatatttgatttaaaatttgtgtttggaatttagagtggtttggga

SEQ ID NO: 1550 - DNA, 412 bp, Artificial Sequence
  chemically treated genomic DNA (Homo sapiens)
ttttaagttattttgggttttaagtatagattttgaattaggtgtgtgtgaaatataaatagggttttagtcgggaagaaaaagatgaagttcgagttttaataagtaaaatgaatatgttaataaaagttacgtatagttttaagttcgtgtaagttatggtttaattagtaaaagtaaggtttttatcggaatttttttagcgtatagttatgatttatgtttatagttattttgttttcgtaagaaaagtataaattattatttattttttaaaatgatgttaaaattgtattttatttaaatgtattttttaaaataattgttgagaaaataatattagagtatttaattgataattgattttttagtttttatatttggagagaaaaaaatgtgttatggagtggtt

SEQ ID NO: 1551 - DNA, 464 bp, Artificial Sequence
  chemically treated genomic DNA (Homo sapiens)
tttgggaggatggatataagtgtaatttaaattttggagttttttataattgtaaggtagtattatttatttaaatataaaaataggttattaagtattattaaagggaaaagtaaatgtttagggattatttttgttgtattgttgttggggaaagaggttttttgtttttttaagagtttttagatatatttttagttatattttaaaagtttttttagttgtgtagtttaggtgtattcggtagtatagtcgtgttttgatttttttggtagatgttataatttattgttatttttatgtaggaatgtagggcgaggggtttttatgtcggttttgtgatttattgtttgataagttttgagtgttaattttaggtaggtttagcggaggtggaatattatttatttgatagtgtttgtgataaagtgggtaattagacgtatttggaaaagtttggttgg

SEQ ID NO: 1552 - DNA, 464 bp, Artificial Sequence
  chemically treated genomic DNA (Homo sapiens)
ttagttaggtttttttaagtgcgtttaattgtttattttattataggtattattaggtaaatggtgttttattttcgttgggtttgtttgaggttgatatttaggatttgttaggtaatggattatagagtcggtatgggggtttttcgttttgtatttttgtatgggggtgatagtaaattatgatatttgttaggaagattagaatacggttgtgttatcggatgtatttaagttatataattaggaaggtttttaggatgtgattagagatgtgtttgaaagtttttaaagggataaagagtttttttttttagtaatagtgtagtagagatgatttttgaatatttatttttttttttgatgatgtttaatgatttatttttatgtttgagtgaataatgttgttttgtagttgtaaagggttttagagtttaagttgtatttatatttatttttttaag

SEQ ID NO: 1553 - DNA, 429 bp, Artificial Sequence
  chemically treated genomic DNA (Homo sapiens)
aggaaaatgggtagatggtataagaggatattgaatgtattgaaggtagtttaaatattttatgtattagttatttcggatatttagtggagtgaatgcggtatttattaatgtttaatgtcggttcgggtaaagtttagatagtttgttggtagtaagaaagttaaaggtaagaaggtttgtgtcgattgtcgtttgtatttacgaggttgagaaatagtagttatgaattagtttgtttgagattttgttgttattatttgtagtagtaaggaagataatattttaaaaagtttttaggaataaaatgagttttaattattagaggaagaattatagtttgtagttatattgtttagaggtttaatgatgatttattgtaaattagattaattaagaatattttttatattgtagttttgagtggtt

SEQ ID NO: 1554 - DNA, 429 bp, Artificial Sequence
  chemically treated genomic DNA (Homo sapiens)
agttatttaagattataatatggggggtatttttaattggtttaatttgtaatgaattattattaagtttttaggtaatgtagttgtagattgtgattttttttttagtggttaagatttattttatttttgaaagttttttaaaatattattttttttattgttgtaaataatgatagtagagttttagataggttgatttatagttattgttttttagtttcgtaagtatagacgataatcgatataggtttttttgtttttagtttttttgttgttagtagattgtttggattttgttcgggtcgatattgggtattaatgaatgtcgtatttattttattggatattcgaagtgattaatgtatggaatatttgggttgtttttagtatatttaatgtttttttatgttatttatttattttttt

SEQ ID NO: 1555 - DNA, 431 bp, Artificial Sequence
  chemically treated genomic DNA (Homo sapiens)
tttaaaatttattatttaggtttttgtaggtaatattttgaatttaaaatgatttttagttaagtcgtgtttgtatttgggaattgtgagaagtattgaaagttttataaaggagaggaaatttgattacgataggaagtgatttatagtttttgaggtttagatgtattgatataaggtagtgaagtaggaaagaattacggtttttaaaaagaagtaggattttggttttttttttattttagtgtgatgtgtgtgttttagaataaaattttttaattatagtgtaaaagtgatatttatgtaataggagtggtttaaattttttgtttttgtgggtttgatatagaggaaagttagaattttttttatgatttgtttatcgtgtgttagtgttgtggtttttaagtgttgtgtaaatttgatttttt

SEQ ID NO: 1556 - DNA, 431 bp, Artificial Sequence
  chemically treated genomic DNA (Homo sapiens)
ggaaaattaggtttgtatagtatttggaaattataatattgatatacgatgaataagttatagaggaaattttgatttttttttgtattagatttataaaggtaagggatttagattatttttgttgtatgaatgttatttttgtattgtggttagaggattttgttttaggatatatatattatattgggataaaagagaaattaagattttatttttttttgaaaatcgtaatttttttttattttattattttatgttaatatatttgagttttaggggttgtaagttattttttgtcgtggttaggtttttttttttttatgaagtttttaatattttttatagtttttaggtgtaaatacgatttggttgaaagttattttgaatttagaatattgtttatagaggtttagatggtgggttttgag

SEQ ID NO: 1557 - DNA, 460 bp, Artificial Sequence
  chemically treated genomic DNA (Homo sapiens)
gtttttaggatttttagatatggaattggggttttatttttggttttgggtatttatgttgttttttgttatgttgttagatttatacgtaagttaaggtagttttagaggaatatttttttttttttatttttattttttagtatagttttggatttatagttaattaagcgtattatagaagagttagtaattttgacgtgtaaaacgtttatgttttgttatttttaatatgttggtatttttgatagtttttaattagagtagtacggttaattttagtttgttatttgtgtgggttaagttgtttgaaaaatttttgagggattagttagtggtgggaggatgatttttttataaataaatgatggaatttcgatgtttggaagatattagttgtggtttggtttttggggttttttgaggggatagaaatgttagttttttttttttttggttt

SEQ ID NO: 1558 - DNA, 460 bp, Artificial Sequence
  chemically treated genomic DNA (Homo sapiens)
gagttaaggaagaagggagttgatatttttgtttttttaaaaggttttaggaattaaattatagttagtattttttagatatcgaggttttattatttgtttataggaaaattatttttttattattggttgattttttaaggattttttaaatagtttaatttatataaatgataggttgaagttaatcgtattgttttaattgaggattgttaaaaatattagtatgttgggggtggtaggatatgggcgttttgtacgttagagttgttggtttttttatgatacgtttgattggttgtggatttagaattgtattaaggaataagaataaagggagggaaatatttttttagggttgttttagtttacgtatgaatttggtaatataataggaagtagtatagatgtttagagttaaaaataaagttttagttttatgtttggaagttttgaagat

SEQ ID NO: 1559 - DNA, 489 bp, Artificial Sequence
  chemically treated genomic DNA (Homo sapiens)
gtttggggaagatgatttgaatgttttttaaaattttcgagaagtattaagtttaagtttagttttttatttttgataaatattatattgtgtatttgtttgttatttcgtggttttgttgtttttgttagtttgttaaatggaattttggttttagttagatgaaaatgtggtaatttttgtgttttgtttgtttcggcgttcgaggagcggttgtgttcgattgtgtgaggtcgtttagtgttaagggtaattattggtatttgtattgatagtaagtagtttgtagtaatagattgaaaatgttttttttagatttttagattggaattttagttttatttttaaaagttttatgtttatagtacggttgataaaataaattattaaattaattgttttgggagtttttaagttgtgatattaaggtagttgcgagttattatttttgatgaaggagtagttttagaaattgtgtgtatttgatgg

SEQ ID NO: 1560 - DNA, 489 bp, Artificial Sequence
  chemically treated genomic DNA (Homo sapiens)
ttattagatgtatataatttttgaagttgtttttttattaagaatgatgattcgtagttattttaatgttatagtttggaagtttttaaagtaattggtttagtaatttattttgttaatcgtgttgtggatatgaaatttttaaaagtaaagttgaagttttaatttaaagatttgaaaagaatatttttaatttgttgttgtagattgtttgttgttagtgtaggtgttagtagttatttttggtattgggcggttttatatagtcgggtatagtcgtttttcggacgtcgaggtaagtaaagtatagagattattatatttttatttgattgaaattagagttttatttaataagttgataggagtaataggattacgaaataataagtagatatatagtgtggtatttgttaaagataaagggttgagtttgagtttaatgtttttcgaaggttttggaagatatttaaattattttttttaaat

SEQ ID NO: 1561 - DNA, 500 bp, Artificial Sequence
  chemically treated genomic DNA (Homo sapiens)
agtatggttagaggaattgaagaatgtattatgaaaatatgatattagaatttagagatgtttatttatgagtttggtaaggttttaaaaatttttttatgatgcgtttgagtttttttgtatataaggtaaaattttattaattcggttagtttataaaattttttataaatcgttttatgatgtgtttgaaatattttaggttgagttatttgttgataatttgttttttatttttgatatttcggttgaggattattttttttaaaatagaattgttaattttttggagatttgtgattattgtgtgttagtaatgttagtttattaggtatataaatatttatttattggtgttaagtaggtagtaatagaattttggattttagttgttggagaagaaataaagatttttagaattagaattataaattgtttattttatggttgaggaaattgaggtcgaaggttatttagttaatttgatgtggagttggaat

SEQ ID NO: 1562 - DNA, 500 bp, Artificial Sequence
  chemically treated genomic DNA (Homo sapiens)
attttagttttatattaagttggttgggtgattttcggttttaatttttttaattataaaataaataatttgtgattttagttttaaaagtttttgttttttttttagtaattaaggtttagaattttgttgttatttgtttaatattaataaatgaatatttatgtgtttggtagattgatattgttagtatatagtggttataggtttttaagaagttagtaattttattttggggaagataatttttagtcgaggtgttaaaaataaaggataaattgttaataaataatttagtttgaggtattttaaatatattataaaacgatttgtgagggattttataggttggtcgggttgatggaattttgttttgtatgtagaagaatttaaacgtattataaaaaaatttttaaaattttgttaaatttataaataaatatttttgagttttgatattatgtttttatggtatattttttaatttttttggttatatt

SEQ ID NO: 1563 - DNA, 460 bp, Artificial Sequence
  chemically treated genomic DNA (Homo sapiens)
tgtggaagggattttaggtttttgtgattattattatgtttttttgagttgcgtttttggaaaaaaatgtgaaggaggtagttttttggaatgaataaattttgtcgtttgtttgtaattatttattaaaatagattaaagaaataggttaaaaaggaattcgttatttatgttagagatagtataataagagtatatagaaagggaaaattaatattagggaggaaggaatgttagatatgtgtttttaagaatacggttatgtttgtattgttggtttatacgtagatatacgttcgggttttttatttggtagggtgggttgtgttgatgaaaacgtgggttattaatattgatgtgtatgtttttaattaatattagaattgagtggtaaatataattaggagagtatttaagagagaaatgggttaaaagagaagttaatgtgtagagaggaggg

SEQ ID NO: 1564 - DNA, 460 bp, Artificial Sequence
  chemically treated genomic DNA (Homo sapiens)
tttttttttttatatattggttttttttttagtttattttttttttgaatgtttttttagttatgtttattatttaattttaatgttaattagagatatatatattagtattagtaatttacgtttttattagtatagtttattttgttaaatgaaaaattcgagcgtgtgtttgcgtgtaagttaataatgtagatatggtcgtatttttgaaagtatatatttaatatttttttttttttggtgttaattttttttttttatgtatttttattatgttatttttaatatgggtggcgggtttttttttagtttatttttttaatttattttaataaataattataggtaggcggtaggatttatttattttagagggttattttttttatatttttttttagaggcgtagtttaaggagatatggtgataattatagaggtttggaattttttttata

SEQ ID NO: 1565 - DNA, 463 bp, Artificial Sequence
  chemically treated genomic DNA (Homo sapiens)
tgataagggtgtttttgtgttcggttttaatttttattagtgaggattatgaggacgtagttatattggtattttttaagtgttatcgtgatagtatttgttgtataaatgtttagttgttatcgtgagttttattatttagttttttttttcgaatgtagattaataagtttagaaattataattgtttttttgtcgaatttgtgataggcggaaataatgatattagtgttttgttaatttttttgtttttgcgtttggtattgttttattgagttatttgttatatttcgttttgatgaggcgaatttaatttttttgttgtaatgataatggggttattttaatgtttggaaatgattatgtggaagttttatcgtgttttgttttggtaagtaaattaaggtattgtgtacgttaggagagcgggttttggttgttaggtaggtagtggagatgttga

SEQ ID NO: 1566 - DNA, 463 bp, Artificial Sequence
  chemically treated genomic DNA (Homo sapiens)
ttagtatttttattgtttgtttgatagttagagttcgtttttttggcgtgtatagtgttttggtttgtttgttaagatagagtacggtgaagtttttatataattatttttaaatattaaaatggttttattgttattatagtagggagattgaattcgttttattaaagcggagtgtgataggtgatttaataggatagtgttaagcgtagaggtaagaagattagtagggtattgatattattattttcgtttattatagattcggtagggaggtaattgtaatttttgggtttattagtttatattcggagggaaaaattgagtgataaaatttacggtgatagttaggtatttgtgtagtaagtgttgttacggtgatatttagaaaatgttaatgtggttacgtttttataatttttattaatagaggttaaagtcgggtataaaggtatttttatta

SEQ ID NO: 1567 - DNA, 499 bp, Artificial Sequence
  chemically treated genomic DNA (Homo sapiens)
tttggtttaaggaagtaaataaggttttggggtatttttttatggtcgttttgggattttttagaagtgataagtcgttaatttggaagttgtttgggtgataatgattttcgaatgggtttttatgtggacgagtaatatgatttaaggtattagggatattagaaaggatattttttatgtagtttgaaatgtgagtagagagtaaaatagattttaaaagacgagtatcgtcgttttttcgatattataaagtgttttttgagtgataatagtgtatttttgtgtatgaattgtatttaagttttgtatttttggaaaataataatttgtgttttttggttattatagatttagtatgggtttagaggttttatgtgtgtaggattttattcgtgtaatttttttagtgattgggagaggtaggagtggtttttgtttttattttataggggaggagacggagatttttaagttagtgaaggatttagttgggatt

SEQ ID NO: 1568 - DNA, 499 bp, Artificial Sequence
  chemically treated genomic DNA (Homo sapiens)
agttttagttggattttttattagtttagggattttcgtttttttttttgtaaaatgggggtaagaattatttttgttttttttaattattgaaagggttatacgaatgaggttttgtatatataaaatttttaggtttatattgggtttatagtaattagaaaatatagattgttattttttaaaaatataaagtttaagtgtaatttatgtataaggatgtattgttgttatttagaagatattttataatgtcgagagagcggcggtgttcgttttttgaaatttgttttgttttttatttatattttaagttgtataaaaagtgttttttttggtatttttggtgttttaggttatgttgttcgtttatataaaagtttattcgagaattattattatttaagtagtttttagattggcggtttattatttttgaagggttttaaggcggttatggagaagtgttttaaagttttgtttgtttttttgggttaaa

SEQ ID NO: 1569 - DNA, 323 bp, Artificial Sequence
  chemically treated genomic DNA (Homo sapiens)
ggtattgggaggattagagattttattttagttttgtttattttgggaataatcgttggtgtatgaataataatgtttttttttgattatgattaattgaattgtagtttgcgggtagtggggaggggttttgtcgggttagtttattacggcgttttttaagtagttatcgatagtgatggatgtagcggcgttttttagagtgtattttcgaatatttaagagtaggggtatgaatttgtatttcgagtttttattagtcggggtttggtagagaggacgggaatggcggtagttaaagatgagttggttgattaaaagga

SEQ ID NO: 1570 - DNA, 323 bp, Artificial Sequence
  chemically treated genomic DNA (Homo sapiens)
tttttttaattaattaatttatttttaattgtcgttattttcgttttttttgttaggtttcggttaatagaaattcggaatgtaggtttatatttttgtttttaggtgttcgaggatgtattttgggaagcgtcgttgtatttattattgtcggtggttatttgagaaacgtcgtgatggattggttcggtaaagtttttttttattgttcgtaggttgtaatttaattagttatggttagagggaggtattattatttatatattaacgattgtttttaaagtaaatagagttgggatgaggtttttgatttttttagtgtt

SEQ ID NO: 1571 - DNA, 466 bp, Artificial Sequence
  chemically treated genomic DNA (Homo sapiens)
tttttaggttttatggtatagggagtcgagttgggtttatgttagtaggtttatgacgttattgttgtagtttgtttatttggttaggattattaaaataattttttttgagaagaataaatttgtttttgtagaaagttaaagatttgagaggttttaattagtttattttgttttcgtttttggtcgttaaacgttattgtagagtttaaagaatatgatgttgtgtgttttttttttttatttttgcgtgggggttttttttttttttttagtattttttgtgaatagttgaaaatgagtggtaaaatgatattcgatttagaaagtaagagtattaggaagtaaaattggaggtaaatatagtagttaattttattaggtatagttggtgttgttcgcggttgtttttgatagcgcggtcgatatagaattatttgtgtttgtttattagttttttttaatt

SEQ ID NO: 1572 - DNA, 466 bp, Artificial Sequence
  chemically treated genomic DNA (Homo sapiens)
gattggggaaagttagtgagtaaatataggtggttttgtgtcggtcgcgttgttagggataatcgcggatagtattagttatgtttggtgaaattagttgttgtgtttgtttttagttttgttttttggtgtttttattttttaagtcgaatgttattttgttatttatttttaattatttataggaggtgttaaaaagggggaaaaggtttttacgtaaaaatgggaaagggagatatataatattatgttttttgaattttgtaataacgtttggcgattaaaggcgagggtagggtaaattaattaaaattttttaggtttttaattttttgtaagagtaaatttattttttttaaagggaattattttagtgattttgattaaataagtaagttataataatgacgttataagtttgttggtatggatttagttcggttttttgtgttatggggtttggaag

SEQ ID NO: 1573 - DNA, 473 bp, Artificial Sequence
  chemically treated genomic DNA (Homo sapiens)
tttttaatttttatagtttaagcgttttatttagtttaaacgttagggatttaaattgttattttagtggaagaggtttgattaaaatttgtgtttttattaaattattggatagtggtttttgggttttgtttatattagtgttaattttaatttaaatttcgtataattatatttgtttcgttaaatgtatttattaggaatatattataaattattttgtattatgagtcgagtttttttgtttattgtaaagtgttttgaaattagtattataagtaattagttgtaagtgttattttatttttttaatgttttattaattaaattttatggtagttgatgtgatgtttaagtttttaatatataagattagtattatttattttttgtatttgattacggtttttaaatttgatttgttatttgtgtatttgttttcgttggagttttgttttttttttagtggtttt

SEQ ID NO: 1574 - DNA, 473 bp, Artificial Sequence
  chemically treated genomic DNA (Homo sapiens)
gaggttattgagggaggagtagagttttagcgagggtaaatgtataaataataaattaagtttaaagatcgtggttaaatgtaaggagtaaatgatattgattttatatgttaggggtttggatattatattagttgttatggagtttgattaatgaggtattaaggagatggagtgatatttatagttagttatttatggtgttaattttaaaatattttgtaatagataaagagattcggtttataatgtaaagtaatttgtggtgtgtttttggtgaatgtatttagcgaagtaaatatagttatgcggaatttaaattaaggttgatattaatgtaaatagagtttaagaattattgtttaataatttgatgaggatataggttttaattaagttttttttattaaaatagtaatttaaatttttaacgtttaaattggataaaacgtttaagttgtaaaggttggggg

SEQ ID NO: 1575 - DNA, 437 bp, Artificial Sequence
  chemically treated genomic DNA (Homo sapiens)
tttgtttggttgttttgtgtttatagggttagtatgtgattatttgggatttggtgtgggtttttttttggttgttttattttttatttattagttgcgtgttaatagaaagttttttgattgaaggatttgttcgggatttttgtaataaaaatagaaggatttgttataaacgttggaaggattttttgtaaaagtggtattttttacgtgattatgagttttagaatatattgttatttcgggttgtaagtttggtttttttattgagtggtagtgatagatgttttttgttaatgtttagtgattgaatgttattgtagaggttcgtttttatttatataatttgtttttttttttttgtagttattgtgttacgtttgttataaaatttatattttttgtatattgttggttttttttagtagtgagttttt

SEQ ID NO: 1576 - DNA, 437 bp, Artificial Sequence
  chemically treated genomic DNA (Homo sapiens)
aagggtttattgttggagaaggttaataatgtgtagaaaatgtggattttgtgataagcgtgatatagtggttgtagaaagaaaggaataggttgtgtgggtgaggacgggtttttgtagtgatatttaattattggatattaataggggatatttgttattgttatttagtgaggaggttaggtttgtagttcgggatgataatatgttttggggtttatgattacgtgaaaaatattatttttgtagagggtttttttagcgtttgtgataaatttttttatttttattatagaaatttcgggtaaattttttagttaggggattttttattaatacgtagttggtaagtgaaaaataaaataattaagagaaaatttatattagattttaaataattatatgttggttttgtgagtatagggtagttaggtaga

SEQ ID NO: 1577 - DNA, 215 bp, Artificial Sequence
  chemically treated genomic DNA (Homo sapiens)
tataagggttgggggtgtggggatagttagagttaaaggttttttttttatagtttcggtagttttagtttagaggcgtcggtttggcggttggaagattgtattgtgggtatatttggggagtagttgtcgagttagggttagagtgggttacgtggtatagggtaggatcgttttggagtttataaggttaagatttttaggaggggtagtgg

SEQ ID NO: 1578 - DNA, 215 bp, Artificial Sequence
  chemically treated genomic DNA (Homo sapiens)
ttattgttttttttaggagttttggttttgtaggttttaggacggttttgttttgtgttacgtgatttattttggttttggttcggtagttgttttttagatgtgtttatagtgtaattttttagtcgttaggtcggcgtttttgggttgggattgtcggagttgtgggggagagatttttggttttggttgtttttatatttttaatttttgta

SEQ ID NO: 1579 - DNA, 431 bp, Artificial Sequence
  chemically treated genomic DNA (Homo sapiens)
ggtaggttgggaagttgttttgtgtaagaggatagaatatgtattttttgtttttcgagttattttttgggatcgggtgatgggagtgatttttagtgtagataaagtcgaattatttttattttttaggtttatattttatatttggttttgtttttattgtttggtatgtttgtggtttttttttattgtttttgtttttatgtgatggtgtttttaagtttgttttcgggacgttttttgtttttggaatagttgtattagtttggggtatttttttgttatttgattttatagggaggtgtttagtggttgtgggtaatttttagatgattttgttcgtttgacgttattagatcgttatttttggttttgttgtttatgttgtagaagttgggttggaatgggagaggaggaatgaaggaggggtt

SEQ ID NO: 1580 - DNA, 431 bp, Artificial Sequence
  chemically treated genomic DNA (Homo sapiens)
agttttttttttatttttttttttttattttagtttaatttttgtagtataaatagtaaagttaaaaatagcgatttaatgacgttagacgaataaggttatttgaaaattgtttatagttattggatatttttttataggattaagtagtaggagggtattttaggttggtgtagttgttttaagaataggaaacgtttcgggagtagatttggaagtattattatataaaggtagaagtagtagggggaaattatagatatattaaatagtagaagtaagattaagtgtggagtatagatttagaagataagagtaattcgattttatttgtattagaagttatttttattattcgattttaggaaatggttcgaggagtagagaatgtatgttttgtttttttatataggatagttttttagtttgtt

SEQ ID NO: 1581 - DNA, 460 bp, Artificial Sequence
  chemically treated genomic DNA (Homo sapiens)
ttttatgtttttagtagggtcggagtttgggggcggtgggtagtgtgtttgggttgttgggggggtttaattttttttcgagtagagttacggcggtatgacggatgtgttcgttatcgcggggagtttagggtatagtagttgtttggaaataggttgttttcgcggtttatatttagatttttgttattattttaaggatttttttttttttttttttttttttacgatggagttagattttgtacgtaggtgagaaatcgtagttaattttattagtagttttttgttattagggattatgggggtttttggggtttggttgcgggtggggaggtaggtgggtgtcgggaggatgaggggaatttgtagcgggaagttagcgttttacgggcggtttagtcgaggtttggaaaaatttcgacgttggaatgttttttttattggttttatttttttt

SEQ ID NO: 1582 - DNA, 460 bp, Artificial Sequence
  chemically treated genomic DNA (Homo sapiens)
ggggaaaataaagttagtgagagaagtattttagcgtcgggatttttttaagtttcggttgggtcgttcgtggagcgttgatttttcgttgtaggttttttttattttttcggtatttatttatttttttattcgtaattaggttttaagggtttttatggtttttggtgatagggggttgttggtggggttggttgcggttttttatttgcgtgtagggtttggttttatcgtgaaaggaggaagagggaaaaaaaggtttttgagatggtgataaaggtttgagtgtgggtcgcgagagtagtttgtttttaggtaattgttatattttgggtttttcgcggtggcgggtatattcgttatgtcgtcgtggttttgttcgggagggagttgggtttttttagtagtttaggtatattgtttatcgtttttaagtttcggttttgttggggatatgagg

SEQ ID NO: 1583 - DNA, 408 bp, Artificial Sequence
  chemically treated genomic DNA (Homo sapiens)
ttttgggagtggaggtttcggtttttttagtagtttttagttgtgtgttttttataggtggtgagtggttgtttgcgcggtatagtgagtgtgtgggaggtcgtgacgggtaggaagacgatggagtttgttgtgtttgggggttagtacgtggagatgatcgttatggttttggatgagttagagcggtgtttgtttataggtttgcgggatggtataatgaagatgtggaattataatattggtaaatgtttgttgattttttttagttcggaatagttggaggttagttttgtttgttaattatagttagggacggttttttgggaagtaaagtatagtttttttgattttgggatgtattattttttgtatttttttgaaagggtgtttattatagttaggtgg

SEQ ID NO: 1584 - DNA, 408 bp, Artificial Sequence
  chemically treated genomic DNA (Homo sapiens)
ttatttgattatgatgaatatttttttagagaggtataaaaaatagtgtattttagggttaaaggagttgtgttttgttttttaagaggtcgtttttggttgtaattgataagtaagattgatttttagttgtttcggattgggaaaggttaataggtatttgttaatgttgtagttttatatttttattgtgttatttcgtaaatttgtgagtaggtatcgttttgatttatttagggttatggcggttatttttacgtgttggtttttagatatagtaaattttatcgtttttttgttcgttacgattttttatatatttattgtgtcgcgtaggtagttatttattatttgtagggagtatatagttgggggttgttggagaggtcggggtttttatttttaagg

SEQ ID NO: 1585 - DNA, 461 bp, Artificial Sequence
  chemically treated genomic DNA (Homo sapiens)
agagggtaggaattgggtatagaaaaagtcggaagggtaggttgggttatgagtgggggagttgggtgtgtagtgaggggtgggggtgggaggggatcgggggattagttagttattaagtggttttggtgatagggttggagatggtagttggcggcggatgtagtttcgggttggaaaattaataggtgattagcggtttaggggtaagttgtttattaggtgcggtagaggggtaggggtaggggcgggggggttgggaggaaatattattgattttcggtaggattgattaaatagttagatatttaaggttaaatttattaataaagtgagatatttagtttagttcggcggttgttgttgaaggttttaaaaaaatcgtttattggggagtttttgataaattgtttttgttttttgaggtaagtgggagggaggatagattgtggggaggtttg

SEQ ID NO: 1586 - DNA, 461 bp, Artificial Sequence
  chemically treated genomic DNA (Homo sapiens)
taggtttttttatagtttgtttttttttttatttgttttaagaaataaagatagtttattaagaattttttagtaagcggtttttttaagatttttagtagtagtcgtcgggttgagttgaatgttttattttattagtgagtttggttttgggtgtttggttgtttgattaattttgtcgggggttagtgatatttttttttagttttttcgtttttgtttttgtttttttgtcgtatttgatgaatagtttgtttttggatcgttgattatttattgattttttagttcgaggttatattcgtcgttagttgttatttttagttttgttattaggattatttggtgattaattgatttttcggtttttttttatttttattttttattgtatatttagtttttttatttatggtttaatttgttttttcggttttttttgtgtttagtttttatttttt

SEQ ID NO: 1587 - DNA, 417 bp, Artificial Sequence
  chemically treated genomic DNA (Homo sapiens)
tttttttttttgttttgtagggaggtgaggtgtttatatttagattattataaggagttgttgagagaatgtttttaggttatgaatttagttttatacgtaaatttattgtagatttaggagaaggttaggaataaacgggtgggagaaggtttttgattttaaatagaaattgagttgattaaatatagtttgagtatacgtagaggttgtaggagggaaacgagattaattttaaattttgtgtatttagaagttttttttagaatttaggttttattggtaggaaattgttatttcgtgtatttgtttattttttttatgttttttgttaggtttcgtgttttattgagtttttattttttttgtgtatgtttataggttgttgggttggaaatagtttaaagttatttagat

SEQ ID NO: 1588 - DNA, 417 bp, Artificial Sequence
  chemically treated genomic DNA (Homo sapiens)
gtttgaatggttttgggttatttttaatttagtagtttgtggatatgtatagagaagataaggatttagtgaaatacggagtttggtagaagatatgggaaaaataaataaatgtacgaagtgataattttttgttagtgggatttgggttttggggaaagtttttgagtatatagggtttgagattaatttcgttttttttttgtagtttttgcgtgtgtttaggttgtgtttgattagtttagtttttgtttggagttaaggatttttttttattcgtttatttttggtttttttttggatttgtagtgaatttgcgtgtaaggttgaatttatagtttgaggatatttttttagtagttttttgtaatgatttaaatatagatattttatttttttgtagagtagggaggaaga

SEQ ID NO: 1589 - DNA, 486 bp, Artificial Sequence
  chemically treated genomic DNA (Homo sapiens)
gggatagatggtgggagataaggaaatttttatgtttttttttatttgttatatttaattgatttttcgtagaaagaaaaaaaaataaattagttgtaaggatgaaattgttaattaaaaggttttttgattagatagataaatatttattaattatgtttgattttgtttgtttttttttacgtttgcgaatttttttattagtattgtggttatattatatttagttggtggtttttttattaattatttttttggggtttagattggttgcgggtgaaatagggtagaagaaaggtgaatattgtaaatagtcgtttaataaacgcgatgtttgttgtatggttaggtttagtgttgggtttttggaagttatagtagaatttttatggatagttttttaagttgtgtgttgtataaaggtgtatttgtaggagagtgggggttttttttgttaatttgggatttttggtattaggtaagggg

SEQ ID NO: 1590 - DNA, 486 bp, Artificial Sequence
  chemically treated genomic DNA (Homo sapiens)
ttttttgtttggtgttaggggttttaggttgatagggggagtttttatttttttgtaggtgtatttttgtgtagtatataatttgaaaggttgtttatggaaattttgttatggtttttaggggtttagtattaagtttgattatgtaataggtatcgcgtttgttgaacggttgtttgtagtatttattttttttttattttattttattcgtagttagtttgagttttaagagagtgattggtggaagagttattagttgggtatgatgtggttatagtgttgatgggggagttcgtagacgtaaaaggggataggtagggttaggtataattggtaaatatttgtttatttaattagagggttttttaattagtaattttatttttgtaattggtttatttttttttttttttgcgggaagttaattaaatgtaatagatggaggaaaatatgggggtttttttgttttttattatttgtttt

SEQ ID NO: 1591 - DNA, 463 bp, Artificial Sequence
  chemically treated genomic DNA (Homo sapiens)
ggaatgtaggggagttagagtttagttaggaaggagagaggaaatatgatttttttgttgtatgtgggtatcgtaattttagttaggtaaagtgttggtttgttgtagtttatttttatgtttttatttagaagttttaatattagagttgatggtagaaaatgtgtagtaaaatgcggggaggtcgttgggtaatggtttttgtaaagtgttaattgtttattgagattgtagattttgtttatgttttaggatttgaattattgataggttttaatttatttcgggtttataaagcgggttttttttttaaataggtttttaattagttacgtttttttgggtttgttaagaagttttagtcgataagtatgtttgttgttttaattttttgaagttggtcgtgtggtttgattttggtttgttttaaggaaatttttatgtataatggttttggatgaaa

SEQ ID NO: 1592 - DNA, 463 bp, Artificial Sequence
  chemically treated genomic DNA (Homo sapiens)
ttttatttaagattattgtgtatggaagtttttttaaggtaagttagaattagattatacgattagttttaaagggttaaggtagtaaatatatttatcgattggagttttttggtaggtttagggaagcgtgattgattggaagtttgtttagaggaggagttcgttttgtgggttcgaaataaattagaatttgttaatagtttagattttggagtatggataaagtttgtagttttaataggtaattaatattttataggggttattatttagcggttttttcgtattttattgtatattttttgttattagttttggtattgaagtttttaaataaaaatataaaaatgagttataatagattagtattttgtttggttggagttacggtgtttatatgtaataaagagattatatttttttttttttttttaattggattttaatttttttgtatttt

SEQ ID NO: 1593 - DNA, 461 bp, Artificial Sequence
  chemically treated genomic DNA (Homo sapiens)
gagtgggtgtgagggttttatatttgattatgtgtttaggtttttgtaagtttagaatttgattatgtagagataatgaatttttttgtatttttttgatttttatttgtgtttttatttattttttttagggttttttttgtttggggagttattttttttattagtttgtagttagtttttatttggatttttatttttgtgtgtttttcggaggatatagatggtaggagtacggaatcggaagtatttggtaatgaagtagtaatttatttcgtaattttttcgtatttatcgtaataatgtttgttttgatgggtttcgcgcgttgaatgtagtttttaatgtgtaatttagcgggaattgtggtgttttgtggtttttattacgtttatttattgttaagtgttgttgagaatttttttattcgggatgagggaattatttgttttagtaattga

SEQ ID NO: 1594 - DNA, 461 bp, Artificial Sequence
  chemically treated genomic DNA (Homo sapiens)
ttagttgttaaaataagtggtttttttatttcgagtgggagaatttttagtaatatttgataataagtggacgtgatgaggattataaagtattataattttcgttggattgtatattgaaagttgtatttagcgcgcggagtttattagagtaggtattgttgcgatgaatacgaagggattgcggaatgaattgttgttttattgttaagtgttttcgatttcgtgtttttgttatttgtgtttttcggaagatatatagaagtaaaggtttaaatgggggttggttataggttggtgaggagggtagttttttaggtaaggggagttttaaggaagatgagtgggagtataggtaggggttagaggagtgtaagaaaatttattgtttttgtatggttaagttttagatttatagaaatttaaatatataattagatgtaggatttttatatttattt

SEQ ID NO: 1595 - DNA, 495 bp, Artificial Sequence
  chemically treated genomic DNA (Homo sapiens)
tttttttataatttttatgttaaggttatggagttttagttattgttaggtagaggtggagttatatatgattgcgtttttatataattatattttttttatttaagaatatttattttatatggagaaatagattatgtttattaattattttagaaagtatgtaattttattagattaagttttgtttttgggtattgattaatagagggaacggttttttagcgatttagaatttttacgatacggtttgtggagattatattttggggttagttgtttaaatgtattgttggaattttaggtagaaatgtgtaatggtatgttaagggttgttgagttgttatagtttaagtagggttatttgtggtttttaaagagaggttgtaattttttatggtatttataaattttagtttttaagagttagggagaaaatgtaattatgttgtttgatcgagttaattttttttttattttgttttttttttattt

SEQ ID NO: 1596 - DNA, 495 bp, Artificial Sequence
  chemically treated genomic DNA (Homo sapiens)
gagtgggagaggggtaaggtggggaaagagttagttcggttaaatagtatggttgtattttttttttgatttttgaaggttgagatttgtggatattataaaaggttatagtttttttttggaagttataaataattttgtttggattatgatagtttagtagtttttggtatgttattatatatttttgtttggaattttagtagtgtatttgagtagttggttttaaagtatggtttttatagatcgtgtcgtaggggttttgggtcgttggggagtcgttttttttattagttaatgtttagagatagagtttgatttaatgaaattatatattttttggagtgattaataaatatggtttatttttttatatgggatgaatatttttaaatgaaaggaatgtgattatgtgggggcgtagttatgtatagttttatttttgtttagtaatggttaaaattttatgattttggtatagagattgtaaggaaa

SEQ ID NO: 1597 - DNA, 425 bp, Artificial Sequence
  chemically treated genomic DNA (Homo sapiens)
aatttggggatatttgttttttagggtagtatttcgttgttttttaatatttagtagttgtgattgttagatgatgatgatgattattaatagagttattgtttttggggtaatattagtagtgtagtagcgagtaggttagtagggtttagggtagtttgttcggttatatttgttttggagttgttgtttgttgtgtattaggaattcgtcgaagtttgagagttgttagtatagattttattagggagttagtaacgttttttatttttttaggtttttttgaaatttagttaaggaataggcgttgagtttatagttagatagttttcggagttttcggttttgggtacggtgttttagttggtggagatggaaatagtaaggtttttttgatttaaagattttttattgtttttgatatt

SEQ ID NO: 1598 - DNA, 425 bp, Artificial Sequence
  chemically treated genomic DNA (Homo sapiens)
ggtgttaggggtaatgaggagtttttgagttagaagggttttgttgtttttatttttattagttagggtatcgtgtttagggtcggaggtttcgggagttatttgattgtgagtttagcgtttgttttttggttggattttagagaggtttgaggaagtgaggggcgttgttggttttttggtggaatttgtgttgatagtttttaggtttcggcgggtttttggtgtatagtagatagtagttttagggtagatgtggtcgagtaagttgttttgggttttgttagtttgttcgttgttgtattgttagtgttgttttaaaagtaataattttattaataattattattattatttaataattatagttattgggtattgggaggtaacggagtgttgttttgaagagtagatgtttttaggtt

SEQ ID NO: 1599 - DNA, 488 bp, Artificial Sequence
  chemically treated genomic DNA (Homo sapiens)
ggggttatggatgtatggttacgtagggtgagtaattgtgatgagagaatagaaaggaaatttaaataagagaatttaaagtagagatgagttaaaaattagtaatacgaattattataagtgggtagttacgttcggtaggagatttaggtaaagcgagggtaaattttttagtttttttttgtggaaaatttataaagtttagattggagaaaacgtattgatagttttgaagttggtattttaagttggaatgtttttttaaagtagtatataacggtataatttaataattttgattattgtggaaaaatgttatgtgttaatagcgattttttataattttgtttagaaaatttgaaagaaatgtaaaaaatggatttgtagttttggtagtaggtagagaaatagtagtagagggttgtaggttagtaattgatgttttaaatattattgagtgttttgtttgtaattttaggggagaatga

SEQ ID NO: 1600 - DNA, 488 bp, Artificial Sequence
  chemically treated genomic DNA (Homo sapiens)
ttatttttttttgaaattataggtaaagtatttagtgatatttgaaatattaattattggtttgtagttttttgttattgtttttttgtttgttgttagggttgtaaatttattttttgtattttttttagattttttgaataaaattatggaaaatcgttgttggtatatggtatttttttataatggttagagttattgaattgtgtcgttatgtgttattttgagaagatattttaatttaaaatgttagttttaaaattattagtacgttttttttaatttgagttttataaattttttataggaaaaggttaagaagtttgttttcgttttgtttggattttttgtcgagcgtaattatttatttgtgatggttcgtgttgttgatttttagtttatttttgttttgagtttttttatttggattttttttttgtttttttattataattgtttattttgcgtggttatgtatttatggtttt

SEQ ID NO: 1601 - DNA, 378 bp, Artificial Sequence
  chemically treated genomic DNA (Homo sapiens)
tagatttttattattttaggtttttaaagatgtttttagttttaaataattaatagagtggttttatttttatttattgtgtattttggttaagtgtatagtaagtggattttttggtcgggtattttgttaatgttggagttgttaggaaataagaatgtgtgtatttattgaagaaaataaaaatgtttatgcgacgttgtatagagacgatttatgagattttatgaatgtgttattaaaagatttatttagttattgttaatgttaggtttgtaaatatttgggggtttaggtaataaagttttttgatggagttagtgggtaggacgtgtttgtggaggggagtatgagttttgtgttgtaggtgtttgtatt

SEQ ID NO: 1602 - DNA, 378 bp, Artificial Sequence
  chemically treated genomic DNA (Homo sapiens)
ggtgtaggtatttgtagtatagggtttatatttttttttataagtacgttttgtttattgattttattagggagttttgttgtttgagtttttaggtgtttgtagatttaatattggtagtgattgagtgggttttttggtgatatatttataaaattttataaatcgtttttgtgtaacgtcgtatgaatatttttattttttttaataaatatatatatttttattttttaatagttttagtattggtagaatgttcggttaagaggtttatttattgtgtatttggttaggatgtatagtggataggaatggggttattttgttggttgtttgagattgaagatatttttggggatttgggataatggaggtttg

SEQ ID NO: 1603 - DNA, 432 bp, Artificial Sequence
  chemically treated genomic DNA (Homo sapiens)
gggttgggttaggatagagaggggagaggtaatttggaagttgtaggttataagtttttttttttgttattttgtgttttttttttagttttgtttttagttaagtataggagtagtcgtttaagtttacgatgtgttgcgtgtaggttgtagatttattattatttataataggttgttgtttttattttttatttatagaggtggttgagttattatttatggttatcgtagtcgttaaattgtttcgggggttgagatttatatagtagttatgtgagttgttataaatttggggttgggaggaggatgtttttaatcgaattagagttgatgattgatagatagggatagtagagattagttttattaattttaaaaagtttaggaagtttttatttagaatgtattttttggagataatagtggtgg

SEQ ID NO: 1604 - DNA, 432 bp, Artificial Sequence
  chemically treated genomic DNA (Homo sapiens)
ttattattgttatttttagggagtgtattttgggtgagggttttttgggttttttggagttgatgaggttggtttttgttgtttttgtttattaattattagttttaattcgattgaaaatattttttttttaattttaagtttgtggtagtttatatggttgttatgtaaattttagttttcggagtagtttaacggttgcggtgattataggtggtaatttagttatttttataaatggaaagtaaaaataataatttattatggatgatggtaggtttgtaatttgtacgtagtatatcgtaaatttgagcgattgtttttgtgtttggttgaggataggattggggagggggtataaagtggtaggagaggagatttgtgatttgtagtttttaggttgttttttttttttttgttttggtttagttt

SEQ ID NO: 1605 - DNA, 475 bp, Artificial Sequence
  chemically treated genomic DNA (Homo sapiens)
agttttttttttgttttatttagttttgaggttagcggttcgttttgttttgtgtttgggaggaatgttcgtggtggttttagtttggattcgagaagaaaggtagttttgtgggcgaaaggtgagcggttgggtgggcgcgggcgtgtttatttagggtcggcgtgtggttcggggtggcgtcgttgttagtcgcgtcggttgttttaggtttgtgttggtttttagatgtgagttggttttagtcggtcgggtttttttattttacgtatagaggggttttattaaaagcggttgtgaggaggtttaggaggtcgtttggttttagtttgttggttttgagtttcgggtttgtagaagttaggttagtcgtatttgtgtttttgtgttttggttttcgtgtgttttacggtttagtttttttgtttttttcgagttttttgggggtttaggcgagggatagtttttttgttag

SEQ ID NO: 1606 - DNA, 475 bp, Artificial Sequence
  chemically treated genomic DNA (Homo sapiens)
ttggtaaaggggttgtttttcgtttgggtttttaggggattcgaggagaatagaggagttgggtcgtggagtatacgaagattagggtataagagtataagtgcgattggtttggtttttgtaggttcggggtttagagttagtaggttggagttaggcggttttttgggtttttttatagtcgtttttgataaagtttttttgtgcgtggggtgggggggttcggtcggttggagttagtttatatttggaggttagtataggtttggggtagtcggcgcggttgatagcggcgttatttcgagttatacgtcggttttggataaatacgttcgcgtttatttagtcgtttatttttcgtttataaggttgttttttttttcggatttaggttggggttattacgaatattttttttaggtatagggtagaacgggtcgttgattttaaggttgagtgaagtaaaagaagggtt

SEQ ID NO: 1607 - DNA, 456 bp, Artificial Sequence
  chemically treated genomic DNA (Homo sapiens)
ttggtttttattttttagttattggtttttttttttttgtaatttaggtttgtaatataattttttagttttttaaggaaaatagaattaaagatttttaatagaagattttagtttattaatatagttaatagttattaaagttatttaggtatcggtttaataaaaaattaaagggttgtagtaagtgattagatttttattatttatttttgtgagatgggttttagagggtttcgtttttgttgatattaattatttttatcggtagtttgttaatatataagtagtttatagtagaatattgtagattgtagggtatttttaggttatatagttttaagtttttagaataggaattgaggtttggaagaaggttagtgtagcgtatttagcgaatggataaattgaattattattttataaggttgtaagtttatgtattaatggaattaa

SEQ ID NO: 1608 - DNA, 456 bp, Artificial Sequence
  chemically treated genomic DNA (Homo sapiens)
ttgattttattagtatatgggtttgtagttttgtgaaatgatgatttagtttatttattcgttgagtgcgttgtattgatttttttttaagttttagtttttgttttaggaatttgaggttatgtagtttgaaaatgttttgtagtttgtagtgttttattgtgaattgtttgtgtgttggtaggttatcggtaagaatggttggtgttagtagggacggggttttttgagatttattttataaagatgagtggtgaaaatttgattatttgttgtagttttttagttttttattaagtcgatgtttgagtagttttaatagttattagttatgttagtagattgagattttttgttagaagtttttagttttgttttttttgggggattaagaaattatattgtaggtttgaattataggaaggggagaattaatggttagggaatgagagttaa

SEQ ID NO: 1609 - DNA, 488 bp, Artificial Sequence
  chemically treated genomic DNA (Homo sapiens)
ggtgtttattgagtttggaaattatggaaagttattgttagaagggaggtagttgttttagaggcggagtggaagttaggattggagaaggttgttttattgtgggttttagcgtgttttttgttgttagttggttaagagtttcgtagtagttattttatattttattagttttattatcgtaattatttttgttaaaacgaaatataaaagaatggtatgtttatgaatattttttatagaaaatatattcgtttgattattttttataaaatgtgaagttaatttttttttttatttttaattatgaaagtgaagttcggaagttttaatttttttgtaatggaaagatttgagtttgtggttttgtttttattttttattttttttttgttaagttaggaatatgatatttatataatatttttcgggtagtggttttgtttaggaattgtatggttgtttgattgtagagggagggtaaaggt

SEQ ID NO: 1610 - DNA, 488 bp, Artificial Sequence
  chemically treated genomic DNA (Homo sapiens)
gtttttgttttttttttgtagttaaatagttatgtaatttttgaatagagttattgttcgggggatattatgtgagtattatgtttttgatttagtaaaggagaagtggaaaatggaaataaggttataaatttagatttttttattataaagaaattgaggttttcgggttttatttttatgattaaaaatagaaaaagaaattgattttatattttatggaaaatagttaaacgaatatattttttgtgaagaatatttatagatatgttatttttttgtgtttcgttttgatagaaataattgcgatggtggagttagtgaggtataaagtggttgttgcgagatttttgattagttagtagtaagaggtacgttggagtttatagtaggataattttttttagttttgatttttatttcgtttttggagtagttgttttttttttgataatgattttttataatttttaagtttaatgaatatt

SEQ ID NO: 1611 - DNA, 471 bp, Artificial Sequence
  chemically treated genomic DNA (Homo sapiens)
taattttgtttttttaatattgttgtgagttgattttatttgtttgagataaaattttttttttgatttagtagcgtttacggttgagttggttacgagatagaggattttgtgtttttaattatttttggatgaaaagttttgtaggcgagtggagattcggggtaaagacggttaggtggagtcgttattagcgagtagtggattgtagaaatggagagataattaaattaaaagtgttaggtgtaggtattgaaaaataattttgggtgttaattatgtagtttagtgttagtagaggaaatgttatcggtttgtttattacgtggtagttgaaaagtttgggaaagatatatttatggtttttagagaatttgttagggttgtttatttgggattttggtgaagtagagattatttattagttggagtgtgtatattttttttattttttatttagttaagttgggt

SEQ ID NO: 1612 - DNA, 471 bp, Artificial Sequence
  chemically treated genomic DNA (Homo sapiens)
gtttaatttggttgagtggaaaatgggggaaatgtatatattttaattaataaataatttttgttttattagaattttaagtaggtagttttggtaaattttttagaaattatgaatgtgttttttttaagttttttaattgttacgtgatggataggtcggtggtattttttttgttaatattgaattgtataattaatatttagggttattttttaatgtttgtatttggtatttttaatttaattatttttttatttttataatttattgttcgttggtgacggttttatttggtcgtttttgtttcgaatttttattcgtttgtaggattttttatttagaaataattaggaatatagggttttttgtttcgtggttaatttagtcgtgaacgttattggattaagagggaagttttattttagataaatggagttagtttatagtagtgttaaagggatagggttg

SEQ ID NO: 1613 - DNA, 495 bp, Artificial Sequence
  chemically treated genomic DNA (Homo sapiens)
ttattattttatataagttttttgttataattgtattttggtttattttgatatttggtgtttattttaagttgaggttttagggaagggtagttggaggttagcggcggtttttagtgatagatgggtagagcgtttgttttggtattatttagggtgtgggtagtagtggttcgagtaggtattattgatttgtaggtagggaaagtttgttaggttagttatgcgtttggtattaggaggagaggattagagttagtagtggttataatgagggtaaaatttttatagtggaatattgttatttaaaagggatgggtggttgtagggttttttggatggaagtataaatgagaaaatatatacgtttttgtaaatggatttgtttgggaagataaggttatagtatatatagttttttagtaatttaaattttatgtgttatgatgtagatatttataggataagtaagaataataaaatttttagttttgt

SEQ ID NO: 1614 - DNA, 495 bp, Artificial Sequence
  chemically treated genomic DNA (Homo sapiens)
ataaaattgaaggttttgttgtttttgtttgttttgtaaatatttatattatgatatataaggtttagattgttagaaaattatgtgtattgtggttttgtttttttaaataggtttatttatagaaacgtgtgtatttttttatttatgtttttatttaaaaagttttatagttatttattttttttgggtgataatattttattgtgagggttttgtttttattgtgattattgttggttttgattttttttttttgatgttaagcgtatggttgatttggtaggttttttttgtttgtaggttagtggtgtttattcggattattgttgtttatattttggatgatgttaaagtagacgttttgtttatttgttattaggagtcgtcgttggtttttaattatttttttttaaaattttagtttggagtaaatattagatgttaaggtaagttagggtatagttatgataaggaatttgtatgaagtgatgg

SEQ ID NO: 1615 - DNA, 364 bp, Artificial Sequence
  chemically treated genomic DNA (Homo sapiens)
tttttttttagagttaaggttagttgtgtttatatggatatggtagtaaagattggaattgaaagtatgttagtttttttaatattttcgttaatagtttttttaatttttttgtggtacgtgttaataatatagttcgtatttgttttagaaataagcgttttataagtatttttgtttgatttgttttggttggtataggatttagatgtttttagaatagtataatagattttttaaattagtttatttttatttcgagttatttatagttttgatttgttgttggttggggtttattttcgagttttttttatttattatgtgaattacgtttagatttttgttagtttgtttttttttt

SEQ ID NO: 1616 - DNA, 364 bp, Artificial Sequence
  chemically treated genomic DNA (Homo sapiens)
agggaaaggataaattagtaaaagtttgaacgtgatttatatgataggtagggaagattcggggatgaattttagttagtagtagattagagttgtgagtggttcggaatgggaataggttgatttggagagtttgttgtgttattttaagagtatttggattttgtattagttaaagtaaattaaataggagtgtttatggagcgtttgtttttaaaataagtacgggttgtgttattgatacgtgttataggggaattgagagggttgttggcggagatgttaaaaaagttgatatgtttttagttttaatttttgttattatatttatatgggtataattgattttggttttagaggggaa

SEQ ID NO: 1617 - DNA, 472 bp, Artificial Sequence
  chemically treated genomic DNA (Homo sapiens)
ttaaggaggtatggtggttaatttttttttgaatgggattggtttttatatagttatttttttcggtttatgatttttttttttatttgttgtttacggacgtcgaaaataatttgttttttggtaagtttgggatgagattttttatgatttaattagatttataatgaagtttttttagtttttaggagaaaatattttgaattgtagggttggttaagggtagggttttggtgaagaggaggagttttttgtttgagtagtatatttggagttaggagagttgtaatagggttatgttatttatttagtggggtgtttttattgtggttgagatttttggtagtgttttaaggtgtgtattatgtaagttgtgtttttttattttttgtagtttagattaaaggttttaaagataataggtaggatatcgtatttgtaaatattagttgtttggtttaggaagagatag

SEQ ID NO: 1618 - DNA, 472 bp, Artificial Sequence
  chemically treated genomic DNA (Homo sapiens)
ttgtttttttttggattaagtagttggtatttatagatgcgatgttttgtttattatttttgaggtttttagtttgggttgtagggagtgggaaggtatagtttatatggtatatattttggagtattgttaggagttttagttataatgggggtattttattgggtgggtggtatggttttgttgtagtttttttggttttaaatgtgttgtttaggtagggggttttttttttttattagggttttgtttttaattagttttgtagtttaggatgtttttttttgaaagttgggagagttttattatggatttgattaaattataaggaattttattttaagtttgttagaaaataagttattttcggcgttcgtgggtagtaaatggagaagaaagttatgagtcggaaggaatgattatatagaaattaattttatttaggggaaggttggttattatgtttttttga

SEQ ID NO: 1619 - DNA, 397 bp, Artificial Sequence
  chemically treated genomic DNA (Homo sapiens)
tttttttttttttttttgtttttgtgataaacgttttattaggttagtacgtttgataaagttttatttgaaaatatgttcgagattcgtgtttttgtcgggttttagggattagtcggtaatttattttatggataatattattttttattaggggaaatattaaaaattaatttagaggattttatatttttttgttaggagtaaagttgttatggttattagataatgtattgattgggttggaatatagataaggacgatttttttttgtttttaatattagaaaggtaaaggttttagtgatggtttataggagaaatgttttgtggataaagagaatataattagtattagagtttggtagaaggtatttgattttaggtagtatttaatt

SEQ ID NO: 1620 - DNA, 397 bp, Artificial Sequence
  chemically treated genomic DNA (Homo sapiens)
ggttagatattgtttggagttaaatgttttttgttaagttttgatgttgattgtattttttttgtttatagggtattttttttgtgagttattattggggtttttgtttttttgatattaaaaataaaaaaaagtcgtttttatttgtattttagtttagttagtgtattatttggtaattatagtagttttgtttttagtagaaaaatatgaagttttttgggttaatttttaatgttttttttggtaaaggatgatgttatttatgaaatggattgtcggttgatttttgaaattcggtaggagtacggatttcgaatatatttttagataaggttttgttaggcgtgttggtttaatagagcgtttattatagagatagggaaaaagaaaagaa

SEQ ID NO: 1621 - DNA, 466 bp, Artificial Sequence
  chemically treated genomic DNA (Homo sapiens)
agtagatggtatttgtttgttatagggtattgagcggtgtattgttttatgtattatgtattaagagtggtttagtattttggttcggttgtgtgggataagttttgtaaaagaaatatttgatgaattgatcgggatgttaaaatgttattaaggataaattaatggatgtgttattttggttgtaagaggtagtgttagtaagataatagatagtcggtgggttgttttttagtttaagatagacggcgtttgtaatggagatttatggtttttatgtaacgtgaggtgttttgtagggagaagaataaatagaaatgttttagtatttaagcgttataaaattataagtatgagattaattaattagtgtatattaggaaggcggttggtttgtttgcgtttttggggaaagttagaatggatggtattgggttagagatgacgggtttttgtattagttttt

SEQ ID NO: 1622 - DNA, 466 bp, Artificial Sequence
  chemically treated genomic DNA (Homo sapiens)
ggaggttggtgtagggattcgttatttttaatttagtgttatttattttagttttttttaggagcgtagatagattagtcgtttttttagtgtatattaattaattaattttatgtttgtgattttatggcgtttaagtgttggagtatttttgtttatttttttttttgtaaagtattttacgttgtataaagattatgaatttttattgtaaacgtcgtttgttttgggttggagaatagtttatcggttgtttgttgttttgttggtattgttttttatagttaaagtaatatatttattaatttatttttaatgatattttgatatttcgattagtttattagatgttttttttgtaagatttgttttatatagtcgggttagggtgttaggttatttttgatgtataatgtatgagatagtgtatcgtttagtattttgtgatagatagatgttatttgtt

SEQ ID NO: 1623 - DNA, 496 bp, Artificial Sequence
  chemically treated genomic DNA (Homo sapiens)
gaggtggtaatttttgttaaaggggattaagaataaggagttttaagaattttttgtagggttgttggttggagacgttgtttttatgtaaattttatttgtcgttgttaatttagattttgttttattacgattatttttgagaaatagatttaagatatgaaaaaaaattttttttttgtaaaattggttcgtgaaatagattataggtattaatattttttatgagtgataatttagggttaatatttatattttgtaatgttcgttttttttttttcgggatagaaaagaatgttgttaatattaatgaataaatattaataaaattaaatataattttgttttatttggaattaatttttaaaaaaatttttaatatttgtatataatatatatatatttttatgtataatagggaaattagattttgtttgagagatgtgtatagtatttaatgttaatttatttggttttattttttttttagattgtt

SEQ ID NO: 1624 - DNA, 496 bp, Artificial Sequence
  chemically treated genomic DNA (Homo sapiens)
agtagtttggagaaaaggtggaattaaataaattggtattaaatattgtgtatattttttaggtaaaatttgatttttttattgtatatagaggtgtatgtatattatatatagatgttaagaatttttttaaaggttgattttagatggaataagattatatttgattttattaatgtttatttattgatattggtaatatttttttttgtttcgagagaaagagaacgaatattataaagtgtaaatattggttttaaattgttatttataaaggatattaatgtttgtagtttgttttacgaattaattttatagaaagagggtttttttttatgttttgagtttgttttttagaaatggtcgtggtgggataggatttggattgatagcggtaaatgagatttgtatggaggtagcgtttttaattaatagttttgtagaaagtttttagaattttttgtttttaattttttttggtaggagttgttatttt

SEQ ID NO: 1625 - DNA, 474 bp, Artificial Sequence
  chemically treated genomic DNA (Homo sapiens)
gttgagaagatgtgattgttatttttttaattcgataagatgattttttttaattataatataagtttagtgagttatataattatggtgaattttttattagtttaatattttatgtaattttttagagaatatgattttatttgaaaatatatgtaatagtttggaatttatttttttttagtgtttaatttttagatttttataaatattagatggttttttaggtagtgatatacgttggaattatcgaataagtatcgtttatgattttgttttgggtagtgttaaaaggtattgagaatttatttattttattacggcgttgttaatagggttttaggtagtttgttgggtttggaggtgtgttaaattgtagtgttatgaatgttttaaacgagagatagagaaagagaaagagaaggaatatgtgaatgtgtgtttgtagttgagggaaataataagagtaaaggg

SEQ ID NO: 1626 - DNA, 474 bp, Artificial Sequence
  chemically treated genomic DNA (Homo sapiens)
ttttttatttttgttgttttttttagttatagatatatatttatatattttttttttttttttttttttgtttttcgtttgaggtatttatggtattgtaatttgatatatttttaggtttagtaaattgtttgagattttgttagtaacgtcgtaatgagatgggtaaatttttagtattttttgatattgtttaaggtaaagttataagcgatgtttgttcgataattttaacgtgtgttattgtttggaaggttatttggtatttataggaatttgaaagttaggtattggggaaaaatgagttttagattgttgtatgtatttttagatagaattatattttttgaaaaattgtataggatgttgagttgataggggatttattatgattgtatggtttattgggtttgtattatggttgagaaaaattattttgtcgggttgggaggatgatagttatatttttttagt

SEQ ID NO: 1627 - DNA, 460 bp, Artificial Sequence
  chemically treated genomic DNA (Homo sapiens)
tttttataattgttttttttatcgaaggatttagatataaattgtattttaaatttaatattagttattaatattttatgattataaaacgttaaagataatgttagtggaaggagcgtttgtatgggtagaatggatgatttagaagttcggggagaggggagtcggtatattaagtggttcgggagtttttgaggtaatttagtatgataggcggtggtttttggttgagtgtaatatttttcgaggtgtttattaagcgtcgtcgttgtgtataaatattttttttttgatttttgttattttatgtttattatgattaggagtaggtggggttattatgattttttgagttttttttttgtttttgaggaagttaaatggacgttttggtaggagggtatggggttgggtgggtagattcgatggttatgtatttggggttttggttggtttttgg

SEQ ID NO: 1628 - DNA, 460 bp, Artificial Sequence
  chemically treated genomic DNA (Homo sapiens)
ttaggagttagttagagttttaggtgtatggttatcgggtttgtttatttagttttatgtttttttgttaaagcgtttatttggtttttttaaaaatagaagggaaatttagagggttatggtggttttatttgtttttggttataataaatatgaggtgataagaattagaggggaaatatttatatatagcggcggcgtttggtgagtatttcggagaatgttgtatttagttaggagttatcgtttgttatattggattattttaaagattttcgagttatttagtatgtcggttttttttttttcgaatttttgagttatttattttgtttatgtagacgttttttttattgatattatttttaacgttttgtaattatgaaatattaatgattgatattgaatttaaagtataatttgtgtttgaatttttcggtggaaagggtagttgtaaagg

SEQ ID NO: 1629 - DNA, 410 bp, Artificial Sequence
  chemically treated genomic DNA (Homo sapiens)
gagatgagtaggggattggagaagagaatcgttggaaatgataggagttgaaggttttaaaggtatatagaaggttatgttttttagttttttaaatttatatatttttagatgttgtttgtttttatattcggttgttggggttgagtagttaatttgggacgatcgtgatatatttaacggtgagttatgtttttttttagtaattagtagtggtaggttcgggaggatgtagggagtatttttggaaattcgtgtttgagggtcgttatgataacgttatttgagtcgtttgttagtagttgggatgttagtgtttgaattaaggtataaaatagttttataggttgagtgcggtcgaggataggagtaggttttttgtacggtatttttaatgggtttgttaggga

SEQ ID NO: 1630 - DNA, 410 bp, Artificial Sequence
  chemically treated genomic DNA (Homo sapiens)
tttttggtaaatttattggggatgtcgtgtagggggtttgtttttgttttcggtcgtatttagtttgtgagattattttgtgttttggtttaggtattggtattttagttgttggtaagcgatttagatggcgttgttatggcgatttttaggtacggatttttagagatgttttttgtattttttcgagtttgttattgttgattgttgggggagagtatgatttatcgttaaatatattacggtcgttttaaattggttgtttagttttagtagtcggatgtagggataggtagtatttgggggtgtgtgggtttgggaagttgagaggtatgattttttgtgtatttttggggtttttagtttttgttatttttagcggtttttttttttaattttttatttatttt

SEQ ID NO: 1631 - DNA, 489 bp, Artificial Sequence
  chemically treated genomic DNA (Homo sapiens)
tgagagttggaatagtagtagaaattagaagaaattttattgagaaaagaggtatagagaggagtgttaattagtatttaggtttttttttgggagtgttaatttataaatattaataatcgtaattatttagtattagttataatgttttgtaaattaaggttatttttcgtggagtaaatagttgcgttaatggtagtaaaaggtaacggcgttgttggttgtatgttagttgatgtttgttaggatgatagtataaattaggaaggatacgtttaatttgtgaagataggtagtggtatgggggtaggtggagtgacggggtagagtgtggtcgtagatatatattttacgtaaggtttttgggtcgatttgatttaatagggatttgttttagataggtgatgtttggggtagatgaagtttttagggttattaggtgtaggtaggaggggagagaaggggtcgggtgggtagggagagggtgtt

SEQ ID NO: 1632 - DNA, 489 bp, Artificial Sequence
  chemically treated genomic DNA (Homo sapiens)
gatattttttttttatttattcggttttttttttttttttttatttatatttagtgattttgggagttttatttgttttagatattatttgtttaaagtaggtttttgttagattagatcggtttaagggttttgcgtgggatgtgtgtttgcggttatattttgtttcgttattttatttgtttttatgttattgtttgtttttatagattggacgtgttttttttgatttatattgttattttggtaggtattaattggtatgtagttagtaacgtcgttattttttgttgttattaacgtagttatttattttacggaaaatgattttaatttataaggtattataattaatattggatgattacggttattaatatttatggattgatatttttaggaggggatttgggtgttaattggtatttttttttgtgtttttttttttaatgagattttttttgatttttgttgttgttttagttttta

SEQ ID NO: 1633 - DNA, 494 bp, Artificial Sequence
  chemically treated genomic DNA (Homo sapiens)
tttattttttatttggatattattttaatgtaaaggtatggttgagatatagaaatttttttgaaatgtattattgcggtttttattgatttttattgtgtgttttaatggtgggtttagtgggtgggggttgggaggggtggagtaggtgtatggggtagcggtgtttagtatttgttttagttatagttgttggtttattgtatggtaggtttttttaattcggggatatcgtatgtatagtgtttttttcggcgttttttgttttcgtcggtttggtgtcgattttatatttgttaggagtattatgaaggcgtttggggggcgagggatttaaggagtgggggtttgtgttttttgcgtgtgtatatagttttcgtttttagtttattatgttttagaatgtttttttttttttttgtttgggtttaggttttattatattttgggtatttattgtataggagggtagtgtttaggattttattaatagt

SEQ ID NO: 1634 - DNA, 494 bp, Artificial Sequence
  chemically treated genomic DNA (Homo sapiens)
gttgttggtgaagttttgagtattatttttttgtatagtaagtgtttaaagtgtgatgagatttgaatttaaataaaaggggaaggagatattttaggatatgatgggttgggggcgggggttgtgtgtatacgtaggaggtatagatttttattttttggatttttcgttttttagacgtttttatggtatttttggtaagtgtgaaatcggtattaggtcggcggggataaagggcgtcgaggggggtattgtatatgcgatattttcggattaaaggggtttgttatgtagtgggttagtagttgtgattggaataggtgttgggtatcgttgttttatgtatttgttttattttttttagtttttatttattgggtttattattaaggtatataatgggagttaatgaggatcgtaatgatatattttaaggggatttttgtgttttagttatgtttttatattaaaataatgtttagatgggaggtgag

SEQ ID NO: 1635 - DNA, 472 bp, Artificial Sequence
  chemically treated genomic DNA (Homo sapiens)
ttggttatttttattttggagtattataggttaaattagttagtaattcgtggaattaatttacgagtggtgtttatttttggataatggtttagtggaggggttggtttgtagtttatatttattatggttttgttgaatggtgttcgttagattttgtataatcgaatttagtttagttttatgaaggttttgtataagttagtttttttttttcgttatttgatggaataatagatttataggagaatttatttgtaattttaagtttcgagttaaagacgttttaagggatgaacgtgggtgatttgtggaatattgcgatgtatttatgagatagattgtacgtttatcgcggcgtttaaagaaattagatcgggttgtattagaggcggtgttgtaattcggttgttttttgggaaagaatgtaagtttttagtgtgcgaagtatgaggggttgtagaggaaattg

SEQ ID NO: 1636 - DNA, 472 bp, Artificial Sequence
  chemically treated genomic DNA (Homo sapiens)
taattttttttgtagttttttatatttcgtatattggaagtttgtatttttttttagaggatagtcggattatagtatcgtttttaatgtaattcgatttggtttttttgagcgtcgcggtgaacgtgtaatttattttataaatgtatcgtagtgttttataaattatttacgtttattttttgagacgtttttaattcggggtttagagttgtaaatgaatttttttatggatttattattttattaaatagcggagagaggggattagtttgtgtagagtttttatagagttgggttaaattcgattatgtaaagtttaacgagtattatttagtaaaattatggtgggtgtgagttgtaggttagtttttttattgggttattatttaggggtaaatattattcgtgggttagttttacgagttattggttgatttgatttgtgatattttaaggtggaagtaattaa

SEQ ID NO: 1637 - DNA, 474 bp, Artificial Sequence
  chemically treated genomic DNA (Homo sapiens)
tttgttttatttaggtgtgaagtatttcgttttatttggaaggttgggtatatttaaatattatttttttgtacgtttatttgtcgtagagtggttaatgttttttaattggtgtagtaaatattttagagttttttttgttatgtcggagttatttagaaattagttttgaaatgtggttgttattttagggattattatatattatttgttgtttggtgttaaattttgagtcgttgttatttaatattgattaataaatggtaggttgttagtatcggtagtgaagatattttaaggagttattgtttttttaaattaaaatatttaaatatttaaatttagggttggtttttatggttcgttttaattattttttttgttttggtatatttttttttttttgattatatagttgttacgttagtagtatttggagtcggaatacgatagttttttttttattagttgtta

SEQ ID NO: 1638 - DNA, 474 bp, Artificial Sequence
  chemically treated genomic DNA (Homo sapiens)
tggtagttaatagggaaagggttgtcgtgtttcgattttaggtattgttggcgtgatagttgtgtgattaggagaagaaaggtatgttaagataaaaggaataattaaaacgagttatgagaattagttttggatttaaatgtttaaatgttttaatttaaaagaataatggttttttgaagtgtttttattgtcggtattgataatttgttatttattaattagtgttaaataatagcggtttagggtttaatattaaatagtagatgatgtgtgatgatttttaaaatagtagttatattttagggttgatttttaaatgatttcggtataataaggaagattttggaatatttattgtattaattaaagagtattaattattttgcgataaataagcgtgtaggggagtggtatttaaatatgtttagttttttaggtaaagcgaggtgttttatatttaggtggggtagg

SEQ ID NO: 1639 - DNA, 481 bp, Artificial Sequence
  chemically treated genomic DNA (Homo sapiens)
gggagtagtttgggtattttttacgttcggtataattcgttcgggttggtagttagagaagttaggtagagaagtgcggttagagaggttgtttaatttaattttttcgggttgggttatttgaaagtttaaaattttttaatattaagagacgggcggtatttaaatttaagtttggtttttaaatgaaattttttcgtttaattgtttaattttatttggaaatatgaaatggtaatttgattatatgttaaggtagttttggtcgggggattagagtcgaaatttttgtttttttgagtttattttttagcgaatggaatttatttaaattaggaattagttttgttatcgcgggcgagtcgtaggtttggtggtttggagggtggggtattttgaggttgcgggattttagttattttgtatggttaggataagggggcgtttagagttttgcgttttttaagggaggttggaagga

SEQ ID NO: 1640 - DNA, 481 bp, Artificial Sequence
  chemically treated genomic DNA (Homo sapiens)
tttttttaattttttttggggaacgtagagttttgggcgtttttttattttggttatgtagagtaattggaatttcgtagttttaagatgttttattttttaggttattaggtttgcggttcgttcgcggtagtagaattgatttttaatttggatggattttattcgttggaggatgaatttagaggggtagagatttcggttttaatttttcgattaaagttattttaatatgtaattaagttattattttatatttttaaataaagttgaatagttgaacgaaaagattttatttgggagttagatttaaatttaaatatcgttcgttttttggtattagggagttttagatttttaaataatttagttcggggaaattgggttggatagtttttttggtcgtatttttttgtttggtttttttaattgttagttcgggcggattgtgtcgagcgtggagagtatttaggttgttttt

SEQ ID NO: 1641 - DNA, 425 bp, Artificial Sequence
  chemically treated genomic DNA (Homo sapiens)
gaagttagggtaggggatgtttttcgaaggttatattttatggtaggtatatagtagtacgtttaaatatggtttttgttaaggttagagaggtattatttatatagaagaagttattatcgtgattttatttatttcgcgtttttatcgcgtaattgaatgttgagtgtggacggtattttttttagtatttggttgcgttatcgtgtttagttggtaagttttgggggagaagagaggtttagaaggaagattatttgagtttattagaataatgtgtgtttttaataaggtaggggcgtttaaatttagtaggtttaatagattaagttatgttatgaaggttttgtggattatttattttcgttaattagttattatttaaaagatgagaaaacgttagtttataggttaaatgggaggta

SEQ ID NO: 1642 - DNA, 425 bp, Artificial Sequence
  chemically treated genomic DNA (Homo sapiens)
tgttttttatttggtttgtgagttggcgtttttttattttttaagtggtgattggttggcgggggtaggtggtttataagatttttatagtataatttggtttgttggatttattgagtttgggcgtttttgttttgttaaaagtatatattgttttgatggatttagatggttttttttttgaatttttttttttttttaaggtttgttaattgagtacggtaacgtagttaagtgttggaagaagtgtcgtttatatttagtatttaattacgcggtgggggcgcggggtgggtagagttacgatgatgattttttttatgtgaatggtgtttttttagttttaataggaattatgtttaagcgtgttgttgtatgtttgttatggagtgtggttttcgaagaatattttttattttgatttt

SEQ ID NO: 1643 - DNA, 492 bp, Artificial Sequence
  chemically treated genomic DNA (Homo sapiens)
ttaaatgtttttttttttttaagtcgtaagggacggatagtattatttgtggtttttgtggttggtattttttttgtagtgtttttttgttaggagtttttttagataataagttgtagaagagagtaggagatggagtaggtattgtgtgtatcggattgaaatttttaagtgttttttgtatttgttttagtgttagttatagtttaggtttttaacgtttttcggttttttatgttggaagtttttttagtagatggttttatggttagagttggttttttgtgagttttgttgttgttttaattgtagtgtttattatttgagttttttttcgcgagttatttttattcgttaaagtgaatttaggtcgattttgtttttgttgtgtttggtttgttatttattttttgttatgagtgattttaaatatgttttatgatcgaagagttttgagtagagagaatttagtagttttttaggagttatatt

SEQ ID NO: 1644 - DNA, 492 bp, Artificial Sequence
  chemically treated genomic DNA (Homo sapiens)
gatgtggtttttgaagggttgttgaattttttttgtttagaatttttcgattatagggtatatttgagattatttataataaagaatagatagtaagttagatatagtaaaaataaagtcggtttaaatttattttagcgagtgaaggtggttcgcgagagggggtttagatgataggtattgtagttagggtagtaatagagtttataggaggttagttttggttatgaggttatttgttaaggagatttttagtataagaggtcggagggcgttgaaggtttgggttgtggttggtattggggtaggtgtaagagatatttaggagttttaattcgatgtatatagtgtttgttttattttttgtttttttttgtagtttattatttgagagaatttttaataggaagatattgtaggggaaatgttaattataaaggttatagatagtgttgttcgttttttgcggtttgagggaaaaggagtatttgg

SEQ ID NO: 1645 - DNA, 489 bp, Artificial Sequence
  chemically treated genomic DNA (Homo sapiens)
gaatagaatttagggttgaggttagttttgagtttgtaggttttgtttttttataaaggtgagtagatgggtttggagagggttgtttatgttatggaagggtttttatgttatcgaggttaaaattaaagtaggagtaaattagttttgttagtgtgtatagtcggtattaaagaggtaataacggtagagaatattttttgaaagatatatatgaaattagtaacggcgatggtttttggaagaattaggttagaagtagatttaatttgtattgtgtatattttttggtattttttttaattgaacgtatgtgaatgtattatttatttaaaaataaatgtgtaaaaatacgtgttacgataaagtaaaatgaggagatagtataaaaaagataaggataattttaaattttttttaataaaacgttgtttaaaaatttaagaggaaaaaagggtaggttttagttagtggagagaataattgaaa

SEQ ID NO: 1646 - DNA, 489 bp, Artificial Sequence
  chemically treated genomic DNA (Homo sapiens)
ttttagttgttttttttattagttggagtttatttttttttttttttagatttttaaatagcgttttattaggagaaatttaaaattatttttgttttttttatattgtttttttattttgttttgtcgtggtacgtgtttttatatatttatttttgaataggtaatgtatttatatgcgtttaattaaaaaggatattaaagaatgtatatagtgtaaattaagtttgtttttgatttaatttttttagagattatcgtcgttattggttttatgtgtgttttttagaaaatattttttatcgttgttgtttttttgatgtcgattgtatatattagtagggttgatttgtttttgttttggttttagtttcgatggtatagaggtttttttatagtatgaatagttttttttagatttatttatttatttttgtgagagggtagagtttgtagatttagggttgattttagttttggattttgttt

SEQ ID NO: 1647 - DNA, 417 bp, Artificial Sequence
  chemically treated genomic DNA (Homo sapiens)
agtgtagagaggttattgttgtttttaaaatttatgtgtattggagtattttgtttttgtgtgttagtattttatttattttttttttagttatttttatttttattattaattttggtaattttgttttgtaattaaaatagtttttagtatatggtataatcggagagtttttgatatttttttttggagatttatgtttgcgttttgggggtattcggtattagtgatgggtagttttgtttgttgatttttcggttgtttttaattggatttgagtattttaagagaaattgtaaaatgttttaagatagaaaggttttacgaggttttatttttagagttaaggttgtagtattttttattaagtagatttttaatcggcgtataggaaggagttgagaagagtgagtatat

SEQ ID NO: 1648 - DNA, 417 bp, Artificial Sequence
  chemically treated genomic DNA (Homo sapiens)
gtatatttattttttttagtttttttttgtgcgtcggttaagggtttgtttgataggaaatgttatagttttggttttaaggataggatttcgtggggtttttttgttttggagtattttatagttttttttagaatatttagatttaattagaaatagtcggggagttagtaggtagggttgtttattattagtgtcgaatgtttttaagacgtagatatgaatttttaaagaggaatgttaaaagtttttcggttatgttatgtgttaaaggttattttagttataggataaagttgttagggttgatggtgggggtggaggtggttggaaggaaagtggataaaatgttagtatataggggtaagatgttttagtgtatatgagttttgggggtaatagtggtttttttgtatt

SEQ ID NO: 1649 - DNA, 2844 bp, Artificial Sequence
  chemically treated genomic DNA (Homo sapiens)
ttgtattagagaaaagttagagtagtggagaattgtagaggaacgcggggtatttatataaatgttttgaatgaatgagtgtatagagtgatagataaaaagaattagagggtcgggtttcgtggtttacgtttgtaattttagtattttgggaggtcgagttgggcggattataaggttaagagatcgagattattttggataatatggtgaaatttcgtttttattaaatatataaaaattagttaggagtggtggcgtttgtttgtagttttagttatttaggaggttgaggtaggagaatcgtttgaattcgggagacggaggttgtagtgagtcgagatcgcgttattgtattttagtttggcgatagagtaagatttcgttttaaaaaaaaaaaaaaaaaaaaaaaaaagagagttagggttttttttgaagcgaagagggtaaagggtaaaggggaagtataggggaatttcgcggcgttttttgaagttttttttcgaatataatcgtaacgaaaaggttaacgattagaggttttgcgaggttgaggttgggtttcgggaggggattgttttgagaggttcgggaggatttgttgtggaatttaagcgatcgtgggttttgagggaatcggggggtaagatatttatttagtattcgcggaatattttttcgaattatttcggggaggggtgaggtcggggtagggtggggtttttttcggagggggcgcggttttcgagtaattaatttcgtttttgttgcgttttgttttttttttgtttatttagtagggttagtttagggcgcgttaagagtttagagagttcgtttttatggtgacgggtttcgcgaaggtttttttggggtgaagaggtagggcgttgaataatcgttatggcgatagtagtagatgacggtgttttttttgagtgtttttatttagagttaagggatatttgagggtaagtaatcgagtgacgaaataaagaaggcggggtttgaggatagaacgttaaggttaggggaatggagttaggtaaacgaggggcggggttgtagatgattcggtcgggagagggttacggtttgttgggggagcggttcgagattgcgttttagagaggaattagagagagggtttttaatttaaatataaatgaatgattggatttttgaagaattcggaatggtttgttgattggatagatggatggatggatggacggacggacggatcgatggatggaaatttggttattattgacgtttgagttttttatttttttgggttttttattttcggagtttttattcgtttgtgatagttgtacgagaaatatatgttttttttaggagtaaatttttaatttaaataggtagtatagagttagtttagtattttatattggaggtatttagggtggagtttaggtcgatgagacggcgtaggatgaggttttttggtttagttgggaattatttttttttagatttttcgtttagagtttaattttttttttttttagcgttattttttttgttagtttgtttagttttttagggtgtttggatttttaggttttattttgtgtttagtatagtagggtttagcgttttagtaattgggaaggtttgtatttttgttgattattttttggaattgttggaattttgttatatagggtgaggagtggataggggtttgtttttatttttgggtggggattagttttgaaaataaatatagttgttttgaattttattgtatagggagtaatttgaagtaggttgaggtttttggatgggggggtttagaatttatatgttgagtttatttttttttttttatttaattttaggtatttaagggttttttaggttatttattgttgtttataattatatgtagtaagatgggggaaagtggtagtaggggtagtttagtagagtttttaatggttatgtttagggaggggtgttttttgtttttagggtatgggaggtgagattgggtatttttatttgttttttttttttttttttgagatagagttttattttgttatttaagttggagttcggtggtacgattatagtttattgtagttttaatttatcgtgatttttagttaagcgatttttttattttagtttttagagtagtttggaatacgggtgtatgttattatgtttgggtaatttttaaattttttgtattgatggagtttttttatgttgttttgtttagttttgaatttttaggtttaagtgatttttttgttttagttttttaaagtgttgggattatagatgtgagttattatgtttagtttttttttgtatttaaggagttttttttagttgaataaaaatttagtttttaggggattaatttttttgttggatttgggaggatgggatttagaattgtgtagttggttttagagttttatgttttatattttttatcgtttgtttttttggaatgggatagaggagagggtattagtattagttatttatttgtttgttaacggtggagtattatggagttgtggttatttgttttttttaattttaaattttaggtattatattatttgattaagttttagatttttatttttagtggagatttagtatatttttttttaaggagttgtagcgttaatgggggtatatatagtttttgttttggggttttaagaagagttttatgtattgggtttggagaagatatagaaatttagttagagattttatttaggatattagaatattgtcgtttacgttaagtattttgtttaaaagaatggagttggtcgggcgcggtgg

SEQ ID NO: 1650 - DNA, 2844 bp, Artificial Sequence
  chemically treated genomic DNA (Homo sapiens)
ttatcgcgttcggttaattttatttttttgagtaagatatttaacgtgggcgataatgttttaatgttttagatggagtttttggttaaatttttgtgttttttttaaatttagtgtatgaagttttttttgaaattttagggtagaggttgtgtgtgtttttattagcgttgtaattttttaagggaagatatattgagtttttattggaagtggagatttgagatttaattaggtgatgtgatgtttgaaatttggagttagaagaggtaggtgattatagttttataatgttttatcgttagtaaataggtggatagttgatattggtgtttttttttttattttattttaggggggtaaacgatgggaagtgtggaatatgaagttttggagttagttgtatagttttgaattttatttttttagatttaatagaagagttaattttttgaaaattaaatttttgtttagttaagggaagttttttaaatgtaaagaggagttgggtatggtggtttatatttgtaattttagtattttgggaggttggggtaggaggattatttgagtttagaagtttaagattggatagggtaatatagggagattttattagtataaaaaatttaaaaattatttaggtatggtggtatgtattcgtgttttaagttattttggaggttgaggtaagaggatcgtttggttgaggattacggtaggttgaggttgtagtgagttgtgatcgtgttatcggattttagtttgggtgatagagtgagattttgttttaaaaaaaaaaaaaaaaagtaaataggggtgtttagttttattttttatattttggggataaaggatatttttttttggatatggttattagggattttgttgaattgtttttattgttatttttttttattttattgtatgtaattgtagataatagtggatgatttgaggggtttttagatatttgaaattgggtagggaaagaaaggtaggtttaatatgtgaattttgaatttttttatttaggggttttagtttattttagattattttttatgtaataaggtttagagtagttgtgtttgtttttagaattaatttttatttaggggtggaagtaggtttttgtttattttttattttatatagtaaagttttagtagttttaggggatgattagtagagatgtagatttttttagttgttggggcgttggattttgttatattggatataaggtgaggtttgaaagtttaggtattttgaggagttgggtaaattagtagaaaagatggcgttgggagaaaggaaagttagattttggacgggaaatttggaaagaagtggtttttagttgggttaaaaagttttattttacgtcgttttatcgatttgggttttattttgagtgtttttagtgtgaggtgttggattggttttgtgttgtttgtttgggttgagggtttgtttttaggagaggtatgtatttttcgtatagttgttataagcgagtgagggtttcggaggtggagggtttaagagggtggggagtttaggcgttagtgatagttagatttttatttatcggttcgttcgttcgtttatttatttatttatttatttaattaataagttatttcggattttttaggaatttagttatttatttatatttaggttaaagattttttttttggtttttttttagaacgtaatttcgagtcgtttttttaataaatcgtggttttttttcgatcgggttatttatagtttcgtttttcgtttgtttggttttatttttttaattttggcgttttgtttttaggtttcgttttttttgtttcgttattcggttgtttatttttaggtattttttaattttaggtaggagtatttagaagggatatcgttatttgttgttgtcgttatggcgattatttaacgttttgtttttttattttaggaaaattttcgcggaattcgttattatggaaacgaattttttggatttttagcgcgttttgggttggttttgttgggtggataggagaggagtaaaacgtaataaagacgggattaattattcggaggtcgcgtttttttcgaagaaggttttattttgtttcggttttattttttttcgaaataattcgaggaaatatttcgcgaatgttgggtgggtgttttgtttttcggtttttttaaggtttacggtcgtttgaattttatagtaagttttttcggattttttagggtaattttttttcgaagtttagttttagtttcgtaaagtttttagtcgttggttttttcgttgcgattatattcgagagggagttttagagggcgtcgcgaagtttttttgtgttttttttttgttttttgtttttttcgttttaagaggagttttggtttttttttttttttttttttttttttttttgagacggagttttgttttgtcgttaagttggagtgtagtggcgcgatttcggtttattgtaattttcgtttttcgggtttaagcgatttttttgttttagttttttgagtagttgggattataggtaggcgttattatttttggttaatttttgtatgtttagtagagacggggttttattatattgtttaggatggtttcgattttttaattttgtgattcgtttagttcggttttttaaagtgttgggattataggcgtgagttacggagttcggttttttgattttttttgtttattattttgtgtatttatttatttaagatatttatgtaggtgtttcgcgtttttttgtagttttttattattttggtttttttttaatataa

SEQ ID NO: 1651 - DNA, 2457 bp, Artificial Sequence
  chemically treated genomic DNA (Homo sapiens)
cgttattataattttttataaaataggagtttttgttgttgttgtttttgagatagggtttggttggttttgtcgtttaggttggagtgtaatggtttgattatagtttattgtaatttcgattttttgagtttaagcgattttttttttttagttttttaagtagttgggattataggcgtatttgaaaagttaagtaggttaaagtatttgtgtaaatggttcgagtatatattttaagtgagaattatttgaagatttcgagtttgtttgcgaggatttttaaagggatttgggtagttggtggtttcgtttttttttttatcggagttttttagttttttcgttttttttacgtttaattttttttcggtttttttttaatcggttttacgtcgttgattcgttcgtagtttttttttattatattttaattatggttgtgtttttgtagttgttatcgttgttgttttcgagggtttaagggaattttgggggtaagcgatttttgggagagttgtgatagacgtagaggggttgaagtaagataagggtcgtttagtagggtgggttgtgtgtgggaagatttaggatggttggagtgtagaatagagaagagaaagaggagacgggatggagggtcgttttgttttgtggacgtgttttaattatagttttcggttttttttagtttttttggacggtcgttttggggatcgggtgaattttttttgcggaggagttttttattttattcgttgggtttgggtatttagtttttcggtttgtaagggtttgtttaaaggacgtcgatcgattttgtgggttttttcgagcgggatttttatcgtgttttttttttagtttttcgtcggtcgtttacgttttttggattttggtattcggcggttggagttttttttgagcgcgggagattcgggtatttttttttgtaagggtcgttacgaggacgagagtcgtatagtgttttacgtgttgggggataggatttattgtaaggttttcgggtttatttatggtaggtgtaggtttgtgcgtataagggtatttaatttcgatatatattcggaggagggaagagggttttggttgggggtttttgagcgggattgttggttgtttttcgttaaatttttgattttagtattttttttcgttacgttttttttttagggttcgtgtatttttagtttttgatttcgttgttgggcgttgggttggtgttcggattgggagttttgggtttggtttggtggttgtataggtgagtaggagggattcggtttcgttaaatggggagtgattagaggtggaaggggtaggattagaattttcgtaaaagaaagagttagatttagagttttggttttggtttggcgaagaatgggagaggttaaaggtgggagcgaggtcgttggttggtgagtagagttttattagagtagatgagttggaagtgtagtagagttagagtttgggttggattgtcggtggggtagagtttaagttgttttcggtttgagtttttaagttgttgggttgtttttggcgtggcgagttttaggagaattagtgagataagattggtggtttttaaagatttatatgttttttataggcgtttgttttcgtaatcgattcgattattttttagatttggtgagattaattttattttatttttttttttttatatgtttattttttattttttaatttttgagtttgagtttttgttgggagtagatacgttggttattttttttttattttttagttttgttttttttatatagttttatttgtgaaaatcgagttttagaggttagtaaaggaggaagagtttaagattttaggggatttggattaggaatcggtaagggtatggggatgggaaggggatagttagaatttttgaggaaaatggattaaaaaaaaaaaggtttgaattttaaggaagattgtggagattattttgtttttttttttttttttttttagagtttgttttatgcggatttggattatttagtttttagtaggtttcgtcggttgtttatagcggattttgttgatgtttttattatttatgtagttgtagtttgaagggaagtttttattttaaattttttaagttaggggattttagttttttataattttttttttttttttggttttttatttggaagaggaaggtattatggtatagaaataagtgttagattgggagttgggagatttgggttttaggttgtttttgttattggttttatttttaaatttatttttattttttttataatttttatgttttttttattattagtgttttttttatatttaattaagttttagttttttttttttttttttttgagacggagtttcgttttgttgtttaggttggagtgtagtgatattattttttttatt

SEQ ID NO: 1652 - DNA, 2457 bp, Artificial Sequence
  chemically treated genomic DNA (Homo sapiens)
agtgagggagatggtgttattgtattttagtttgggtaatagagcgagatttcgttttaaaaaaaaaaaaaaaaggagttagggtttgattgggtatagagaggatattggtggtgagggagatatggaggttataggagagatgggagtaagtttagaagtaagattagtggtagagatagtttggaatttaggttttttaatttttagtttagtatttatttttatattatggtgttttttttttttaggtgaggaattaaggaggggagagggattatggggagttgggattttttagtttgggaggtttggagtaagggtttttttttaaattataattgtatagatggtggaggtattagtagggttcgttgtggatagtcggcggggtttgttgagggttagatggtttagattcgtatagagtaggttttggaggaggaaggggaggaagataagatggtttttatagttttttttggggtttaggtttttttttttttggtttattttttttagagattttggttattttttttttatttttatgtttttatcggtttttggtttaggttttttggaattttgggtttttttttttttattggtttttggggttcggtttttataagtggagttatgtgggggggatagagttgaaggatggagagaaggtgattaacgtgtttgtttttagtaagggtttagatttaggaattgaggggtggggagtgggtatgtaggagaaagaaaatggggtggaattagttttattaaatttagggagtggtcgaatcggttgcgggggtaggcgtttgtaagggatatatgagtttttgagaattattagttttgttttattggtttttttgggattcgttacgttaaggatagtttagtaatttgaaggtttagatcggaaataatttagattttattttatcgatagtttagtttaggttttaattttgttgtatttttagtttatttgttttggtggggttttatttattagttagcggtttcgtttttatttttgattttttttatttttcgttaagttaggattagagttttaggtttagtttttttttttgcgaaggttttggttttgttttttttatttttggttattttttatttaacgaggtcgggttttttttgtttatttgtgtagttattagattaggtttaaagtttttagttcgagtattaatttagcgtttagtagcgggattaggagttggggatatacggattttgggggaaaggcgtggcggggagggatgttgaggttaggggtttgacgagggatagttagtagtttcgtttaagaatttttagttaaggtttttttttttttttcgggtatgtgtcggagttaagtatttttgtgcgtataggtttgtatttattatgggtaggttcgggggttttgtaataggttttgttttttagtacgtgaagtattgtacggttttcgttttcgtggcggtttttgtagaaaaaagtgttcgagtttttcgcgtttaagaggagttttagtcgtcggatattagagtttagggagcgtaggcggtcgacgaaaggttggaggggaggtacggtgggggtttcgttcgaagaggtttataggatcggtcggcgttttttggataggtttttgtaggtcgggaagttgggtgtttagatttagcggatgggatgagagattttttcgtaggagagatttattcggtttttagggcggtcgtttagagaagttaggagaggtcggaggttgtggttagggtacgtttatagggtaagacgattttttatttcgtttttttttttttttttttgttttgtattttagttattttggatttttttatatataatttattttattaggcggtttttattttgttttagtttttttgcgtttattataatttttttagggatcgtttatttttagggtttttttgggttttcgagagtagtagcggtagtagttgtagaaatatagttatggttaggatgtggtgaggagaagttgcgagcgaattagcggcgtggggtcggttggggggggatcggagggaagttaggcgtggggagaacggaggggttggggggtttcgataagagagggggcggggttattagttgtttagatttttttgggaattttcgtaggtaaattcggagtttttaaatggtttttatttaaaatgtgtgttcgggttatttatataaatgttttggtttgtttaattttttaggtgcgtttgtaattttagttatttaggaggttgaggagggaggatcgtttgagtttaggaggtcgaggttgtagtgaattgtgattaggttattgtattttagtttgggcgatagagttagttagattttgttttaaaaataataataataaaaatttttgttttgtaggggattgtgataacg

SEQ ID NO: 1653 - DNA, 2898 bp, Artificial Sequence
  chemically treated genomic DNA (Homo sapiens)
tatttagtgtttttatttaagtaggagagtatagttttttaggtcggttattttatttgttagatgatgatgatgatattgttttttttttagggtttttgggagaattaagtgagattaattacgtttatttaaggttttttagtttttggtttttatgattggttttttttgtgtttgtgtagtttattttattgtttttttttggcggaatttaggaggtaggggataaataagattggttttttagggttagtttagtaggtttgaaagtaagtggtgggaggtttagggtttttcgattatatgtggattttaagtttagttttaggtatgtaggtttttatattttgggtagttgggtggggtacgaagggtttggttgggagataggatgtttggttttaggttagttttcgttttttatttgttgtgtgattttgggttgtgtttagtttttagttgttttttatgtgtaaggggagggttttttatggtttttgtttaaagcgtttgggttttatgttttttagtggattttttagggttgggtatagagtttagtttttagattaggattggtttttgttttgttttgttttttttttagatagggttttttttttgttgtttaggtttaagtgtagtggtatgatttcggtttattgtagttttgattttttaggtttaagtaattcgtttattttagtttttcgagtagttgggattttaagtgtgtgttattatggttagttaatttttgtatttttgttgtagagatgggattttattatgttggttggttttaaatttttgggtttaagtgatttatttattttggttttttaaatttttgggattataggtgtgagttattgagttaggttgttttgttttttaaggttagtgggagtggagaaggaataaagaaatttgtaattggttacgattaattagttgttaatattattgtattcggattagtttagattagggttttgatggaggaaggggatggtgtgggaaatgtttatttaggttatatattttggttttatttgttttttggatttcgagcggtattttgataggatagttcgaggtagtacggcgttttcgtagacgttgggtttgtcgttgggttttaattcgtttggtttgtagtttgtttagttttcgtgtagggtttattagtttttgaagttgtaggtggatggagtagcgattagaagttagagttatagcgtaattttggggggcgggagtttttagggttagaatagttattatatttgcgttggttagggtttgtacgtagttcgatatcgtcgatgttagggcgttcgtggttttattcgttatttttaggaaatttgttagggagggagaaaggtgaggtttagttttatggagataggaaattaagtagttattgtcggatattgggttttagagtaggttgaggggatagtgggatggggcggatatgggggtttgaggtttatagttaggtcggattcgggtgaggttgtagtcggttcgtagggagcgtacggttcgcgtgatgtttagcgttagtttaagggcggtttttgtttcggggtttttttaggagtattgtggggtggaggagggggtgagggggtttggagggtaggttagatttttttttttaggttatgttatatttttgagggtttcgggtagggggtaatatagaggttagggggagtttgcggtatttttcggggtagtttttggaatagttttttcgttacgaagggtatgaagggtgagagtagtcgtaggttaacgtttaggtaagtgtatagggtttggcgggtatatttagttgttatttggtttattttatttagtataggttttaggtatttttaggggacgagaggtatagggtttacggttggaggtttagttttgagttttcgttgtgtttgtgaggattgggaaggggatgggttggtttaggttttaaggttaattttggtaaaattgagtttagggttttgttgtttatttgtttttattattttttgtttcgttgtgtttttttttattaagtagatattatagagtttatagagttagaagttgtattgggtagtggtgacggtcgggaagtcgtaggtttggaagttttgattgttgagttttatagtttttgttaggcggttgcggatttagcggtttattaggtttttatggttttcgggtttggggagagagggtgtattagtcggcgggttaggggagggtgttagaattttatgggggtaggagttatgggtaaatttttatttagagtttgatgagtttaaagtaattatttatgtgttaggatttgggaagaagtgataggttttagtttttaatgcgttgggttttttttttaattgtttgtttttgtgtttatttgtttttttagttatatggaggttgtttcggataggggtatagtttgtgtgagtgttgttagttttgttgtttattaggtttttatttgggaggtgggtgagggtataaaattttttttaaggttacgaagggtaaatttggtggtattttagagtttgttgtagaagtggcggtaatttagtattcggtttatatttaggttgatgttacgatttgggtcgggggtgagatgtgagtttttattattttttttttagtttatgtttattagaggtttagggtggagaagagggatgggttttatagaaggaggaaggagtggttgggagggacgttttgggggttatattttgggatatgtaggtatataatttaaatcggagagtatcggtgttatatttaggaattttcgttgggaagttagttttttatagggaagaggtagggggaggagcgttttta

SEQ ID NO: 1654 - DNA, 2898 bp, Artificial Sequence
  chemically treated genomic DNA (Homo sapiens)
tgaggacgtttttttttttgttttttttttgtagaaagttgattttttagcggggatttttgaatgtggtatcgatgtttttcggtttggattatgtgtttatatgttttagggtatggtttttaaagcgttttttttagttatttttttttttttttgtgaggtttattttttttttttattttgagtttttggtgggtatgggttgggaagagggtgatgaggatttatattttattttcgatttaggtcgtgatattaatttggatgtgaatcggatattgggttatcgttatttttgtaataagttttggaatgttattaagtttgtttttcgtggttttgggaagggttttgtgtttttatttattttttaggtaagggtttggtgggtagtaaagttggtagtatttatataggttgtatttttgttcggagtagtttttatgtagttggggggatagatagatatagagatagatagttaaagggaaagtttagcgtattgggggttggggtttgttatttttttttagattttggtatataggtggttgttttggatttattagattttggatgaagatttgtttatgatttttgtttttatggggttttggtatttttttttggttcgtcggttgatatattttttttttttaagttcggaggttatgagagtttggtggatcgttggattcgtagtcgtttgatagaggttgtgaggtttagtaattaaggtttttaggtttacgatttttcggtcgttattattgtttagtatagtttttggttttatgagttttgtgatgtttatttggtgagaaggagtatagcggggtaggggatggtgggggtaggtgggtagtagagttttgggtttagttttgttagagttggttttgagatttaagttaatttattttttttttagtttttataggtatagcgagggtttaaggttagatttttagtcgtgagttttgtatttttcgttttttaggagtgtttgaaatttgtattgaatggggtggattaggtggtagttgagtgtgttcgttagattttgtatatttgtttggacgttggtttgcggttgtttttattttttatgtttttcgtgacggaggagttgttttagaggttgtttcggaggatgtcgtaagttttttttagtttttgtgttattttttattcggagtttttagaggtatggtatggtttggagaggggagtttgatttgttttttaggtttttttatttttttttttattttatagtgtttttggaaggatttcgaggtagaagtcgtttttgagttggcgttaagtattacgcgagtcgtgcgttttttgcgggtcgattataattttattcggattcggtttgattgtgagttttaggtttttatgttcgttttattttattgtttttttagtttattttgggatttagtgttcggtagtgattgtttggttttttgtttttatggagttaggttttatttttttttttttttggtaggttttttggaagtggcggatgaggttacgggcgttttggtatcggcggtgtcgggttacgtgtaggttttggttagcgtaggtgtggtggttgttttggttttgggggttttcgttttttagggttgcgttgtggttttggtttttgatcgttgttttatttatttgtagttttaggggttggtggattttgtacgggagttgggtaagttgtaagttaagcgagttgaggtttagcggtaggtttagcgtttgcgggaacgtcgtgttgtttcgggttattttgttaaggtgtcgttcgaagtttaggaggtagatgaagttaaggtgtgtggtttgggtgggtattttttatattattttttttttttattaaaattttggtttgggttggttcgagtgtagtggtgttgataattaattgatcgtaattagttatagatttttttgttttttttttatttttattagttttaaaaaataaaatagtttggtttagtggtttatatttgtaattttagaaatttgggaggttaaggtgggtggattatttgagtttaggggtttgagattagttaatatggtgaaattttatttttataataaaaatataaaaattagttggttatagtggtatatatttggggttttagttattcggggggttgaggtgggcggattgtttgagtttgggaggttaagattgtagtgagtcgagattatgttattgtatttgagtttgggtaatagagagaagattttgtttggaaaaaaaataaaataaaataaaaattaattttggtttggaagttggattttgtatttaattttggggaatttattggggagtatggagtttaggcgttttgagtagggattatagaaggttttttttttatatatggggagtagttgggggttgggtataatttagggttatataataggtgggagacggaggttgatttagaattaggtattttattttttagttagatttttcgtattttatttagttgtttaaaatgtggaaatttgtatgtttggggttgggtttggggtttatatgtagtcggggagttttgggttttttattatttatttttaagtttattgggttgattttggaaggttagttttgtttgttttttgttttttgggtttcgttagagagaagtagtggagtaaattgtatagatatagagaaaattagttatggaggttaagagttagagagttttgagtggacgtggttaattttatttggtttttttaagagttttgggaggggggtaatattattattattatttgataaatgaagtgatcggtttgggagattgtgtttttttgtttaggtggggatattgaatg

SEQ ID NO: 1655 - DNA, 3108 bp, Artificial Sequence
  chemically treated genomic DNA (Homo sapiens)
tagatatatatttgttagatattgtttatggtattttttaggaagaatagtatgtgggaaaggttgttaaaattgtttatgtaaaaattatattaatgttgtttttttcggtgttgtttatgtagttggtagttatttttttttttatattatggttttttttagattttttatgaaggataagatttttaaaaagaggattaataagtttatgaggtattaattagattgaaatgttaaaattaagtataattggcggaaatttagaggttttaatagtagggttcgtagaaggtttaagggttagattttgatgtttaatattgtttatgggagtaataataataataaaaaaaatatgttgtttagtggtttttagaagtttttggtttatagttttaaggagttgaaagtgttgttgatgtgtaataaattttattgtgttgagatcgtttataaaattttttttagaattgtaaagttattatggaaagagttatttagtcggttattagagttattaattttagtattagggtgtatagttaagaaaatgagtagaaagtttatgtttacgttttgtgtgtaaataaaattataaaaattgttaaaaaaaattatattaatgtttttaaatttaaaggattttatttttataggtttttggttgttgtggtgatttttattgtgtaaaatattttttatattttttgatattaagtttttttgtagttatgtttgaaaattaatttttaggttatagagttttttttatattaaagttgaagaaagttttaagaaatatatttttatattttttatatgtaaaataataggagtaagttgaggaatttttaagaaattggtcgagaagagagagcgtttagttatggaaaagagaaagaaggaagggagggttttttggaggaggtggtatttgaattaggattgatattaggatggaaatgttagttagggagttaagtagggggagtagtttcgttttttacgtttttagtttttttcgtttttgtttttttttttagtgattttacgtgaaacgttttcgttttttttagttattagtagaagggattgttttttttttagtgttcgtttttttttagtgattatttagtgtttttgagtttattttttttagtaaattttttttttgcgtggtgagaaaataggtttggagaggttttgcgattcgtttaggattatagaattcggtattaggaaaatttttattttaaaatttagttttgggtgggaagatttgggaagaatcgttaatattgagagagagagggagaaagaggattagatgagagtggcgttttcgtttatgttcgtttttttttcgtagagaattattttttttagggacggtaggaatgttacgcgtttaatgggatatagcgttttttggagagatatatttataatcgggaggagttcgcgcgtttcgatagcgacgtgggggagtttcgggcggtgacggagttggggcggtttgttgcggagtattggaatagttagaaggatattttggaggagaagcgggtagtgtcggataggatgtgtagatataattacgagttgggcgggtttatgattttgtagcgtcgaggtgagtgagggttttgggtcggcggttttagggtagtttcgcgggttcgtgtttagggcgtaggagtagtcgggttggtttaagggattttagtgtcgggcggaaaggggattttgggttggggatttatggggggagtttatttggagtttgttaggggagcgagcgcggggatttggattgggttgagtatggagtgaggaggacgagagtagagagattttcgggattttattaggtttggtagttgattgtatgtggggtgaaaaaaggaagttataggatagcgtataagggtatggtgtggagatggaggtggagatggtatagtaggttatatagagaagaaatttatagggaggtagttgggtttgaggtgtttgaggggtagatgggtggtttgatgggtaggtagatagaagggtttgtagtcggggaggagattgagatatatgagattatttagggagaggggatttagggggaagagtaaaggatcggattttgggaattggatagttgtgatttggttaagatagaaaagtttgtgaaagagattaaaaaaatttaagtgtagtgtgaggagaggttcgtagagaagagttttggaagttgaggggaggtgattttagtagtatagtggatagcggtgttagtgatttgggaaggttagaaaatagaagatggaaagtgggtttggaaattagggagatttggggagagtaggttggtcgtagcggtaggagttggaatgggagggggtgtatgaggttgagtgtggcgtatttttttcggggttgagatggattttatttgttttgggttttttacggttgttatagggtagtgttttagtttattcgttttttttttttaggaagtttgggtgtaaagggatggagagaggtgaggtgtgtgtagtaagaggattttttaaggatgggataggaaggttttggagttttggtttttttttgtgaatttgtggggtggggagtttggtgtattaatttgagggatttgagggagtagtattaggatgtgggattgagttttggattttttttttagaaagaggaaaaaaatgaagggaggaggaggaggaagttggggagattatatttttgatttttttgtttttggaaagtgaaaggaagtttatttgttatgagtgagaaggtggatatattgggtggggatgaggtgagtgatatgagtttaggaaagttgttgaggtaattggttgagagaggtgtttaaataaaaataacgtaattggtaaaaattgttattaagattttgtagaggtattaattagtgatatggtagtatttttttttatagtaattaattgttagattgtagatagttttgatgttagtttaaggagtgtgggttttttttttaggttcgtaggtttttaattttatttttttgaagatttttttggagattttttgtgatgtatagat

SEQ ID NO: 1656 - DNA, 3108 bp, Artificial Sequence
  chemically treated genomic DNA (Homo sapiens)
atttgtgtattatagaggatttttagaagagtttttagaggagtgaggttggggatttgcgggtttggaggagaaatttatattttttaggttggtattagggttgtttgtaatttggtagttgattattgtgaaagaaaatgttgttatgttattgattggtgtttttataaagttttagtaatagtttttgttaattgcgttatttttatttgaatattttttttaattaattattttagtaatttttttaagtttatgttatttattttatttttatttagtgtgtttatttttttatttatagtaggtgaatttttttttattttttaggaataagaaaattaaaggtgtgatttttttagtttttttttttttttttttttattttttttttttttttagaaaaaaggtttagggtttaattttatattttgatattatttttttaagttttttaggttggtgtattaggttttttattttataagtttataggaggaagttaaagttttaaggtttttttgttttatttttgagaaatttttttattgtatatattttatttttttttatttttttatatttagattttttgaaggaaaaagacgaatgaattgagatattgttttgtgatagtcgtggggaatttaagataagtaaaatttattttagtttcgaggaggatgcgttatatttagttttatgtatttttttttattttagtttttgtcgttgcggttaatttgttttttttaggtttttttggtttttaaatttattttttattttttgttttttgatttttttaagttattggtatcgttgtttattgtgttgttgaggttatttttttttagtttttaagatttttttttgcgggtttttttttatattgtatttgggtttttttggttttttttataggtttttttgttttggttaaattataattgtttagtttttaggattcggttttttgtttttttttttgggttttttttttttggatggttttatgtattttagtttttttttcggttgtagatttttttgtttatttgtttattagattatttatttgttttttaagtattttaaatttagttatttttttgtaggttttttttttgtgtggtttgttgtgttatttttatttttatttttatattatatttttgtgcgttgttttgtggttttttttttttattttatatgtagttagttgttaggtttgatgaagtttcgggggtttttttgttttcgttttttttattttatgtttagtttagtttaggttttcgcgttcgtttttttgataagttttagatgggttttttttatgaatttttaatttaaagtttttttttcgttcggtattaaggttttttaggttaattcggttgtttttgcgttttgggtacgggttcgcggggttgttttgggatcgtcggtttaaagtttttatttatttcggcgttgtagggttatgggttcgtttagttcgtagttgtgtttgtatattttgttcggtattgttcgttttttttttaggatgtttttttggttgttttagtatttcgtagtaggtcgttttagtttcgttatcgttcggaatttttttacgtcgttgtcgaagcgcgcgaatttttttcggttgtagatgtatttttttaggaagcgttgtgttttattaaacgcgtagtatttttgtcgtttttggaaaaggtaattttttgcggggagggggcggatatgagcggaggcgttatttttatttaatttttttttttttttttttttttaatattaacgattttttttaaatttttttatttagggttggattttaaaataggagtttttttagtatcgagttttgtggttttaagcgggtcgtagagtttttttaggtttgtttttttattacgtagagagagaatttattgaaaagaatgagtttaggggtattgagtgattattagggaggggcgagtattgaggggaaggtagttttttttgttggtggttggaggaggcggagacgttttacgtggggttattgggagaaaaaataggggcgggaggagttggggacgtggagggcggagttgttttttttatttaattttttgattgatatttttattttgatgttagttttggtttaaatgttattttttttaggaagttttttttttttttttttttttttttatagttaagcgtttttttttttcgattagttttttgagaattttttaatttgtttttgttgttttgtatgtaggagatgtagaaatatattttttaaaattttttttaattttggtataagaaagattttgtagtttgaaagttaatttttaaatatggttgtagaaagatttggtgttaaaagatgtggaaagtattttatataatgaaaattattataataattagggatttgtgggggtagagttttttgggtttagaggtattgatgtaattttttttggtagtttttatggttttatttatatataaaacgtggatatgaattttttatttatttttttagttgtgtattttggtattggggttggtgattttgatggtcggttgggtgattttttttatgatgattttgtagttttggaggaaattttgtgagcgattttagtatagtaagatttgttgtatattagtagtatttttagttttttgaggttgtggattagaaatttttggaagttattgggtagtatgttttttttgttgttgttgttgtttttataagtaatgttgggtattaagatttggtttttggattttttacgaattttattgttaagatttttgggttttcgttagttatgtttaattttgatattttagtttgattggtgttttatgaatttgttggttttttttttgaggattttattttttatgaggagtttgagggaggttatgatgtggaggaagagatggttgttagttgtataggtagtatcgaggaagatagtattgatgtaatttttatatgaataattttggtagttttttttatatgttgttttttttagggagtgttatgagtagtgtttggtaggtgtgtgttta

SEQ ID NO: 1657 - DNA, 2897 bp, Artificial Sequence
  chemically treated genomic DNA (Homo sapiens)
gattgtttgagtgtgggaggtagaggttgtagtgagtttcgatcgtattattgagttatagtttgggtgatagaggtaggttttattttaaagagaaaaatattattttttttagtggattttatagtgttaaggatttgtgtaagttttagagatttttggaaatgatgataatatagttggggaaaaatagagagaaatgggaggaagaggtaagtagatatggttaattaaggaaagttgagggtatgatgggtgaatttatgaaattgaggataagatcgtagtaagataatgagtttttaggatttgtttattgatttttagttttatgagatgtgaataatgtttatattgtttcggtaattttatatagtatatagtttgaatattattaaatttttgatatttgattatttttgatttataaaaatagaattttatataatttatattatattagttaaattttttttgttatgtttagttagagtatgtaggagatgtaggagaaataagtatagaaaggttaaaaagatttataataaatattaatttgggttagttttttagaggatgttttaagttttttaggtattaaagaatattttataagtgttttgtatttgtaaggtgattttaagtattaatgattttagttttagttttagggatttttttttataagaaagaaagagtattaagtataatttttgttagataatttatatatattatagggatataggttttataaatattggagtttagaaagaaaagaaaggagatattagggaggttattgggtttatttttatatatgaggaagaggggttaatattataggttttgtggaggatataatttaggatcgtttaggagagattttttgaatttttttgatttttataaaatttttagtaaaaatttttttttgtttgatataagttaatataataaagggaattgttgtatggggaatttattttagtatttttatttttaaattttttaaagattttgagtatatgtgatgtaaaggttttattggtggagatttgagaagaaatggtttgtataaaggttttttatataagttttatggagagggtaagtagttaagttttttttgtggaggaaataatttgcgattttttgataaagatgagtaatttttgaagaaaattttataattttttaagggatatggtttgggtataatgttaatataattttttatatttttttattttatagtagtttagtatttttaatgtgtttttacgtcgggtgtttttagcgaaagttagtcgggagtttagtattattagtgttattgttaacgttgttaagttggagtttttagggagttttagatatattatgttggagaagaggataggattaggggttagaggagtaggtaagttttatttagggagaattatgatttttttttatttatattttaaattatagggaggaagttattgatttttttgtttttggattgggtaatttcgtgtcggagaattaattagtatttgagtttaatagtattattagttgttgtttagagatgttgtatgaaggtttttttttgaaataattttattttttaaaggattgttttaatttagtatttgaaaggtttgaattagttgtatgtaaaatattttaattggggagttattgtgagttagttttgtgttggttagtgatgtgtttataagtttgagttttgtaagagtatttattttttatttgataagataattgtttgtagaagtgagtgtgtgagtgtgtttaagagtaaaggagacggagggaatatggttgtaaattcggagttttttaattttgtttttattgtattatattttaatgttatagatttgggaaaattattttatgttttatagttgaaatgaaggtattgcgattttttaggttttttaatattggaaaattttgtgattttttagatgttttaaggagcggtagttttaggtatttgataatatgatagaatgatagttattgattagagagtgtaatatgtatttatttttaggtagtgatgtttttaataagttaaaggaaattgaaagtttgttaataatttaatttgagtaaaaatattttttttaagcgtgttttttgatgttgtttttaggtttagcggtatttttagaatatatataggaatgggttaataggggttatttatgtgtaatggagggtttgaaggtgtttttgtacggtatttattttaataatgtgataaggttaagtgtgtaatttaggtattcgtgggtttgagagatcgattaaagatttttaaagttagtcgtttatagaataattttttttttttttttttttttttgagatagagttttgttttgttgttttggttggagtgtagtggtatgattttggtttattgtaattttcgttttttcggtttaaataatttttttgttatagtttttcgagtaattttgattataggtacgtgtttttacgtttggttaattttttgtatttttagtggagatggggttttatcgtgttagttaggatggtttcgattttttgatttcgtgttttatattagtagtgtaattttaaattgttggggttattggcgtgagttattatgtttggttataattttgttttaaaataatgaatattttatatgaagagtgtttagttttttatttttggtttttattatgatttttttatttgattgaggttatagtattttattattatgttttttttgttttattataagggaggatataagacgattttgttaattaatatatttttgaatgtttaggaaagagaatattagggaaaattatgaattatattagttgatg

SEQ ID NO: 1658 - DNA, 2897 bp, Artificial Sequence
  chemically treated genomic DNA (Homo sapiens)
tattaattgatgtaatttatagttttttttagtgtttttttttttgaatatttaaaaatgtattagttagtaaagtcgttttatatttttttttatgataaaataagagaaatataatagtaaagtgttatagttttaattaaatgaggaaattataatgggaattaggaatgagggattgaatattttttatataaaatatttattattttaaaatagaattgtgattaggtatgatggtttacgttagtaattttagtagtttggggttatattgttggtgtagaatacgaagttaggagatcgagattattttggttaatacggtgaaattttatttttattaaaaatataaaaaattagttaagcgtggaggtacgtgtttgtagttagagttattcgggaggttgtggtaggagaattgtttgaatcgaggaggcggaggttgtagtgagttaagattatgttattgtattttagttagggtaatagagtaaggttttgttttaaaaaagaagaagaaaaaaaagagttgttttgtgaacggttgattttgagagtttttgatcgattttttagatttacgaatatttggattgtatatttgattttattatattgttagggtaagtgtcgtataaaggtatttttagattttttattgtatataggtggtttttgttagtttatttttgtgtgtgttttggaggtgtcgttaaatttgggggtagtattaggagatacgtttgaaaaagatatttttatttagattaaattattaatagatttttaattttttttaatttattaaagatattattatttggaaataggtatatattatattttttagttaatagttgttattttgttatattattagatatttggggttgtcgttttttgaggtatttagagaattatagaattttttagtattgaaagatttgaaagatcgtagtgtttttattttaattgtgagatatgaagtaatttttttaaatttgtgatattaagatatggtataataaagataagattaaaggatttcggatttataattatgtttttttcgttttttttatttttaaatatatttatatatttatttttgtaaatagttgttttgttaagtgggaaatgaatgtttttataaggtttaaatttgtgaatatattattgattagtatagagttggtttataatagttttttaattaaagtgttttatatgtaattggtttaaattttttaagtattaaattaaaataattttttaaagaatgaaattattttagaagaggatttttatatagtatttttgagtagtaattgatgatgttgttgaatttagatgttgattggtttttcgatacgagattatttaatttaggagtaaggaaattagtaattttttttttataatttggaatgtgggtggaggggggttatagttttttttgagtgagatttgtttgtttttttggtttttggttttgtttttttttttagtatggtgtgtttgaagttttttggaggttttagtttggtagcgttgatagtgatattgatggtgttgagttttcgattggttttcgttggggatattcgacgtaagagtatattgagggtgttgagttattatggggtgggggaatatagggagttgtgttaatattgtgtttaggttatgttttttaagaaattgtgaggttttttttagagattgtttatttttattaagggatcgtaaattattttttttataaaaggaatttggttatttgttttttttatgagatttgtgtaaggggtttttgtataggttatttttttttaaatttttattaataaaatttttgtattatatgtatttagggtttttagaggatttggaaataaggatgttaaaataaattttttatatagtaattttttttattatgttgatttatgttagataaaaggaggtttttattgaaaattttgtgggagttaagggaatttaaagggttttttttagacgattttgggttatgttttttataggatttgtggtgttggttttttttttttatatgtgaggatggatttagtggtttttttagtatttttttttttttttttttgaattttaatgtttataaagtttgtatttttgtagtgtatgtaggttgtttgatagaagttatatttagtgtttttttttttttatggggaaaaatttttggaattgaagttgagattattagtatttggaattattttatagatatagagtatttatgaggtattttttggtgtttaaagaatttaaggtattttttgaaaaattggtttaggttagtgtttattatgaatttttttaatttttttatatttgttttttttatattttttatatgttttaattagatatgatagaagagatttaattaatgtagtataaattatatgaaattttatttttgtaagttaaaaataattaaatattagaaatttaataatgtttaaattatatattgtgtggggttatcgagataatgtggatattgtttatattttatagggttgaaagttaatgggtaagttttggaaatttattgttttattgcggttttgtttttagttttataggtttatttattatgtttttagttttttttaattagttatgtttgtttattttttttttttatttttttttatttttttttaattatgttgttattatttttagaaatttttaaagtttgtatagatttttagtattatgagatttattgaaagagataatatttttttttttgagatagggtttgtttttgttatttaggttgtagtttagtggtgcgatcgaggtttattgtaatttttgttttttatatttaagtaatt

SEQ ID NO: 1659 - DNA, 2884 bp, Artificial Sequence
  chemically treated genomic DNA (Homo sapiens)
ttatagttttttgttttttagtttggtggttagttattttgatttttcgaggttttgggtattttagaggtttttgaggtttagagggattttggaagataaaagagaggtatttataaaggggttttagagtgttattgtgggggtttttaggggtggaagaaatggaagtaataatattgttgtttgggtagggttacggggtataggaattgagaatgtggtagagttatatgaataatgagataagggaattttaaggattttgaggttttagagtttgagtggagatttttttaggggataaagatatggaagattttatttggttttttttggttttagggggattttttttttttgggtgattttgggagtaagggatagaaaatgtgattagtggtttttgttattttttttgtatttttttttatattttttttaatttaaattttttgtgatttagtgaagttaattgtttatggataagtattattagtgattttttagtgtaagggttattaaaggagttttgaggttatgtattggggtggaaggttaaggggaattggattcggaagtggggttttatttatcgggggttcgtttgagttaggtatgtcggggagttttggttttttttgaggattttgtaggaagataaagaggtttagggttattagaggggttatgtttggatatagataaaattttagtagatatttagggttttttttatatttttattttaaattttttgttttttaaattatttagttatttattttttttttatgagggtcgatggtattttggggttcgggaagattttatatatagggaaagagaagttataggggttttttagggttttttttatttagtttttcggatttaaagtatgagtaataagggtttgaaatttttaattttttgtatttttttagggttttatttattgtggaagtttaagggaagttatgaaaattggggaacggagtaggggtatcgtttatttgggttttaggggtgttttgttgtttaggaggttttggttttttttggggtttttagaaataggtgattaggtataggttagaaggagatggagatagaatatatttagagtatggagttgagttttagtagcgatagttaagaaggtaagagtaggaagtaggtaggggttaaaatggcggttaataggatgttggtagggatttcgggggataagaatgggggtgggattttttatttattatttattaagttttttttggggttttggggattatttatgtttcggacgttttgaaatataagatgggtgtgagtagtttgaaggtggttcggagggatttgtggtttttagaggttcggttattttcgagggtgtgacggttagatttttaatttattttaaatttaagtaaatatagttggtttaggtttgtagtgtgtgggattgtggatttgtgggtttgtgggttttggttttgttttttttgaagatttattttttatgtttagagtttttagggtattacgttatatggttttttttgtgtacggggagcgaatgttgaggtagggtagtgtggggttagagtagggggagtttatagggaatgggaagtatgtcgagagaggagagggagtaggaaggtagttagaaaggtggagagttggagaggttaaggggttattttagggttagaagttagggagttatttatagggggtttaggaatattaggtgggtttttggggttaaggagatttcgaggtttttgtatttacggtgaggggaggagacggtatgaatggataaaattgtgtttttttagtgtttatgttttttttttggtttttttagagtttttttttttagtattagtttttggatatttatcgattttttaggtagttttcgaggtttaattttttcgttatttttttggaggaggaggatacggtaaagttgttgtgttttttagattttttttgtatttagtttttatatttgttattatatttattttttttttatttttattagggggattaggaaggttttgggtattagtattattttgtaaaatgggggaatttataagaggggttttagagtttttaatataggtagatatcgaatttttgtatttagtttatttattatttttattgagtttttgttaagtttttagttttttttttttatttatttttatttttatagaagatttatttttaattataatatatatttattaatgtatttattttatggtttttttttttagggagttttgggagtttattaaaatttcggttattttaggaggaggaaggatagttagagtgaggatacgattttgtttaagtttatttttttttattgtattttgagttgggggggtgttgattttggggaagtttggagaattaggttatttttaagaaataattgagtttagcgtgggttgaaggttataggttttagggaggggtttaagtttgttatttttattttaggatttttaggtatttttcgggttttattagtatttgttcggttttgggagaataagggaagtgttagaataagtagggtcgtagttttttattttgtaggttttgtttttttataatatttatttatttttggggtatttatttttcgtttagttttgttaggagggtttgtgaggttttgaggttttttggggttttggtgagaggagagatggggtggggttaggaggtatagggaggggagtgagggagattgagttggtgaatagatatgggggtgtagtggaggaaagtggttatttgaggttttaagtttttagattttttttttaggttagggtttttaggt

SEQ ID NO: 1660 - DNA, 2884 bp, Artificial Sequence
  chemically treated genomic DNA (Homo sapiens)
atttgggagttttggtttgaaaggagagtttggagatttaggattttaggtgattatttttttttattgtatttttatatttgtttattagtttagttttttttatttttttttttatgttttttaattttattttatttttttttttattagggttttagaggattttagggttttataggtttttttggtaaggttgggcgaagggtgagtgttttaggggtggatgggtgttgtggggagatagggtttgtagggtaggggattgcggttttgtttgttttgatattttttttgtttttttagggtcgggtaggtgttgatggagttcgagggatgtttggagattttggagtgaaggtaataggtttgggtttttttttgaagtttgtagtttttagtttacgttgggtttagttgttttttggggatgatttagttttttaggtttttttaggattagtatttttttagtttagggtgtagtagggaggggtgggtttggatagggtcgtgtttttattttggttattttttttttttttagggtgatcgaggttttgatggatttttagggttttttggagagaagggttatagggtgagtatattagtgggtgtgtgttgtaattggggatagattttttatgggagtgaggataggtagggaagggaggttggaggtttggtaggagtttagtgaaagtaatggatgggttaagtgtagaggttcggtgtttgtttgtgttgggggttttgaagttttttttatgagtttttttattttgtagggtgatattggtgtttagggtttttttggtttttttggtgaggatggagagagggtaagtgtagtggtaaatgtaggggttgggtgtaggggaggtttagaaggtatagtagttttatcgtgttttttttttttagggagatgacggggagattgggtttcgagggttgtttggagagtcggtgagtgtttaagggttggtgttgggggagggggttttggggaagttaggagggggatatgagtattaaagggatatagttttatttatttatgtcgttttttttttttatcgtgaatgtagggatttcgaggtttttttggttttaaaggtttatttggtatttttggattttttgtaagtgattttttgatttttgattttgaggtgattttttgatttttttaattttttatttttttagttgtttttttgtttttttttttttttcggtatgttttttattttttgtgagttttttttgttttggttttatattgttttgttttagtattcgtttttcgtgtatagggagggttatgtggcgtggtgttttgagggttttgggtataggaaataaatttttaagaaaaataaaattaaagtttataagtttatagatttatagttttatatattgtaggtttgggttagttgtgtttgtttgggtttgggatggattggaggtttgatcgttatattttcgggaatggtcgggtttttgaaaattataggttttttcgggttatttttaggttgtttatatttattttgtgttttagggcgttcgaggtatggatggtttttagggttttaaagggagtttggtgagtgatggataggagattttatttttatttttatttttcgaggtttttgttagtattttgttggtcgttattttgatttttgtttgttttttgtttttgtttttttggttatcgttgttgggatttagttttatgttttaaatgtgttttatttttatttttttttgatttgtgtttggttatttgtttttagggattttagggagagttaggattttttggataatagggtatttttgggatttaggtgagcggtgtttttatttcgttttttaatttttatgattttttttgggtttttataatgggtgagattttggaaggatataggaaattaagggttttaggtttttgttgtttatgttttgaattcgggaggttggatagaagagattttgggaggtttttgtgatttttttttttttgtatgtagggttttttcgggttttagggtgttatcggtttttatggagagaaggtaagtgattaagtgatttggaggatagggggtttagagtggggatgtagggagaattttaaatgtttgttgggattttgtttgtgtttagatatgatttttttagtgattttgagtttttttgtttttttgtagggtttttaagggaagttagggtttttcggtatgtttggtttagacggattttcggtgagtgggattttattttcgaatttagttttttttggttttttattttagtgtatgattttagagtttttttagtgatttttgtattgaaaggttattggtggtgtttgtttatggatagttggttttattaggttataggaaatttgggttggaagaagtgtagggaggggtgtagagagggtgataggggttattggttatattttttattttttatttttagggttatttagggaaggaaggtttttttggaattaaaggaaattaggtgagattttttatgtttttattttttgagggagtttttatttagattttagagttttaaagtttttgggatttttttgttttattatttatatggttttgttatatttttaatttttgtgtttcgtaattttatttagatagtaatgttgttatttttattttttttatttttggaggtttttatagtgatattttgaggtttttttataaatgttttttttttattttttagggtttttttggattttagggatttttaggatatttaggatttcgaggggttaaggtaattgattattaggttgggagataaagggttgtgg

SEQ ID NO: 1661 - DNA, 2476 bp, Artificial Sequence
  chemically treated genomic DNA (Homo sapiens)
tggagagtagaggaggttgggggtggggagtagatgggggtggggaaggaggggagatgggggtggggaaggggggcgggaggagggttaggaatgggggaaggaagatagggtgggggaggggtgggtatgggggaaggaagatagggtgggggaggggtgggtatggggaaagggagatagggtgggggaggggtgggtatgggggaagggagatagggtgggggaggggtgggtatgcgggaagggagatagggtggggaatcgagaagaaagatagtggggggggatggaggaaggaatatagggtggggtggggggtcgggatgggggaagggaaataaagagtggtggaggcgtggggattaggaacggagatagagggtgggggaggggtggggtgggggaagggagatagggtgggggaggggtgaggatggcggaaggtagataaggcgggggaggggtggggatgggggaagggagatagaagggggggaggggtggggatgggggaagggagatagaaggcgggttagggcgggaatgggggaagggaaatagggtgggggtggggatgagagaagatagaggttgggggaggggtggggatgtgtaagaaaaataaagggttggggagggggagggaaaagaggtagagagtgggggagggggtggggatgtggaaagaaagttagaaggtggggggtgaggggtggggatgggtgaatacgtgatggttgcggttttttttattagatagtagggtgggggtagggtggaaaaagggggtgcggtgggcgaatggggaggcggggggttgattgggagtgtgggacggggtgttttgggattacggagacgtttaagtttggattttgttttgggtttgtgtttttggcgattttttttttttttagtgggatgcggggtgtaggggtcggttttaggttttttgagtttaagtttcgttttatttcgtttcgtaagtttagaaaagatgtttttgtttttggttgggtaatttttggatttatttattgtttgtaatttttcgggttgaagagattatttttcgggagttaattaatttattttttggagcgcgcgtttttttttgtttttaggagtcggttttttaaaattttttgaggttcgcgtatgtttttttcgatttttcgtgtttttattttttatagaaatttacgtatttacgttttttttttttttcgagtttgtagaggatttcgttttgttttttttatatttagggttgttttttttgtcgttaatataaatttgttgataggttacgtttgggaagcgggtggggtgtttcggagcggtgttgaggcgttgtaggttcggtttttggttgcgggggagttgtattttgaagtttcgtcggaattcgcgtttggggttagtagggggtattagagttaatagggattgtatgtaaaatttatttttttttaggttttttagggggatggttaggtttttgtagagatggggaggatttttttttggtaaggggagagggacgggttaggagttaagcggaaggatttcgtgtttaaggttttttaagggacgggataggcgaggaatttttttgagttttttgaattgttttattagttaggtttgggaagtatttcgtttttataaattttgtttttttgaaaggggtcgggggggggattttaatattttttgttataggttatgatgggtatggtggttaagagtaataggtcgcgtggtgaggttggttttttgtggttttgttttgttatttttcgaggtatttttatgttagtgaatagagttgcgggtttttagttgtatagatgaatgtacgaataaaatataggtttatataaaggaagttattgtattgatttagattcgatttgggattgtcgtataaaatagggttgataaaaatcgtcgtgtttttattttggaaatagagatttagtttttttttttttgtttgaggtatttagtaaaggtttgtttttgagtggttgtggatgtttaaggatttacgatttttgattttataaagtttagggtgaaaataaaaaataaaataaggagattattgttttaaagtggtcgttgtagttaattattttaagaaagtaaataggttggtattgaaagttatataggcgggcggttttttgggagggttgtttagttttttttttttgagatttgagtagggagtagttagaggagtttgaagggatggtgtttagggtatgggaataggttgtatatatttttacggagtacggtgtttgtttagtttgagaagggaaagaaacgggagtagagggttgatgagaaggtagtagatggatagtgcgggattgaaaaggggatttatttgaagattggttattattatttatttttattatttgattgttgttgttttattgagatcgatgcgtggaga

SEQ ID NO: 1662 - DNA, 2476 bp, Artificial Sequence
  chemically treated genomic DNA (Homo sapiens)
tttttacgtatcgattttaatggagtaatagtaattagatgatgaaaataaataatggtggttagtttttaaatggattttttttttaatttcgtattatttatttgttgtttttttattagttttttgttttcgtttttttttttttttaaattggataagtatcgtatttcgtgaagatgtgtgtagtttgtttttatgttttgaatattatttttttaagtttttttggttgttttttgtttaggttttagaaaaggagagttgggtaatttttttagggagtcgttcgtttgtgtaatttttagtattagtttgtttgtttttttgagataattagttataacggttattttaaaataatggtttttttattttgttttttgtttttattttaaattttataaagttagaaatcgtaagtttttgagtatttatagttatttaaggataaatttttgttgaatgttttaagtaaagagggggaggttgagtttttgtttttagggtgaaaatacgacggtttttattagttttgttttatgcgataattttaggtcgaatttggattaatgtaatgattttttttgtatggatttatgttttgttcgtgtatttatttgtgtagttgggaattcgtagttttgtttattggtatggggatgtttcggggaatggtagggtagagttataaaaagttagttttattacgcggtttgttgtttttagttattatgtttattatagtttgtggtaggagatgttggggtttttttttcgattttttttaggaaaatagagtttgtggaggcggagtattttttaggtttgattgataaaataatttaaaagatttaaagagatttttcgtttgtttcgttttttgaagggttttgaatacggggttttttcgtttggtttttagttcgtttttttttttttattaggaaaggattttttttatttttgtagaagtttgattatttttttagagggtttgggaggaagtgggttttgtatatagtttttgttgattttagtgttttttgttggttttagacgcgagtttcggcgaggttttagggtatagttttttcgtagttagaagtcgggtttgtagcgttttagtatcgtttcgggatattttattcgttttttaggcgtgatttgttaataggtttgtattggcgataaaaggagtagttttgaatgtagggaaagtagggcggagttttttgtaggttcgggggaggggaggggcgtgaatgcgtggatttttgtggagagtggaaatacggggagtcgaggggagtatgcgcgggttttagaaagttttgggaaatcgatttttgggagtagggaggaacgcgcgttttagagagtaagttaattgattttcggggggtggtttttttagttcggggggttatagatagtaggtaaatttagagattatttagttaagggtaggggtattttttttagatttgcggggcggggtggggcgagatttgagtttaggggatttggaatcggtttttgtatttcgtattttattgaagaaaagggaggtcgttagaagtatagatttaggatagagtttagatttggacgttttcgtgattttagaatatttcgttttatatttttagttagtttttcgtttttttattcgtttatcgtattttttttttttattttgtttttattttattgtttggtgggaaaggtcgtagttattacgtatttatttatttttattttttattttttattttttgattttttttttatatttttatttttttttttattttttgttttttttttttttttttttttaattttttgttttttttatatatttttattttttttttaatttttgtttttttttatttttatttttattttgtttttttttttttattttcgttttggttcgttttttgtttttttttttttatttttattttttttttttttttgtttttttttttttatttttatttttttttcgttttgtttatttttcgttatttttattttttttttattttgtttttttttttttattttattttttttttattttttgttttcgtttttaatttttacgtttttattattttttgtttttttttttttatttcgattttttattttattttgtgtttttttttttatttttttttattgttttttttttcggttttttattttgttttttttttcgtatgtttattttttttttattttgtttttttttttttatgtttattttttttttattttgtttttttttttttatgtttattttttttttattttgtttttttttttttatgtttattttttttttattttgtttttttttttttatttttaatttttttttcgttttttttttttatttttattttttttttttttttatttttatttgttttttatttttagttttttttgtttttta

SEQ ID NO: 1663 - DNA, 2391 bp, Artificial Sequence
  chemically treated genomic DNA (Homo sapiens)
ggacgattttgtttagtgtttttagtttgtttttttaggttatggttttaagtgaaatgatagagtttatagttttggttttggttgaggtttaggttatagtaagggtatgtttttggggttttcgatttgaattttgatttttcgggtagggaagaggaggttgttttttttggttgttttggttttggagttttttgtaaaaatattttgggttttttgttattggttgtagaaatggttcgacggggtgtgtggggatagatatttagaaggaatgtatttttgtggttttggtgttcgatggggttgggggagagtgttttttattgatttagtagtatatttatgtgtagtgcgtttgtatttgtgtgggggtagttatattttttggttgttgtttttttgggttgtttttttgggggtatgtgattggatttacgaggtttgtattgagttttatttgaatgatattttttttattttattttttttacggaagtatcgttttagggttatttagttttttgttttatggttgaaattgtttatttcgtttgtagatgtttattattttgtttatttaatgtattattatgtattgattttttatgagatagagagagagagagattattagatagtttatatttaaagggtaggtttttgtatatttttttagttttttttattaaggggaaggggagagtttaaaaatttaaatcgttgtggttttaaggtgttttatttttaaaagggagagagaatttatttaaagttattttagattagggattgttatttttttttgtttaatgtattttttgttttttaaaaaaattttttttagaggaaattaatattagtttttgtgtttattaatttttttggttatttgtatttatttatttatttatttattagatatttgttgttatttgaaagaattggtttagtgggtttgaaagttcgtttgagaataggaaatttgagatttggttttttgtgggtaggagaataaggattatttgggttttttagttttgaacgagaattttatttttattagaatgttttttttaattttagcgtatgatgaggaaatttatttatttttagttaggatttgataaattttaatattaaatgattaaaatatttgttattgaggttttattggtgagattcgtttttcgttttcgggtgtagttttttgggggttgtttttcggattgcgtttcgtatatttgttatcgagggtgtgagaagcgtttaagttggtgatatgtgatttgggacgtttttatttttcgggttaggagtagtagttgttaaggatagtagtttgtattgcgtggttttagggaagtagggtttggtttttaatatgaattgtaaaaagtagttttttattgatatttttttgttgttgtttttggggggtttttttgttttgtttttaatgtttttgagtgtatattttttttttcgtttgaaatcgaatttttaaagtggttttttttagttttggttggaaaattattttttaatagttttaagtaataaatagatgagtagagaatgtggttttaattgggtttattaaagtaagtgtgtttagtttttatttgaataagtgatagttgtagatggcgaaagaaatttatttaatttttgtagtttataggtggtagaaataaaaatgtaattttaaaattttaaatattaaatattaattattgttttttttttttttgagatggaattttgtttttgttatttaggttggagtgtaatggcgcgattttattttattgtaatttttgtttttcgggtttaagtgatttttttgttttagttttttaagtagttgggattataggtatgcgttattatatttagttaattttgtatttttggtagagatagggtatttttatgttggttaggttggttttggattttcgattttaggtgattcgtttatttcggttttttaaagtgttgggattataggcgtgagttattatgtttgtttagtaatattaattattgttttttaaattcgtgttggttttttagatagggagattattggaataaaataatcgatggttttattttgttatacgtaaattaaaagaaatgttttttttgaagttgtaagattttattaatgatagatatttttttcggtggattttgagtggtgtgtagtggttttatagttatggaaattaggagtattttattttttattgagaatttttgtttttaatttttttaagttggggtgtggtagttgggtagggttaagtgatttagttttggttgtaggatagttatatatagtgaagagttttagaattagttaaaaatggaagtttgggt

SEQ ID NO: 1664 - DNA, 2391 bp, Artificial Sequence
  chemically treated genomic DNA (Homo sapiens)
atttaaatttttatttttagttggttttagaattttttattgtatatggttgttttatagttagggttgggttatttgattttgtttaattgttatattttaatttagagggattgggggtaggggtttttagtggaaagtgagatatttttagtttttatggttataaaattattatatattatttagagtttatcgaaaagggtgtttgttattggtggagttttataattttaaagaggatattttttttgatttacgtgtgataaaataagattatcggttattttattttagtgatttttttgtttgagaagttaatacgaatttaaaagataatggttggtattgttgggtaggtatggtggtttacgtttgtaattttagtattttgggaggtcgaggtgggcggattatttgaggtcgggaatttaagattagtttgattaatatggagatattttgtttttattaaaaatataaaattagttgggtgtggtggcgtatgtttgtaattttagttatttgggaggttgaggtaggagaattatttggattcgggaggtagaggttgtagtgaggtgagatcgcgttattgtattttagtttgggtgataagagtaaaattttattttaaaaaaaaaaaaggtaatggttggtatttggtatttaaggttttaaaattgtatttttgtttttattatttgtaagttataaaaattaaatgggtttttttcgttatttgtagttattatttgtttaagtgaaaattagatatatttattttaataagtttagttgaagttatattttttatttatttatttattgtttaaggttattgagaggtggttttttagttagggttaaagaaagttattttgggagttcggttttagacgaggaagaaaatatgtatttaaaggtattaaaaataaaataaaaaaattttttagaaataataataaaaaaatattagtgagaagttgttttttgtagtttatattaaaagttagattttgtttttttaaaattacgtaatgtaagttgttgtttttagtagttgttatttttggttcgagaaatgaaggcgttttagattatatgttattagtttaggcgttttttatattttcgataataggtgtgcggggcgtagttcgaggagtagtttttaagggattgtattcgaggacggagaacggattttattagtgaagttttagtggtaaatgttttgattatttgatgttggaatttgttaaattttagttagagataagtaaatttttttattatacgttgaggttaagaaaaatattttgataagagtgagattttcgtttaagattggagaatttaggtggtttttgtttttttatttatagggggttaggttttaagttttttatttttaagcgagtttttagatttattgggttagtttttttagatggtaataaatatttgatgaatgaatgaataaataaatataagtgattagaagagttagtgaatataaagattaatattagttttttttaaaaaaaatttttttaaagaataaggaatatattggataaaaaaggatgataatttttgatttgaaatagttttaaatagatttttttttttttttaaaaatgaaatattttaaaattataacggtttgggtttttaaattttttttttttttttaataaaaaaggttggaaaaatatataaaaatttattttttgggtgtaaattatttgatagtttttttttttttttgttttatggagaattaatatataatagtgtattaggtagataggatagtagatatttgtagacgagatgagtaattttagttatgaggtagaggattgaataattttgaagcggtgttttcgtgggggaaatgggataggaaaggtattatttaaatggagtttagtgtagatttcgtaggtttagttatatgtttttagaaaggtagtttaaggaagtagtagttaaggggtgtggttgtttttatatagatgtaggcgtattgtatatgggtgtgttgttgggttagtggagagtatttttttttagttttatcggatattaaggttataaaagtatattttttttgggtgtttgtttttatatatttcgtcgagttatttttgtagttagtggtagggggtttaaaatatttttgtaaaggattttaaagttaggataattaaaggggataatttttttttttttgttcggagggttagagtttaggtcgagggttttaagaatatgtttttattatgatttggattttagttaagattagggttgtgaattttgttattttatttgggattatgatttgaggggatagattgaggatattgggtagaatcgttt

SEQ ID NO: 1665 - DNA, 2483 bp, Artificial Sequence
  chemically treated genomic DNA (Homo sapiens)
aaaagagaaattttgatagttttttaattatgtgggatacggtattattttattagaaaattgtatgttgaaaatattgtattgttgtgtatagatagagtggtatggatttaattttgtatgtataaattaaatttgtaatgtttaagtagtggattagaattttaatatgtttttattttatttggttttgttaggtaagtaagggattttgtgtgttggaaaaagaattattttggtgtagtcgtttaagaggagtttggggaggacgttggttcgcgaggttcgtcgtagataaggtggcggcgatgttcgggagttaggttagtgtcgcggcggtagcgtcggggtttttcgcgcggtagggcggtttgggtttcggtttttcgtcggttttttggaagcgggttcgcggttagcgcgggagtagtagtagagatggaggttttagcgtttttttttttttttcgttcgtttgagttaggggaggttaggcggttcgggtgtttggagtcgggggtttgttgttcgagaatgagaattttttttttttagaacgtggagattgttcgattattaggagtataaagttattattgttgggttggataatgtagggaaaattattattttttattagttttttatgaatgaggttgtatatatattttttataataggaagtaatgtagaagagatagtgattaataatacgcgttttttaatgtgggatattggtggttaagaattttttcgttttttttggaatatttattatattaatatagagttgataatagttgtggatagtatagatatatgatttttgtaattagagaagaattttataaaacgttagcgtatgaggatttaaggaaagttggattgttgagttttgttaataaacgagacgttaaagaatgtttgattgtagcggaaattttttagtttttgaagttattttttattaaagataatagttagtggtatatttaggtatgttgtgttttaattggtaagggattgtgttaaagatttgaatggacgatgttacgattttagattatatgattttttttaattttatagattttgtataaatgaagtgttggattttatttgaaagttgtaaaaattaatggtttagatatatttataataaattgatttaaattttttttataagaagaaaaattaagattatttatttgaaaagaaagatggagagggaggaggaagaagagaaaacggtcgggcggcggcggttgtaggttgtgtagcggtagcggttttttttcgcggcggacgatggatagttaggataggaaggtggtggtgtataataatagtatcgggtttgtgaagtgtggttatatgtaggttttaattttttagaagatatttttttagttttggttggaagatttattattagattaattattaaagtgggaaatattgaataaggattttatggttggtgatgaggtaggtgaattacgattaatgttggaagttaattattttatggaaaatggtatagtaagaaattaggatgacgtgaaaaatttgtgggattatacgtttggattagagaaatttaatatagatattagaaattgtaaaattttatttatagaattttttatgaatttaattaaaaatatagagaagattgtagaggtaatgtttgaaatttagtagtttttcggtgtatatgtagttatttagacggttttgattttgtacgtttaaggtttattgattggtgtagcggtagattttggagatagtgtgagttatatttgtttagtatatgaaggttttttttttttttattttattaggagattggatattgttgagagggatgtaattagatattaggttgtttttattgcgaggatatgtttttaattattttgttgattttgaaacggtttgtatgattaaagaaaaattgttacgtgggatataatattgagtaagagtagaaattggttttagaaattaaagtattagttgaattttatatatttttagatggatatattattaaagttggaggggagagatttgaagtattagaaattttattttagttttatttgattagtgttgaaggagttggtgttgttgaattgtttttgaatataatttaggtagttgatattgatatttgatttgaattttataaatatattgtgttttttggagggtttattatgtattttggtttgttattaaggttggaacgagaatttaaatagttttatttagaacgagttttaaagggtgatgtggaaaaattttttaaatttaagattcgtatcgaagatttattttttagaaagtatatgggtggtgtagttttagtagatattatgaaagataaagataatttttggatgattcgataagagtattaagaaaggggtgttcgtgtgttagagaaatttggtgtgattgttcgataaatttta

SEQ ID NO: 1666 - DNA, 2483 bp, Artificial Sequence
  chemically treated genomic DNA (Homo sapiens)
tggagtttatcgaatagttatattaagtttttttagtatacggatattttttttttggtatttttgtcgggttatttaaaagttgtttttgttttttatggtatttgttagaattgtattatttatgtgttttttgaggggtaggttttcgatgcggattttaaatttaaaaagtttttttatattattttttaaaattcgttttaagtaaagttgtttaagttttcgttttaattttgatgataggttaggatatatagtagattttttagaaagtataatgtgtttgtaggatttagattaggtattaatgttagttgtttgaattgtgtttaaaagtaatttagtaatattaatttttttaatattgattaagtgaggttgaaataaaatttttggtgttttaaattttttttttttaattttgatgatatgtttatttgggaatgtataagatttaattaatattttggtttttaaggttagtttttgtttttgtttaatattatattttacgtaatagtttttttttaattatgtaaatcgttttaaaattagtagggtggttgaaggtatattttcgtaatagaagtaatttggtatttagttatattttttttagtaatatttagttttttggtaagatgagggagagaaaagtttttatatattgggtaaatatgatttatattatttttagagtttatcgttatattagttaataaattttgagcgtataaagttagaatcgtttggatggttatatatatatcggaaaattgttaagttttaaatattatttttatagttttttttgtgtttttggttgggtttataggaggttttgtgagtaagattttataatttttggtatttatattaagtttttttggtttaaacgtgtagttttataggttttttacgttattttaattttttattatgttattttttatagggtaattaatttttaatattgatcgtaatttatttgttttattattaattataagatttttgtttaatgttttttattttggtggttgatttgataataggttttttaattaaagttgggaagatgttttttggaaagttagagtttgtatataattatattttataagttcggtgttgttgttgtatattattatttttttgttttggttgtttatcgttcgtcgcgggggagagtcgttatcgttgtataatttatagtcgtcgtcgttcggtcgttttttttttttttttttttttttttatttttttttttaaataagtggttttaatttttttttttatagaaaaagtttaaattagtttattataaatatatttaaattattaatttttgtagtttttaggtaaagtttagtattttatttatataaagtttatgaggttagaagagattatgtaatttaaagtcgtgatatcgtttatttaagtttttggtataattttttgttagttagagtatagtatgtttggatatgttattaattgttatttttaatagaaggtagttttaaaaattgggagattttcgttatagttaggtattttttaacgtttcgtttattaataaaatttagtaatttagttttttttaggtttttatgcgttaacgttttatagagtttttttttagttatagaaattatgtgtttgtattgtttataattattattaattttgtgttagtatagtaagtgttttaggaagaacgaaaagatttttggttattaatattttatattaggaaacgcgtattattaattattattttttttatattattttttattataggagatgtatgtataattttatttatagaaaattggtaaagaatggtagttttttttgtattatttagtttaataatgataattttgtgtttttggtgatcgaatagtttttacgttttgggggaagaaaatttttattttcggatagtagattttcggttttagatattcgggtcgtttggttttttttggtttaggcggacggggaagagagagaggcgttggagtttttatttttgttgttgttttcgcgttagtcgcgggttcgtttttagggaatcggcgggaggtcgaagtttaggtcgttttgtcgcgcgaaaggtttcgacgttgtcgtcgcggtattggtttggttttcggatatcgtcgttattttgtttgcgacgagtttcgcgggttagcgttttttttaagttttttttgggcggttgtattaaagtaattttttttttaatatataagattttttgtttatttaataggattaaatgaagtgaaagtatgttaaaattttaatttattgtttaaatattataaatttaatttatgtatataaaattgaatttatgttattttatttatatataataatgtaatatttttaatatatagttttttgataaaataatgtcgtgttttatataattaaaaaattattaagatttttttttt

SEQ ID NO: 1667 - DNA, 2431 bp, Artificial Sequence
  chemically treated genomic DNA (Homo sapiens)
tttttattttttttttcgagtttttaaagtttattatattatttttaaatgtatttgtatttttatagtttagtttttatttataagtgagaatatatgatatttggttttttatttttgagttatttagaataatggtttttggttgtttttaggttgttgtaaaggttattattttattttattttatggttgagtagtatattattgtgtatatatattatattttttttatttattcgttggttgatgggtatttagttgatgggtatggttgatgggttttttatttttgtaattgcgaattgtgttattatgaaaatatgtatatgtatttgttttttatgtaatgatttttttttttttgggtagatatttagtagtgtgattgttggatcgaatggtagttttattttgagttttttgagaaatttaggagttattttaatatagataattgaattgtagttaattttttatttagttttttatattggttatttattattatcgatttgaggttattttttatttatattattcgattattttatttagttatatttttaatagtatatgttgtttttaaagtatattatgtgaatagtttaaaatttttaaagtataattttttgttgaagtatttgtaagttttatataagtttttatatgatttgttttgatttttaaattattattttttttattttatttatatttatttttttttttgtgagatgtaattttatataaattttatagataggaagatgttgggaaattattatatggtttgttatgttgtgttattttaataggttaaattatttgatgaaaagagaaattttgatagttttttaattatgtgggatacggtattattttattagaaaattgtatgttgaaaatattgtattgttgtgtatagatagagtggtatggatttaattttgtatgtataaattaaatttgtaatgtttaagtagtggattagaattttaatatgtttttattttatttggttttgttaggtaagtaagggattttgtgtgttggaaaaagaattattttggtgtagtcgtttaagaggagtttggggaggacgttggttcgcgaggttcgtcgtagataaggtggcggcgatgttcgggagttaggttagtgtcgcggcggtagcgtcggggtttttcgcgcggtagggcggtttgggtttcggtttttcgtcggttttttggaagcgggttcgcggttagcgcgggagtagtagtagagatggaggttttagcgtttttttttttttttcgttcgtttgagttaggggaggttaggcggttcgggtgtttggagtcgggggtttgttgttcgagaatgagaattttttttttttagaacgtggagattgttcgattattaggagtataaagttattattgttgggttggataatgtagggaaaattattattttttattagttttttatgaatgaggttgtatatatattttttataataggaagtaatgtagaagagatagtgattaataatacgcgttttttaatgtgggatattggtggttaagaattttttcgttttttttggaatatttattatattaatatagagttgataatagttgtggatagtatagatatatgatttttgtaattagagaagaattttataaaacgttagcgtatgaggatttaaggaaagttggattgttgagttttgttaataaacgagacgttaaagaatgtttgattgtagcggaaattttttagtttttgaagttattttttattaaagataatagttagtggtatatttaggtatgttgtgttttaattggtaagggattgtgttaaagatttgaatggacgatgttacgattttagattatatgattttttttaattttatagattttgtataaatgaagtgttggattttatttgaaagttgtaaaaattaatggtttagatatatttataataaattgatttaaattttttttataagaagaaaaattaagattatttatttgaaaagaaagatggagagggaggaggaagaagagaaaacggtcgggcggcggcggttgtaggttgtgtagcggtagcggttttttttcgcggcggacgatggatagttaggataggaaggtggtggtgtataataatagtatcgggtttgtgaagtgtggttatatgtaggttttaattttttagaagatatttttttagttttggttggaagatttattattagattaattattaaagtgggaaatattgaataaggattttatggttggtgatgaggtaggtgaattacgattaatgttggaagttaattattttatggaaaatggtatagtaagaaattaggatgacgtgaaaaatttgtgggattatacgtttggattagaga

SEQ ID NO: 1668 - DNA, 2431 bp, Artificial Sequence
  chemically treated genomic DNA (Homo sapiens)
tttttggtttaaacgtgtagttttataggttttttacgttattttaattttttattatgttattttttatagggtaattaatttttaatattgatcgtaatttatttgttttattattaattataagatttttgtttaatgttttttattttggtggttgatttgataataggttttttaattaaagttgggaagatgttttttggaaagttagagtttgtatataattatattttataagttcggtgttgttgttgtatattattatttttttgttttggttgtttatcgttcgtcgcgggggagagtcgttatcgttgtataatttatagtcgtcgtcgttcggtcgttttttttttttttttttttttttttatttttttttttaaataagtggttttaatttttttttttatagaaaaagtttaaattagtttattataaatatatttaaattattaatttttgtagtttttaggtaaagtttagtattttatttatataaagtttatgaggttagaagagattatgtaatttaaagtcgtgatatcgtttatttaagtttttggtataattttttgttagttagagtatagtatgtttggatatgttattaattgttatttttaatagaaggtagttttaaaaattgggagattttcgttatagttaggtattttttaacgtttcgtttattaataaaatttagtaatttagttttttttaggtttttatgcgttaacgttttatagagtttttttttagttatagaaattatgtgtttgtattgtttataattattattaattttgtgttagtatagtaagtgttttaggaagaacgaaaagatttttggttattaatattttatattaggaaacgcgtattattaattattattttttttatattattttttattataggagatgtatgtataattttatttatagaaaattggtaaagaatggtagttttttttgtattatttagtttaataatgataattttgtgtttttggtgatcgaatagtttttacgttttgggggaagaaaatttttattttcggatagtagattttcggttttagatattcgggtcgtttggttttttttggtttaggcggacggggaagagagagaggcgttggagtttttatttttgttgttgttttcgcgttagtcgcgggttcgtttttagggaatcggcgggaggtcgaagtttaggtcgttttgtcgcgcgaaaggtttcgacgttgtcgtcgcggtattggtttggttttcggatatcgtcgttattttgtttgcgacgagtttcgcgggttagcgttttttttaagttttttttgggcggttgtattaaagtaattttttttttaatatataagattttttgtttatttaataggattaaatgaagtgaaagtatgttaaaattttaatttattgtttaaatattataaatttaatttatgtatataaaattgaatttatgttattttatttatatataataatgtaatatttttaatatatagttttttgataaaataatgtcgtgttttatataattaaaaaattattaagatttttttttttattaaataatttggtttattaaaataatataatataatagattatgtgatagttttttaatatttttttatttataaagtttgtatgagattatattttataagaagaaaagtaaatataagtaaaatagaagagatgatgatttaaaaattaaaatagattatataagggtttgtgtaaaatttataaatgttttaataaagaattatattttgagaattttaaattgtttatatgatatgttttggaaatagtatatattgttagaaatgtgattgaataaaatgatcgagtaatataaatgaaaaatggttttaaatcggtggtagtaagtaattagtgtggaaaattggatggagaattaattgtaatttaattatttatattaaaatgatttttagattttttaaagaatttaaagtagaattattattcgatttaataattatattattgggtatttatttagaggaaaagaggttattatatggaagatagatgtatatgtatgtttttatagtagtataattcgtaattgtaaaaataggaagtttattaattatatttattaattaaatgtttattagttaacgaatggatgaagaaaatatggtatatatatatagtggtatattatttagttataaaatgggatgaaataatggtttttgtagtaatttggaggtagttagaggttattattttaagtaatttaggagtggaaaattaagtattatatgtttttatttgtaagtggaagttaagttatgaggatgtaaatgtatttaagaatgatataatggattttggggattcggagagaaaggtaggag

SEQ ID NO: 1669 - DNA, 2412 bp, Artificial Sequence
  chemically treated genomic DNA (Homo sapiens)
ggtagaggttaggaggatgatgttagtagttaggaagttcgggtagtggtttaggaggggtatttgttaagaatttacgtgggttttagtgaagttgcggatgttgtggttgaatatagagtttaggtagttattttaggtacgggttacggcggcgttatcgatgatgtattcgaggagaatattttagtcgatgaggaaggtttatagttcgtttatggatacgtaggtgaataggtaggtagagttcgtgcgtggtatacgtgttttaaattttgtatagtatagggttgttagtagggaggttatagcggttatatcgaaggataagagtatagtagggttagttatttttttggttacggtatttgtgagtacgtagagattcgagtttattatgttatttacgtttagaagagttaggtttagcgtggataggtagcgtcgtagtgacgtttttatggtggagttttttagcggttttaggcggtttagtttttggtataagcgtgttaggttagtaatggtgggtagttttcgggttatggtaggtggtcgagaagagtatcgagttagttattggaatttgttagggttagaggggaatgataggatgcgtagtcggggtttgattagttttttattttttttggtttgattatttttagttttttttttgtttttgatttggggatttggatatttttattaggggtttgttggagagttggaatggggtaggtgttagaatttgtgggtaggaggttataggaagtttggaggttttgtttgtattttaggtagtaaaggaggtttggtgaggttttatttgtttattcgttcggtggttttgaggggtggggagggagtagttttagggggagtagggtgagaggttgggaacggtttagtggtggggttttagagttaggtgaaatcgaggtttttttagagtcgagtcggattcggaataggagtcgcggttttgcgtcggggcgggtgtggtttaggtagttatttggttatagatagatagtggcggttatatatattttcgtttttgtattcgtggttaggttggggtattcgcgcgttaggcggaatgtaggggcgttttgggttcgtatatttttttatgttcgatacgtcgttgttgttagagtttgtttcgtcgcgttttcgttttcggatatttgcgttttcgtttgtttttgggtttgagttcgttttagttttcgttttcgtaggatttgttgtaatttatttgttgttgtcgtagtcgttgttttcgttttgagtattgagttcgtttagttcgtcggcgtcgagcgtagggttcgtttttattttaggtttttcgcgcggttttattcgttgttatatatttagatattttattttgtttattttgttcgatttcgtaaggtcgttatcggagtttatcggggtttagggaagttttgtgattgtgatttagttatagatggagaaggttagatcgtcggttgattgattagtttaggttagttcggggaggttaagggttacgtttgaaagttcgtagtttattttttttttattgtagcggatattttttttgattttttattttagtatatgaattttatttagttgggttttagataggttttatagtatcgttatgtgagttttaggtatagtgagttagatgaagatatgggtttggtagagtggtttggggcggtttttgatttttatttttataatggaagagattgtagttttttgagagagttttgcgaattgagggaatgtattttggttgttttgagtttgtagttattacgttttgtaaggaagtaagtagtttttgggattagtttgtagtttttttgtgggggagtagagttttttagattttagtggtagttttttttagtttaggtatttttggtaggtcgggagggttttatgggattttaatagtagatttttatttgtgtttattagcgatagttattgtgttttgagtattgtattttagtgttttacgttttaggtaggtagttatgtaataatatatttggttaattttttaattttaatttttttagagattgggttttattatgttgttcgggttggtttcgaatttttggttttttaaaaggttgtgattatatttatgaattatggtttttggtttttttagaacgttatattagatatgtgtttaggtttatatgtggtttgtggaatggaattttaggagtatttgtagtttatttagtttattgggttggtgataggatgatggatttttagataagatggtgttaatttggaatattttgtttcggttagaatgttaatattttttaatatttggttggtattgttttgaggaattttttagatggtttttatttt

SEQ ID NO: 1670 - DNA, 2412 bp, Artificial Sequence
  chemically treated genomic DNA (Homo sapiens)
gaagtgggagttatttgagaagttttttaagataatattagttaaatattagaaggtattggtattttggtcgaggtagaatgttttaaattggtattattttgtttgggagtttattattttgttattagtttaataggttggataggttgtagatgtttttaagattttattttataaattatatgtaagtttgaatatatgtttagtatagcgttttggggaggttaggagttatggtttatgaatgtaattatagttttttgggaggttaagagttcgagattagttcgggtagtatagtgagatttagtttttaaaaaaattaaaattaaaaaattagttaggtgtattgttgtatagttgtttgtttggggcgtggggtattggaatgtagtatttaggatatagtggttgtcgttgataaatataagtggggatttgttattggggttttatagggttttttcggtttgttagaggtgtttaggttaggaagggttgttattggggtttgaggagttttatttttttataggagggttgtaggttggttttagaagttgtttgtttttttgtaggacgtggtagttgtaggtttaaaatagttagaatgtatttttttaattcgtagaatttttttaaaaggttgtagttttttttattgtaagagtagaggttagggatcgttttaggttattttgttagatttatgtttttatttaatttattgtgtttgaagtttatatgacggtgttgtggggtttgtttggggtttagttgggtggggtttatgtattggggtgagggattaagaagggtgttcgttgtagtagaaagaaggtgggttgcggatttttagacgtggtttttaattttttcgaattgatttaggttagttagttagtcggcggtttgattttttttatttgtgattgagttatagttatagggtttttttagatttcggtgagtttcggtaacgattttgcgaggtcgggtagagtgggtagggtgaaatatttgggtgtgtggtagcgggtggggtcgcgcggggggtttgggatgggggcgggttttgcgttcggcgtcggcgaattgggcgggtttagtgtttagagcggaggtagcggttgcggtagtagtaggtgggttgtagtagattttgcggggacggggattgggacgggtttaggtttaagaataggcgaaggcgtaggtgttcggggacgggggcgcggcggagtaggttttagtagtagcggcgtgtcggatatggggaggtgtgcgggtttagggcgtttttgtatttcgtttggcgcgcggatattttagtttggttacgggtgtaggggcgggggtgtatgtagtcgttattgtttgtttgtggttaggtggttgtttgggttatattcgtttcgacgtagagtcgcggtttttgtttcgggttcggttcgattttggggaagtttcggttttatttggttttgggattttattattgagtcgtttttagttttttattttgttttttttggagttgttttttttttattttttagggttatcgagcgggtgagtaggtggggttttattaggttttttttgttgtttgggatgtagatagggtttttaggttttttgtgattttttgtttataggttttgatatttgttttattttagttttttagtaggtttttggtgagggtgtttaggtttttaggttagggatagagagaggattgggggtggttagattaggagggatggaaggttggttaggtttcggttacgtattttgttatttttttttggttttagtaggttttagtagttggttcggtgtttttttcggttatttgttatggttcgggggttgtttattattgttagtttggtacgtttatgttagaagttgaatcgtttgaagtcgttggaggattttattatggagacgttattgcggcgttgtttgtttacgttggatttgatttttttgggcgtgggtggtatggtgggttcgggtttttacgtgtttataggtgtcgtggttaaggaggtggttggttttgttgtgtttttgtttttcggtgtggtcgttgtggtttttttgttggtagttttatgttatgtagaatttggggtacgtgtgttacgtacgggttttgtttatttgtttatttacgtatttatgggcgagttgtgggttttttttatcggttggaatgtttttttcgaatatattatcggtggcgtcgtcgtggttcgtgtttggagtggttatttggattttatgtttagttatagtattcgtaattttattgagatttacgtgggtttttggtaggtgttttttttgggttattattcggattttttggttgttggtattatttttttggtttttgtt

SEQ ID NO: 1671 - DNA, 2475 bp, Artificial Sequence
  chemically treated genomic DNA (Homo sapiens)
tttttgagatagagttttttatcgtttaggttagagtgtagtggcgtgattttagtttattgtaattttcgttttttgggtttaagtaatttttttgttttagttttttaagtagttgggattatagataattattattttatttagttgatttttttttttttttttgagatggagtttttttttgttatttaggttggagtgtagtggcgcgatttcggtttattgtaagtttcgtttgtagttgggattataggcgtttattattacgttcggttaattttgtttttgtatttttagtagagacggggttttattgtgttagttaggatggttttaattttttgatttcgtgatatgtttatttcggttttttaaagtgtcgggattatagacgtgagttatcgtgttaggtttaaagtatttttttatagtttttagtttgttgttgtgtttgttttttttacggttcgtatagtttgggtttgaattttggttttttatggttttgggtaagttggttaattttttgtgttttaatttttttatttgtaaagtggggttggggaaaaattttattttatagggaatattaagtgagtttatgaaagttttcggtgtgtggtatgcgataattattatttaagtataaggtatgtttatatgtattggttgtttattacgacgtattagtatttatttaagttatttttttttagagtttgtttggaatgtagaatcggttagtttttttttttaaatagtttttgtaatttttggttatttgtgtgggtagaggcgggagtgtgggtgtgtggttttgttttgggatagggatgacgagagagtatgtgtttgtgtttagagttgtttttttttttgtttaggggttattaaatatgtttatggtttttgttgtttggttaacggttatttcgggttgtcgttttttggttagatttggagtttataagttaattttagaaatgattggtcgatttagttgttgttattatattggtttagaaggagggtggggggaggacgggtcggggaggggtagtaaggggaagggatgtgtgtcggtgtgtgtggagagggtgttttttcgtttttgttttttcggttcggtggggttttttcgcggttattcggggagacgttttagatagtcgtggtttttgtgatttgtgttttttttgtagaaggtattattgggttgggttttagacgggtattttgcgagcggatcggcgagttttaatttttcggaatgcgttgttgggggttgcggtggtaggttttcggttttttggtttattttaggtttttttggtgttgagagttttcgaggtttgatttttttgtttgttgttcgtgttgtttattttgaaaataagagtgtttcggtggaaggatttgagaataaaatgttggggtaaatggatattcgtaagaattattttttttaggttttagttgttcgttaataatttttaaaaatgtgtttagaattatgagttaatttttattgtgaatttttgttcgtagacgttagggtttatatttttttttaattattagtaatttttgttttattggtgtttagttatggtcggggaagagttaggttttttttttcgtgttaataacgttgttgagtcgaaatgttaattttaatgtttttttttaaattgtaaattaagtatgtatgagtgttgggggaagggtaatggaagtttatggttgaaggttttaattttatgttattttttttgagttttgtttgagggaaggtgttttatttggtatttcggatagtaggtatttttttgaatgaagaagatttataggttttagtggttttatagtggggtagaagggggttatgttttgatatggagtttttttttaggagaggagaagattttattagttataggtttttgggttgttgtttttttgtagtttttttatggaggaggttaggagtggggaggttcggaatggggagtttagtcggtttttagtcggttttaagttgtttagtttggttttaattcgtaagtgtggggatttgggtttttattttgtagggtttggaatacgacgaggttgttatttttattttgtggttgtttaaaaagatgttgttttatttagtgtattagtttatggaggttgagtgttttattagggtttttagattttaataaggataatggtggttttgggtgttgtatttattgttgatttaagttgtatttttttatgtttgggtattatgtttagtgtgtattttgggagtagaaaagagaggggtttatatatttttaggttatggatgagttttagaaaataatagtggagaggagagagagaaaagaaggaagaggaggaggagaaggagaagaagagaaggaggaggaggaaaaaagtaggaggagaaagagaagaaggaggagaagaataata

SEQ ID NO: 1672 - DNA, 2475 bp, Artificial Sequence
  chemically treated genomic DNA (Homo sapiens)
tattatttttttttttttttttttttttttttttttgttttttttttttttttttttttttttttttttttttttttttttttttttttttttttttttttttttttttattattattttttagaatttatttatagtttaagagtatatagattttttttttttttgtttttaaggtatatattggatatggtatttaggtataggagaatataatttaggttagtaatggatatagtatttaaggttattattatttttgttggagtttagaagttttagtgggatatttagtttttatgagttggtgtattgaatgaggtagtatttttttggatagttataaagtgaaagtaatagtttcgtcgtattttaggttttataggatagaagtttagatttttatatttgcgggttgaggttagattggatagtttggagtcgattgggagtcgattgggttttttatttcgggtttttttatttttggttttttttatggaaaagttgtaggaaggtagtagtttagaggtttgtagttggtgaggttttttttttttttgggagagagttttatgttaaagtatagtttttttttgttttattatggggttattgggatttgtgaattttttttatttagagaaatgtttgttattcggggtgttagataagatatttttttttagatagagtttaaggaaggtggtatgaaattgaaatttttagttatgaatttttattgttttttttttaatatttatatatgtttaatttgtagtttaaaaaagaatattaaaattaatatttcgatttaatagcgttgttaatacgaaaggggaagtttggttttttttcgattataattgaatattagtgaagtagaaattattggtagttgaggaaaaatataaattttgacgtttgcgggtaaagatttatagtggagattaatttatgattttaaatatatttttaaaaattattagcgaatagttggggtttgaggagagtgatttttacgaatgtttatttgttttagtattttgtttttaaatttttttatcgaaatatttttgtttttaaagtgagtagtacgggtaataggtaaaggaattaggtttcggaagtttttaatattagaaaggtttaaaatagattaaaagatcggaggtttgttatcgtagtttttagtagcgtatttcggaaaattaaaattcgtcgattcgttcgtaaggtgttcgtttaaaatttagtttaatagtattttttgtaaagaggatatagattataggaattacgattgtttaagacgttttttcgggtggtcgcgaagggattttatcgagtcgggaaagtaggagcgaaggagtattttttttatatatatcgatatatattttttttttttattgttttttttcgattcgttttttttttattttttttttgggttaatgtgatagtagtagttgagtcgattagttatttttaaaattagtttgtgagttttaggtttggttaggagacggtagttcggggtggtcgttgattaggtagtagagattatggatatatttggtggtttttgagtagggaaggggatagttttggatataagtatatgttttttcgttatttttgttttagggtagggttatatatttatattttcgtttttgtttatatagataattagaggttgtaggaattgtttgaggaggagagttggtcggttttatattttaggtagattttggaagaaaataatttgaatgaatgttggtgcgtcgtggtaaataattagtgtatgtaaatatattttatgtttaggtagtggttatcgtatgttatatatcgagggtttttatgaatttatttaatgttttttatgaggtagggtttttttttagttttattttataagtggggaaattgagatataaaaagttaattaatttgtttaaggttatggagagttagaatttaaatttaggttgtgcgggtcgtagaggaaatagatataatagtaaattaggggttataaaaaagtgttttgggtttggtacggtggtttacgtttgtaatttcggtattttgggaagtcgaggtgggtatattacgaggttaggagattgagattattttggttaatatagtgaaatttcgtttttattaaaaatataaaaataaaattagtcgggcgtggtggtgggcgtttgtagttttagttataggcggagtttgtagtaagtcgagatcgcgttattgtattttagtttgggtgatagagagagattttattttaaaaaaaaaaaaaaaaattagttgggtggggtagtggttgtttgtgattttagttatttgggaggttgaggtaggagaattgtttgaatttaggaggcggaggttgtaatgagttaaggttacgttattgtattttagtttaggcgataagagattttattttaaaaa

SEQ ID NO: 1673 - DNA, 2443 bp, Artificial Sequence
  chemically treated genomic DNA (Homo sapiens)
gtatttgatttgtggtatgtgttaatttattattgttaattgtagggatttagtgattttttcgaatttttgttatttttgttacggtttttgttttgtggaggtttgtggaatgggaagtggggaggggaaggagaagggggcggagttagtcggagttttttggttaggtttggagttattttgttttgttatagtttttatgggtttagagtgggttttggggtagagggtttgtaaggataggggtgggtggttttgtcgagggcggtgttttgagtaggttttattttttagtttgtttagtttggttttattttagttttgttgttttgttattttgtttttttgtgtttattttttattttttgtcggggatattttaaggtttgttaaggttggagtaggggtgggatttagttatttaataaacgtttttttggttatgtagggttgggtattggggtggggggttgatttggattttttaagatattagattgtttaattgtttagtttttattggggtaagtgtttcgttgagggtgaagggggttgtgagtgtttattagggagtttggataggtttcgttttttatagttgttttattttttggagttgttttggtggtagatggtattgttttagaaaggtgaggttggagttgttttttttattaggggtggttaaggacgtttttagggttttttatgtaggtttttagggttattttgggcgtggttgagggtatgtagattacgttgtgtttttttttattttttatgttcgtcgtttgtttgatatgttttttagttgttttgtttcgtagaagttgtgtggttttttttgtgagtagagtcgggttttatgatttttcggagtagcgttagggattttttttaggtataattttaaagggggttttaggatttgttaggtttacggaagtggtttttgtaattttttttttggtggtagtttttggtgtatttcggtaggggtagtttttttttattatagggattttgtgtgttaggttttagttgcgttgtcgttgaattatggatttaatagtagagaagttttgtaggtcgtttgtgttggttcgggaaatcggggtttagtcggggtttgttacggttttggtgtcgttttgttttttgtcggcgttacggagtaagcggagagatttattttttcggttttaagaggtattaacggaggaggttgagaggtaggagttgaataattgatggttttttttggtttaggatttgttgaaaatgatacggtgtaaggtagaggggttgagagtgttgattataaaatgttgagaagttattttagggcggttacggttagaaggaggatttttatttaggacggggttataggtatttggggcgggtgttagaggtttttgttttgggttattttagggggttaggatatttagaagttgggtttagaggtttatagggttggtttatttttattttttttttatacgtttgttattatcggtgttttagtttagtaattttatggttcgttggtttcgtttatagtttttattgttttttgtgtgttgggcgtgggtttttgagttttatttttagtttttttagttttaggagaggagtggaggataggggtttaacgtggggtgtggtgcggagcggggagggttgtggcgtttttttagtttttttttttttaatagttttagttttttttttggagaattttttatttgttgggtatatttggtttttttttattattttgtttttagtcgggagatttttatttagtgaaatagtgaaataggaagggttttttggttatttcgcgtagggcgtagggtatgtagcgggggagtggttcgtttttttagtgttttatcgtttatatttttaggggagtatatagacgggtaggttgtggggttttgattttatggtagtgtttgggggtgaatgtttatagtttttgaaattttagtgggagtgcgttatcgggtggttttttagtttagcggtttgtaggtggttggtgagagtgagtttaattagatttttgttttataataaggatagaggaatttttgtattttagggttttttgttttggtgtattaaaaaattggattatacgtgggtttggagaatgagtgtaaggttttattgagtggaagtagtttttagtagatgggggagttagaggggagatggtttttttttggagttaggtaatattttcgggatgtttagtagtttgtttttttttattagtgtgtttttttttttatatagaggtttttgtttttgttttgttagggttttgggtttttataggtataggatggaggtatggtaggttagggtggttttgggaaatgtaatatttgggtaggaaatgtttgtttttatttaggttcgt

SEQ ID NO: 1674 - DNA, 2443 bp, Artificial Sequence
  chemically treated genomic DNA (Homo sapiens)
acgaatttaggtgaggataggtattttttgtttaaatgttgtattttttaagattattttggtttgttatgtttttattttatgtttataaaaatttaagattttagtaaggtagagatagaagtttttgtgtggggagaggaatatattggtggaagaagataagttgttggatatttcgagaatgttgtttgattttaggggaaaattattttttttttggtttttttatttgttgagagttatttttatttaataaaattttgtatttattttttaagtttacgtgtgatttaattttttggtatattaaggtaagaaattttgggatatagaaatttttttgtttttgttataaggtaggggtttaattgagtttatttttattagttatttatagatcgttagattaaaagattattcggtaacgtatttttattggggttttaagagttgtaaatatttatttttagatattgttatggggttagagttttatagtttgttcgtttgtatgtttttttagaggtgtgagcggtggggtattgaagaagcgagttattttttcgttgtatgttttgcgttttgcgcggggtaattagggaattttttttgttttattgttttattgggtagagatttttcggttggagatagaatggtggggagaggttagatgtgtttagtaggtaggggattttttaggggggaggttgaggttgttaggaaaggaggggttgagggggcgttatagtttttttcgtttcgtattatattttacgttaaatttttgttttttattttttttttggggttaaggaggttgagagtagagtttagaggtttacgtttagtatataggaggtagtgggggttgtggacggggttaacgagttatggggttgttgggttgaagtatcggtgatggtaggcgtgtgagagggaagtgggggtgagttagttttgtgggtttttaggtttagtttttgggtattttggttttttggaatgatttagggtaggagtttttgatattcgttttaaatgtttgtgatttcgttttgagtgggggttttttttttggtcgtgatcgttttggagtggttttttagtattttgtggttagtatttttagtttttttgttttgtatcgtgttatttttagtagattttgagttagagaaggttattaattatttagtttttgttttttagtttttttcgttagtattttttaaagtcgggaagataaattttttcgtttgtttcgtggcgtcgataggaagtagggcggtattaggatcgtgataggtttcggttgggtttcggtttttcgagttagtataggcggtttgtaaggtttttttgttattaaatttataatttagcggtaacgtagttggggtttggtatatagggtttttgtgatgaggaggggttgtttttgtcggaatgtattagaggttgttattagggagagagttataaggattattttcgtggatttggtaggttttagggttttttttaaaattgtgtttggggagagtttttggcgttgtttcggaggattatggagttcgattttatttataggggagattatatagtttttgcggggtaagatagttgaggagtatgttaggtaagcgacgggtatggggggtgggggggagtatagcgtggtttgtatgtttttagttacgtttagggtgattttggaggtttgtatggaagattttggaagcgtttttggttatttttggtggaagagatagttttagttttatttttttaggatagtgttatttgttattaaggtagttttagagagtgggatagttgtgagaggcgggatttgtttaggttttttgatgggtatttatagttttttttatttttagcgaggtatttgttttaatgaaaattgagtagttggataatttgatgttttggagggtttaggttagttttttattttaatgtttagttttgtataattaaggaagcgtttgttgaatggttgagttttatttttgttttaattttggtaggttttggagtgttttcggtaggaagtggagggtgaatatagggggataaagtaatagggtagtagagttggggtggggttaggttgggtagattggggaatgagatttatttagaatatcgttttcggtagagttatttatttttatttttgtaaattttttgttttagggtttattttaaatttatgagagttgtggtaggatagggtgattttaggtttggttaggaggtttcggttgatttcgttttttttttttttttttttttattttttattttataggtttttatagggtaggggtcgtgataggggtgatagaagttcggagaggttattgagtttttgtaattagtagtaatgagttgatatatgttataggttaagtgt

SEQ ID NO: 1675 - DNA, 2892 bp, Artificial Sequence
  chemically treated genomic DNA (Homo sapiens)
gtttttttaattttagaggcgtgagtatgttggtttttttggtaagtttttttgggttttttgtaaattttaaatttataagatattttgtggggagatgagtttttgtttttttgttttttattttaaaatttaatatgtgatcgggtacggtgatttacgtttgtaattttagtattttgggaggataaggcgggtggattatttgatgtcgggagtttaagattagtttgattaatacggagaaatttcgtttttattaaaaatataaaatttgttaggcgtggtggtgtatgtttgtagttttagttatttaggaggttgaggtaggagaatcgtttgaattcgggaggtggaggttgtagtgggttgagattgcgttattgtattttagtttgggtaataaaagtaaaatattattttaaaaaaatagaaagaaataatatgtatttagaaaagggtacgtattataaatgaatagtttaataaatttttataaattgagtttaattttgtaattaatatttagagtaagaaagttgaatttaattagttttcgaaagtttagtacgtttttattttaggattattatttttttgatttttgaattgtttttgtttttttttttttttttttttttttttgagacggagttttatttcgtcgtttaggttggagtgtagtggtgagatttcggtttattgtaattttcgtttttcgggtttaggcgatttttttgttttagtttttcgagtagttgggattataggtgtgtattattatgtttggttaatttatttttatttttatttttagtagagatagggttttattatgttggttaggttggtttcgaatttttgattttaggtaattcgtttattttatttttttaaagtgttgggattataggtgtgagttatcgttatcggtttgtttttgttttttatgtaaatggaattatgtagcgagtgtttttttgtggttgattttattattttgatttacgtttgtgagatttattcgttatgtgagttgcggattatttatttttgtttcgtttgtcgtgtttttaagttcgaatattttacgatatttatttgttttgatgacgttaggttttttaattggaggaattatgaatgtgcggttatatgtttttttgttttttggagtatatgttgtatgcgtttttgttgagtgtaaggttgggcggggcgtcggtggtttaaggggtttatggtgaatttataggaatatcgttttgagttgtttagtggcgtttttatgcgttttatttagttttttcgtatttttatttgtattattttattttttttttttggaaaataaatttatttgtggttttaaagtttaatttatttttagtaatttcggtagttatgaatttttatataagaggttttcgtaggtttagcgttaaagttgttttttttgtagtttcggtgatttttcgggttttttttttcggttttggtgtttcgggtgagtttagtatacgttgggattttggttgtttgttggtttggttcgattgtttttgtttttgagggtagagtcgggttttatttcgggatacgtttggggttagttatcgatttgtagtttttcggtcgagggtgcggggttggcggtaaggtttgttttagtgttttttagtagtcgggttttcgattgtaggttcgggttttcgttttttcgcgcggagtcgggcggggataatttttgatttcgagtttttttttcgagagggggtggggggaggaggggatcgggttttacggagtgttgggggataggattgggggtattcggttcgaaggcgttttttttgtgtttttttcggggaagtttgggatttaggttttcgtttttagtcgtgggcgcgcgtttttcgtagtcggggttcggggagggagggtttcggtagggggcgtcggggagggaggattaggagattcgcggtttcgttttcgtcgcgtttttttttcgggcgggataattgaacggcgcggttttggtttagcgttggttgtcgaggttcggtcggagcgtggagttcgcgtcgttgttttaggatcgcgttcgcgtttttgttcgtcgtcgtttatcgttcgtcgttcgtcgtttatggagcgcgtcgcgtcgtcgcgtcgggtttcgttttcgttgttgttgttcggcggttttgcgttgttggcggtcggaggtaggggcgtttcgggttcgtcgttttagtttagggtttcgattttttcggtttcgcgttttttgcgagtttcggaattacggggattcggagttcgtgcgttgttttgcgcggcgttttcggattgttagcgtcgaggtttcggcgacgttttttttttttacggttagtttcggtttttatttttttttcggtttggggatttgttttaaaatcggatttttttattttttaaatatatcgttttattttagttttagtaaatttagtcggtttcgggggtcgtatttcgggttttgggggtttaggggcgttagttgggttgggggacgttggttgggggttatcgagtttagggcgttttgtatttgacgttggaagcgttttcggttatttttttttatcgtttttcgtttttatttttaggtaggagttgttgtatttagtttgcggatgtgaaatttgagtttggagggtgggaagtagttttttttttaggagatattagcggttttgggataggggttggagaggaagaaatgagaaagttagggagtagtttggaggtttttggggcgtagttgggaggatggaggggatgcggatttggttattttttttttgtttttttttcgggatagagggtttaaggtagtggttt

SEQ ID NO: 1676 - DNA, 2892 bp, Artificial Sequence
  chemically treated genomic DNA (Homo sapiens)
gaattattgttttgggttttttgtttcgggagggaggtagggaggaggtggttaggttcgtattttttttatttttttagttacgttttaaaaatttttaggttgttttttggtttttttatttttttttttttagtttttattttaggatcgttagtgttttttggggaaaagattgttttttattttttaggtttaagttttatattcgtaagttgggtataatagtttttatttgggggtggaggcgggaagcggtgaggaaagatagtcgagggcgtttttagcgttaagtgtaaggcgttttgggttcggtaatttttagttagcgttttttagtttagttagcgtttttgaatttttagggttcgggatgcggttttcggagtcggttggatttgttaggattggggtaggacggtgtgtttgaggggtgggggaattcggttttgaaataagtttttaggtcggggaggagatgaggatcggagttggtcgtgggggaggggggcgtcgtcgaggtttcggcgttgatagttcgggggcgtcgcgtagggtaacgtacggatttcgagttttcgtggtttcgaaattcgtagggagcgcgaggtcgagggggtcgggattttaagttggggcggcggattcgggacgtttttattttcggtcgttagtagcgtaaggtcgtcgagtagtagtagcggaagcgggattcggcgcgacggcgcggcgcgttttatgggcggcgggcgacgggcggtgggcggcggcggataaaggcgcgggcgcggttttggggtagcggcgcgggttttacgtttcggtcgagtttcggtagttaacgttgggttagggtcgcgtcgtttaattatttcgttcgggaggagggcgcggcggaggcggggtcgcgggttttttggtttttttttttcggcgttttttgtcgggatttttttttttcggatttcggttgcgaggggcgcgcgtttacggttgggggcgagggtttggattttagattttttcggagggggtatagagggggcgttttcgggtcggatgtttttagttttattttttaatatttcgtgaaattcgatttttttttttttttattttttttcgaggggagggttcgggattaaaggttattttcgttcgatttcgcgcggaggagcggggattcgggtttgtagtcggaggttcggttgttggggggtattggggtaggttttatcgttaatttcgtattttcggtcgggaggttgtaggtcggtggttaattttaggcgtgtttcgggatgggattcgattttgtttttagagatagggatagtcgggttaggttaataaataattaaaattttaacgtgtgttgggtttattcgggatattagggtcggagggagagattcgggaagttatcgaggttgtaggggaggtagttttggcgttgggtttgcgggagttttttgtataggaatttatagttatcggggttattgaggatgagttaggttttggaattataagtagatttattttttaaagaagaagaataaaatggtgtaggtgaagatgcggaggaattggatgagacgtataggaacgttattgggtagtttaaagcggtgtttttgtgagtttattatggattttttgagttatcgacgtttcgtttagttttatatttagtagaaacgtatataatatgtgttttaaaagatagaaagatatgtagtcgtatatttataatttttttaattgggaagtttagcgttattaaggtagatgaatatcgtggagtattcgggtttaggagtacgataaacggaataggagtgaatgattcgtaatttatataacgggtaaattttatagacgtaagttagagtaatagagttagttataaaggaatattcgttgtatgattttatttatataaaaggtaagaataggtcggtggcggtggtttatatttgtaattttagtattttgggaggatgaagtgggcggattgtttgaggttaggagttcgaaattagtttggttaatatggtgaaattttgtttttattaaaaataaaaataaaaataaattagttaggtatggtggtgtatatttgtagttttagttattcgggaggttgaggtaggagaatcgtttgaattcgggagacggaggttgtagtgagtcgagattttattattgtattttagtttgggcggcggagtgagatttcgttttaaaaaaaaaaaaaaaaaaaaaaaaaggtaagaatagtttagaggttaggagagtggtgattttggagtgggagcgtgttgggttttcgggggttggttaggtttagtttttttattttgggtattggttataaggttgggtttagtttgtgagaatttattgagttgtttatttatggtacgtgtttttttttgaatatatgttgtttttttttgtttttttgagatggtgttttgtttttgttgtttaggttggagtgtagtggcgtaattttagtttattgtaatttttatttttcgggtttaagcgatttttttgttttagttttttgagtagttgggattataggtatgtattattacgtttggtaaattttgtatttttagtagagacggggttttttcgtgttggttaggttggttttgaattttcgatattaggtgatttattcgttttgtttttttaaagtgttgagattataggcgtgagttatcgtgttcggttatatgttaaattttaaaatgaaaaataaaaggataagaatttatttttttatagggtgttttataagtttgaagtttgtagagagtttaggaaagtttattaaggggattagtatgtttacgtttttgaggttaaggaggt

SEQ ID NO: 1677 - DNA, 2588 bp, Artificial Sequence
  chemically treated genomic DNA (Homo sapiens)
tattgattttattaagtttttttttaagtgttagtttttattttttttttttttgtttagaggagaaatttaaaatcgaaatttttaacgtggacgggggtatagagtttttggttttttttggtgttttttgattcgggtatattttttttacgattatgtttgagatgttttttttttttttaggttttttttatagtggggttttttggaatgtttttttttaaatttatttatgtaaattttgtttttcggaggttttagtttagtttcggtattttttaggagttcgttttgtagagatttttcggtttttcgtttcgtatttcgcgtaggaagttcgattttttttttagttttttttgagttaggtttagtagtttgaggaagcgagggtcgtcgtattcgaagcggcgttcgtaggtgagggaggcgattacgttgtttacggttttgtttaagaggtcgttggggcgaaaggggcgttttgggggtgggagatgcgggtaaggggttgtttttttcgtttttcgtttttttagttttcgttttgtgtttttttgtttattatttatcggtttggtcggcgaaggcggtataaaggtaggcggttttttcggttatttattgttttagcgattttttgtttaggtttaagttgcgtaaggtggatacggagaagcgtttttgttcgcgttacgcgggtttatagcgcgataggattatttttgggggcgggacgggtacgtgggcgttgttatgaaggttttggttttatttttcgttatttattttaattttggcgttttataaggtttttcgtagtttttagttcggtttagttgggtatagggtttattttttgtttatttatattgtttttttgtttggggcggggtttggttttatttcgtttttgtttattttgattatttttttatttaaggaagatttcgttcgtttcgtttatattgagttcgtagtataggcgcggttttcgttatcgttatttcgacgtattagtttcgtttatcgggtttttggcgggtttgggtagtagtttcgtttttttttagtttatagattcgtatttttttcgtgtaggtggttttttggtttattgtttttagtttattcgttggtttttatttttgttttacgtttaggattttacgttttgtcggcgttgtttgggttacggttattgtttattcggggtttacggaaacgcggtttttgttttttatcgtcgtttgttttgggaacgcggttcgaagtttaggatttggtagatgggcgtaggcgggcggtcggtcgtgttttcgtcgcgggttattatcgtttcgcgtacggtcgttagtttattgagtacgattatcggcgtttaggttagttgtaggttgaatacgttttcgaagcggcgtcgtaattgtagagggagggttagggttttttgttaagttaggattattttagattataggttttagttttatttgaattttggacgattttcggggttattaggagtgagtaggtggaaggaggagatttagttttttgattttggggcgggggtgggggttatattttttgtgatggaggaatttagtttggatgcgttatttaggtatgattttgtaagagttattaaaattgtcgagaggttttagttagtattttatttttagatgatggtttatgtcggtgagtagtgaggttcgaggatttatagtgtaaaaggtttgaatcgggttattgtattttttttattttcgatttcgtgatttaaacggtatttaggattaatttattttttatttttaaggtttttttttttggtgttagtagaagggattttgtattttataatatatgttgtttaatgggtttgtatgtttattgttaagtttagttttatttttaggtttttgttttatttttttttggtttttggaaaatttagttttttatgttatgtataaatgtttttttttaggacgttttttaaatttgttttttttttttagtttggtttttgatttagtttgtggtttaatttattatttatgtttgttggtggtggggtatttttaggatttttgtcgttttttaggatttttttttttatttggtcgaagtagtatggtgtgttttggaagtttatatgtagtaaggttgtttagttcgggtagtggtaggggatttggcgggtagcgtgtagtttagcgttggtgtcggtgtattaggtttattaggagtaggaagatggttattattatggttaggggtattagtgtttttagttttatggttgttttattattaattgggtttttttggatatatttggtatttttattttattaggtatagaggattaggtaggatattttcggtatatcgagcgcgtgattttttttttataaagggagttgatgatggttttcgttttttgttgtgagtgaatttgttgtgttgattgtgttgttagtggtagagttaggttagggtaggtatgggttgttttagaggtttttgtcgttgttttttgttttaggtttttatttagggtagggtggtagaaa

SEQ ID NO: 1678 - DNA, 2588 bp, Artificial Sequence
  chemically treated genomic DNA (Homo sapiens)
tttttattattttattttgggtaagggtttggagtaggaagtagcggtaaggatttttggagtagtttatatttgttttggtttgattttgttattggtagtatagttaatatagtaggtttatttatagtagagggcgaaggttattattagttttttttataagggaagggttacgcgttcggtgtgtcgagagtgttttgtttggttttttgtgtttggtggggtgggggtgttaggtgtgtttagaggagtttagttggtagtgaggtagttatggggttagaagtattggtgtttttggttatgatagtggttatttttttgtttttggtggatttgatgtatcggtattaacgttgggttgtacgttattcgttaggttttttgttattgttcgggttgggtaattttgttgtatgtggatttttagaatatattatattgtttcgattaggtgagggaggaggttttggagggcggtagaggttttgaggatgttttattattagtaaatatgggtggtgggttaaattataggttggattagaagttaggttgagaaggggaagtaggtttgggggacgttttggggaaggatatttatatatggtatgaaggattggattttttaaaggttaaggaagagtagggtaagggtttggaggtggagttggatttggtagtgggtatgtaagtttattgggtaatatatgttatggagtataaagttttttttgttgatattagaaggaaaggttttgggaatggaagatgagttagttttgagtgtcgtttaaattacgaaatcgaggatgaagggggtgtagtgattcggtttaaattttttgtattgtgggttttcgggttttattgtttatcggtatggattattatttgggaatgggatgttaattggggtttttcggtaattttggtgatttttgtaaggttatatttgggtgacgtatttaaattgagtttttttattatagaaggtgtgatttttattttcgttttaggattaggaggttgggttttttttttttatttgtttatttttggtagtttcgggggtcgtttaaggtttaaataggattaggatttgtagtttggggtgattttggtttgataagaggttttgattttttttttgtagttgcggcgtcgtttcggggacgtgtttagtttgtagttggtttggacgtcggtggtcgtgtttaatgggttggcggtcgtgcgcgaggcgatggtgattcgcggcgaggatacggtcgatcgttcgtttgcgtttatttattaggttttgggtttcgggtcgcgtttttaaggtaagcggcggtgggggatagagatcgcgttttcgtgggtttcgggtggatagtgatcgtagtttaagtagcgtcgatagggcgtggggttttggacgtgaaatagagataaaggttagcgagtgggttgaggatagtgggttaggaaattatttgtacgggggaggtgcgagtttgtgggttgggagggggcggggttattgtttagattcgttagaagttcggtgggcgaggttgatgcgtcgaagtggcggtggcggggatcgcgtttatgttgcgggtttagtgtgggcgggacgggcgggattttttttgagtggaaaggtggttagggtgggtagagacgaggtggggttaaatttcgttttaggtaggggagtaatgtgggtgagtaaagagtgggttttgtgtttagttggatcgggttagggattgcgggagattttgtggagcgttagggttggagtgggtggcggagggtggggttaaggtttttatggtaacgtttacgtgttcgtttcgtttttaggggtgattttgtcgcgttatgggttcgcgtggcgcgagtagaggcgttttttcgtgtttattttgcgtaatttgggtttgggtaagaagtcgttggagtagtgggtgatcgaggaggtcgtttgtttttgtgtcgttttcgtcgattaagtcggtgggtgatgggtagaagggtataaagcgggaattgggaaggcgggggacggagaaggtaattttttattcgtattttttatttttaggacgtttttttcgttttaacggttttttggataaagtcgtgagtaacgtgatcgttttttttatttgcgggcgtcgtttcgagtacgacgattttcgtttttttaggttgttggatttagtttaggagggattgaaggaggagtcgggttttttgcgcgaggtgcggagcgagagatcgaggagtttttgtagggcgagtttttgagaggtgtcggggttggattggggttttcgaagggtaggatttgtatagatgggtttgggaaaggatattttaggagattttattgtaagaagggtttggaggaggaggggatattttagatatggtcgtgggagaggtgtgttcgggttagggggtattaggagaggttaaggattttgtattttcgtttacgttggagatttcgattttaggttttttttttgggtaaggagagagagggtggaggttggtatttggggagggatttggtgaggttagtg

SEQ ID NO: 1679 - DNA, 2282 bp, Artificial Sequence
  chemically treated genomic DNA (Homo sapiens)
ggtcgaggcgggcggattacgaggttaggaggtcgaggttattttggttaatacggtgaaatttcgtttttattaaaaatataaaaaagtagtcgggtgtggtggcgggcgtttgtagttcgagttattttcgaggttgaggtaggagaatggcgtgaattcggtaggcggagtttgcggtgagtttagagattaggttattggaatttagtttgggcgatagagggagatttcgttttaaaaaaaaaaaaagaaaaaaaaaaaagattttgattttgttgtttaggttggagtgtagtggcgcgatttcggcgtatcgtaatttttttttagttttcgggtttaagtgattttttagttttagtcgtcggagtagttgggattataggcgcgtgttattatgtttgattaaatttgtatttttattagaaagggggttttattatgttggttaggttggtttttaatttttgatttcgtgattcgttcgtttcgattttttaaagtgttaggattataggtataagtcgttacgttcggttttttgttttttttttttttttttttatttgaagattgagttttgtatttgttgtttaggttggagtgtaatggtgcgattttagtttattgtaatttttattttagtaggagagtaggaatttttagtgatttacgggtagatttgtcgttattgtgggtatttgtttttttcgcgatttttgtgttcgtttttttttttttagtatttattgtatgattttttacgttcgtttttcgttattgttagtaagtgtttcgcgcgggtatttggttgcgtttattaattcgttaagttcgttttgttacgggcgtcgtgatgtgtttacgcgttcgtttttttaggtttaaaaggcgcgttgttcggtaatagaagaaattgttggtttagtcgttggtcgagttggcggttggacgaggacgtttagagtttagttttcgagagtttaagtaatcgacggttttttattgtttttaggagcggttatttgggtattttgtgttttttttttttgttcgggtttaggtcgaggatttgttagtagggtttagttgtttggagttcgtttagtttattttttagtttattttgtttgtgggattttttcgttgtttttgttcgtggattgagtggtaggttattttataagtattcggatatttgatattcgtggtgttaagataattttaagaaggtttttcgtgattttgtaagttttgtttttttttttgggattttgtttttaatttgattgtataggtattatagtaagttagtgttgtgtgtttcgagttttagggcgttttttagtttagttattgtattgagaatatggattttttgtggggtttaggagttgggagttatttttttggggtttataatagtcggttgtttttagatttgtgtttagggaagatagtgttgagggtttttaaggagagcggggtagggatgtttgagtaggataaggattttagagtttaagagaattttggtgattagagaagggttttcgaggttatcggggatgtatcgtttgtatttcggtttttgcgggataatggaggtttttttttttttgtgttcgggttcgggtttttgtagatagatttttatgtttagaggttagaaattagatatgattagttattttagattttttggacgagttcgtgtattaatcgaaatgttatttttagtttttatagttttacgggaggtttgtcggggttaaagcggaggagggggttagttttattttattgttagttgatttttagttttttaaagatagtgagtgaggataggttttaggttgttttttcgggttatatttagtgtgaaaaggtggtagagaaagtattagggtagatattcgtttttaggaatgatttttttagattcgaggtttttaggtttagtatacgtaagttttttttgttgttatataggcgaggggagtttttgatgttgttatttttcgtagagttggggtatcgggttattgttgaagatttggattgggagaaggaggcggtattttagtgtattaagagtgtattgtaggttgaggataaggttattttagattgtagatttttacggtttttttatattttgtttttatttgtaataggggtttttggtttgtttgtcgtttttaaagtatttagtatggatgtatagtaggagagatataagttttaagattgtttgggtttagtggtttttttagtat

SEQ ID NO: 1680 - DNA, 2282 bp, Artificial Sequence
  chemically treated genomic DNA (Homo sapiens)
atgttaggggggttattaggtttaggtagttttgggatttgtgttttttttgttgtgtatttatattgggtgttttagaaacggtaggtagattagaagtttttgttgtaagtgaggataaagtgtgggaaggtcgtgagggtttgtagtttgagatggttttgtttttaatttgtagtgtatttttgatgtattggaatgtcgttttttttttttagtttaggtttttagtagtgattcggtattttagttttacgggaggtggtagtattaaaggtttttttcgtttgtgtggtagtaggggaaatttgcgtgtattgggtttagaggtttcggatttggaggagttatttttgagggcgagtgtttgttttggtgttttttttgttatttttttatattgggtgtgattcgaagagatagtttgaggtttgtttttatttattgtttttgaggaattgagggttagttggtagtgggatgaggttggttttttttttcgttttagtttcggtaagtttttcgtggagttgtaggagttggagatggtatttcggttggtgtacgagttcgtttaggaggtttgggatgattggttatatttgatttttgatttttgggtatggaggtttgtttgtagaggttcgggttcgggtataaagggagagaggtttttattgtttcgtaggggtcgaaatgtagacggtgtattttcggtgatttcggggatttttttttgattattaggatttttttggattttagggtttttgttttgtttaggtatttttgtttcgttttttttgagggtttttaatattattttttttggatataagtttggggatagtcggttgttgtggattttaaaggggtgatttttagtttttgggttttatagagagtttatgtttttagtgtagtggttgagttggaggacgttttggaattcggagtatatagtattggtttgttgtggtatttgtgtaattaaattgaaggtaggattttagaaaggaaggtagggtttgtaggattacggaaaatttttttagagttgttttgatattacggatgttaagtgttcgggtgtttgtaggatggtttgttatttagtttacgggtaggagtaacggggagattttataggtaaagtgaattgggggatgggttgaacgggttttaggtaattgagttttattggtaggttttcggtttgggttcgaataggaaggaggggtatagagtgtttaggtaatcgtttttgggagtagtggggaatcgtcggttgtttgaattttcgagagttgggttttgagcgttttcgtttagtcgttaattcggttaacggttaagttagtagttttttttgttgtcgggtaacgcgttttttaaatttgagggagcgggcgcgtgagtatattacggcgttcgtgatagagcgagtttaacggattaataagcgtagttaggtattcgcgcgaggtatttgttggtaatggcgggaggcggacgtggggggttatgtaataggtattggaaggagagaggcgggtataaaggtcgcgggaggaataggtgtttataatggcggtagatttgttcgtggattattgaagatttttgtttttttgttgaggtggagattgtagtgagttgagatcgtattattgtattttagtttgggtaataagtgtaaaatttagtttttaaataaaaaaaagaaaaagaaaaataaaaggtcgggcgtggcggtttatgtttataattttagtattttgggaggtcggggcggacggattacgagattaggagttggagattagtttggttaatatagtgaaattttttttttagtaaaaatataaatttagttagatatggtggtacgcgtttgtagttttagttatttcggcggttgagattggagaattatttgaattcgggggttgggaagggattgcgatgcgtcgagatcgcgttattgtattttaatttgggtaatagagttagagttttttttttttttttttttttttttttgagacggagtttttttttgtcgtttaggttggattttagtggtttgatttttgggtttatcgtaagtttcgtttatcgggtttacgttatttttttgttttagtttcgggagtagttcggattataggcgttcgttattatattcggttgtttttttgtatttttagtagagacggggttttatcgtgttagttaggatggtttcgattttttgatttcgtgattcgttcgtttcggtt

SEQ ID NO: 1681 - DNA, 2731 bp, Artificial Sequence
  chemically treated genomic DNA (Homo sapiens)
gggttaggtatcgttagtttacgttgagtttttcggtggcgtcgtttcgtttattttttttttcgtttcgcgtagtaaattgatttaggatagtcgtatggagagttttatttcgattttgtcgttgtttatttcggacgtcgagattgagaagtttattaggatgaaggatgaggaagtatgtggggcggcgggggcggcggaggcgggcgttagggatgttttttcgcggtgttgtttattcgtcgggttgttttcgttcgtagttgaggcgtatgtaggagatgttgtagaggatgaagtagtagatgtaggattagtgacgttcgtcgcggatatatcgttcgttttcgggacgttttcgtatttttggatattagatcggattgttttcgattcggagacgcggggttatagtttttagttgattttaatttatttttagtattatttttttttaggttattgtgtttgttttcgaggggtttggatcgtagttttcgtttagttggttttttttgattttgggggattaggagcgaagttgggcgggattttagagattcgttttttttgtttttttttcgttttcggacggttatagtatttaaatcgtaggttttgttttggtaggtaggtaaagttaggtagaagaggatttttaggattttgggtttgttttttgttttagtgttgtagaacggatttgggagtttttttttgtttgttttcgcgggttatttagcgagtgttgagattttattttttgtcgaggcgggtcgagtttttttttatttttagacgtttagcgggtagggttgggttgaattaaatgggagttttttagatataaggaggttagaggttgtaaggagcggggtcgtgatcgtttatattttttttttatagttcggttcgatttggagggttttcggggtattgggcggtgagttattttttggtaattttcggtgtcgttttttgttttcgttcgaggttttttttttttagtatcgttgtggtgtgtcgggattttgagtttaggtttttcgatgtttttattcgtatgattttttttcgttatacgatgtttcgttttttttcgttgtgaatgtcgcgttttgttttggtgataggagaataatgttggtgaacgtcgtagcgggtgttcgagtgtttcgtgtgtttttgagagcgggtgggagcggaagtttgagcggtttgcggttttcggcgatagtgtgttatttgtcgttgtagcgcgcgttcgcgcggtttttgggttatttttggttaggtcgtagtattgtggtcggtgcgggcgtggtaggggcggggcggttttatcgttcggttttttcgtttacgtttttcgttgtagagtaagtcgggttgtcgttttttcgttatgggtttcggtgagtttggagttcggtcgggttttcggttgttttttaggtcgattcgggttgagaggagttttggtcgtttggttgtagttgggagagatttgggttagatttagaggggatttttagtcggcgtgcggggtggttagggtggagaggttggcgggttatcgggacgtcgggtattaggggttggatggagtcgggtcggtagtttgggtatttagagatgtcgtttaggtgttcgtcgatcgttcggtttattgcggcgttttttttgtagggtcgcgcggggcgttgagtttattgtttttgttgttggtttcgtcgagtcgttcggtcgtaggttgttcggcgttttgtagttgcgcggggacgttcgtggattgcgggcgtcgcgggttgatttgggtttcgttgtcgatcgttttttttgtcgatataatcgagttggtgttgatcggtaataatttgacggcgttgtcgtcggggttgttggacgcgttgttcgcgttgcgtatcgtatatttgggcgttaatttttggcgttgcgattgtcgttttgtgtcgttgcgcgtttggttggtcggtcgtttcgagcgtgcgttttatcgcgatttgcgttgcgtggcgtttttagcgttgcgcggtcgtttgttgttttatttggtcgaggacgagttgcgcgtcgtttgcgttttcggttcgttttgttggggggcgttggcggcgtagtttgcgttgttgggttttgggttgttgtacgcgttgttgttggtgttgttgttgtgtcgtttgcggaggttgcgggttcgggttcgcgttcgcgtcgtagttcggttgtcgttgatcgattcgttggtggtcgagcgagtcggaatcgacgagttttgaggagagaatcggtgcgttttgaggagagaatcggcgttgggtaatacgggtttgtaaattcgataggattttgttcgaggggttttcgcgttaatttggatcggttttcgtttttttcgttgtttaattttttagatttattttatttgtaggtttagattacgtgggatagaatttttgtttattttatttcgagggaggcgaattcgtatttttaggtttgggaggattatggggtataatgcggtttagattttgttgcgttttttttttaaattttggtgttgaataaatttttttgatttggttttttttgtacgattgatttggaaatttttttcgttaaatttaggaaaaggttttaggaggcggtttaaggggatataaatatatttttatatgtttattttaattttaggggtagatag

SEQ ID NO: 1682 - DNA, 2731 bp, Artificial Sequence
  chemically treated genomic DNA (Homo sapiens)
ttgtttgtttttgaggttagggtgggtatgtgaggatgtgtttgtgtttttttgaatcgttttttggggtttttttttgagtttggcgaggggaatttttaggttagtcgtgtagagaagattagattagaagggtttatttagtattagagtttggaagggagacgtagtagggtttggatcgtattgtgttttatggtttttttaagtttggaagtgcgggttcgtttttttcggggtagggtgggtaggagttttgttttacgtggtttgggtttgtaggtggggtgggtttgagagattgggtagcggaggaggcggggatcggtttaggttggcgcgagggtttttcgggtagggttttgtcgagtttgtaggttcgtgttgtttagcgtcggttttttttttaggacgtatcggttttttttttaggattcgtcggtttcggttcgttcggttattagcgggtcggttagcgatagtcgggttgcggcgcgagcgcgggttcgggttcgtagttttcgtaggcggtatagtagtagtattagtagtaacgcgtgtagtagtttaaggtttagtagcgtaagttgcgtcgttagcgttttttagtagagcgggtcgggagcgtaagcggcgcgtagttcgttttcggttagatagggtagtaggcggtcgcgtagcgttgggggcgttacgtaacgtaggtcgcggtagggcgtacgttcggggcggtcggttagttaggcgcgtagcggtataaggcggtagtcgtagcgttaggggttggcgtttaggtgtgcggtgcgtagcgcgggtagcgcgtttagtagtttcggcggtagcgtcgttaggttgttgtcggttagtattagttcggttgtgtcgatagggaaggcggtcggtagcgaggtttaagttagttcgcggcgttcgtagtttacgagcgttttcgcgtagttatagggcgtcgggtaatttgcggtcgggcggttcggcggggttagtagtaggagtagtaagtttagcgtttcgcgcggttttgtaagggaagcgtcgtagtaagtcgagcggtcggcgggtatttgggcgatatttttgagtatttagattgtcggttcggttttatttagtttttgatgttcggcgtttcggtagttcgttagtttttttattttgattatttcgtacgtcggttggaagttttttttaagtttgatttaagttttttttagttgtagttaaacgattagagttttttttaattcgggtcggtttagggagtagtcgggggttcgatcggattttagatttatcggagtttatggcgagaagacggtagttcggtttattttgtagcgggaggcgtaggcgggagagtcgagcgataaggtcgtttcgtttttgttacgttcgtatcgattatagtgttgcggtttggttagaaatagtttagaggtcgcgcggacgcgcgttgtagcggtagatagtatattatcgtcggaggtcgtaggtcgtttaggttttcgtttttattcgtttttaggggtatacggagtattcggatattcgttgcgacgtttattaatattgtttttttgttattaggataggacgcggtatttataacggaagaaaacggagtatcgtgtggcgggaagggattatgcgggtgggaatatcgggaggtttaggtttaggatttcggtatattatagcggtgttggggagaagaggtttcgagcgagggtaggggacggtatcgagagttgttaggaggtggtttatcgtttagtgtttcgggggttttttaggtcgggtcgggttgtggagaaggggtgtaagcggttacgatttcgttttttgtagtttttggtttttttatgtttggagggtttttatttgatttagtttaattttgttcgttaggcgtttggggataagggaagattcggttcgtttcgatagaaaatggggttttagtattcgttgggtgattcgcgggagtaggtaaaggagggtttttaagttcgttttgtagtattggggtagggaatagatttaggattttgggaatttttttttgtttagttttgtttgtttgttagagtagggtttgcggtttgggtgttgtgatcgttcgggggcgggggaagggtaagggaggcggatttttgaagtttcgtttaatttcgtttttgattttttaaggttagagagggttagttgggcgggggttacggtttaggtttttcggaaatagatataatgatttgggagggggtggtgttgagaataaattagggttagttgggggttgtggtttcgcgttttcgggtcgggaatagttcggtttggtgtttaggggtgcgagggcgtttcggagacggacggtgtgttcgcggcgagcgttattggttttgtatttgttgttttattttttgtagtattttttgtatgcgttttagttgcgggcggagataattcggcgggtgagtagtatcgcggaggagtatttttgacgttcgttttcgtcgttttcgtcgttttatatatttttttattttttattttgataagttttttagtttcggcgttcggggtgggtagcggtaggatcgggatggggttttttatgcggttgttttgggttagtttgttgcgcggggcgggggggaggatgggcggggcggcgttatcgggaggtttagcgtgggttggcgatgtttggttt

SEQ ID NO: 1683 - DNA, 2284 bp, Artificial Sequence
  chemically treated genomic DNA (Homo sapiens)
aggaatattaaatttattagtttgtttttttttttttttggggtagagttatattttgtgtaatatgtattatatttttatttgttttttgattagtataaaaattaaaatatatatatatatgtatatatttatatatagatatatatatttattaagagagattaaataaagaagaaaattatgtttattggttagtagaaagattcgttattattaaggaatatgttttggtgtatgtggggataaaaagatattttgtggtttaataggttagtaagttttgtattgataaaagtaaatgggtgtttattttggttaatacggtgaaatttcgtttttattaaaaatataaaaaaaatttagttgggtatggtggcgggcgtttgtagttttagttatttgggaggttgaggtaggagaatggtatgaatttgggaggtggagtttgtagtgagtagagatggtattattgtattttagtttgggcgatagagcgagattttgttttaaaaaaaaaaaagtaaatgggtgttttttttataaggtaggttgatttttagtatgagatgtgtattgtaaagtaataagaagaatttagatattcggtgttttttttttttttttttttttaatttatgtggcggtgaatgttttgtatggggtatttttttggattaagtttttagggtatattattaggggttggggtagggaattaaaaattgtagtagttagtttttaagagtttttttaattcgtgaaagttgatgtttttattttagttgttttatttgtttttttttttaataatttttttacgtaatttttttttatttttgtttgtgtttgttttgatgcggtttataattatggttttattgattttgttttcgtgttataaaattattttgtgtttgtgatttgttttatggtattttttaagaagtggttttaattttttttgggataggtatattattatgtattatagggtaggttaggttgtaggaggagtttgtagttttggaggtttttggttttttttttatttcgttgttcgttttttagtgattagttggaatttaagatagtaatataagatgtgtcgttggtgggagtgatggagtgtttgttgagtgggtcgtagataagtatcgtgatttcggaggacgttttattatttcgtcgtaagaatatgttaacgggtgattgtttgaatgtttttagttaataggatattatttataatattttggttagttggaatggaagatgataagaaattaaatttttaatggttttttttaagggaggattttttttaggggaattaggaattttgggaaatcgttttatgtattttggtaatatttatacggagagaattggttttaaatgaatttttgagggttatataaagggtaaaagaaagagaataaaaagtaattgatattaatcgggtttttattacgtgttaagtatttagatattttatttatattacgttattttattttggttttgtttttgttgtgataaggtattattaagtttattttagaattgggaaaattgaggtatatagaggtgagttgatttggttaaggttttatttttggtgttggagttacgatttatattttaaagtaatatttttttcgtgaaatgaattatggagagagaagttgtttgggagaagtagtttttatatgtaatttgaaaggtggagaagttatagtcgtatagaggtagttgtagtaggtgtagagggaaggcgagggttgtgtaggtggtttttattgatgtttgggaattatttattttttggatatttgtagttaatattatttatgaatattttttgcggtttttgagttttcgtattttttggaagtttttttgagttttgttttttttgtttttttaataagtaaggaagtttttgattttatgtattaaatttttttttgtttgaaatattgagaagaatgatagaattttgtttgtaaagtattttgcgtaagtattatatatatgtatggtatatatatatatatatttaatttataaaggtaaatttttaagaatagaattataggttatatatgttggggatataagatattataatgataatagtaatagtatggtttttttttttaatatggaaattatttttggaataatttttataagtttgggaagaaagagattatattattttttattaataattgttttttatatataatgaaattttttttttagataaataggatag

SEQ ID NO: 1684 - DNA, 2284 bp, Artificial Sequence
  chemically treated genomic DNA (Homo sapiens)
ttgttttgtttatttagaaggaggattttattatgtgtaaaaagtagttgttggtaaaaagtagtgtggtttttttttttttaggtttgtagaaattgttttagaaatggtttttatgttggaaaaaaaaattatattgttattgttattattgtaatattttatgtttttaatatgtgtgatttgtaattttatttttgggaatttatttttgtgagttgagtatgtgtgtgtgtgtgttatgtatgtgtgtaatgtttacgtagggtattttgtaagtagggttttgttattttttttagtattttaagtaggaggggatttgatatatagagttagaagtttttttatttgttggaaagatagggagagtaaagtttagaaaagtttttaggaaatgcggaagtttagggatcgtaggaaatatttatgggtaatgttggttgtaggtatttaggaaatagatgatttttaggtattaatagaagttatttgtataattttcgttttttttttgtatttgttgtagttatttttatgcgattatggtttttttattttttaaattgtatgtgagggttattttttttagataatttttttttttataatttattttacgagaagaatattgttttagaatgtaaatcgtgattttagtattagaaatgagattttggttaagttagtttatttttgtgtgttttagtttttttagttttgaaatgagtttaatagtgttttgttataatagagatagggttaggatgaagtaacgtgatgtaggtaaaatgtttaagtatttggtacgtagtagggattcggttaatgttaattgttttttgtttttttttttttattttttgtgtaatttttagaggtttatttaaagttaatttttttcgtatagatattgttagggtatatggagcgattttttagggtttttggtttttttgggaaaagtttttttttaaagaaagttattaaggatttaattttttattattttttattttaattagttagagtgttatgaataatattttattagttggagatatttaaataattattcgttaatatgtttttacggcgaaatgatgaagcgtttttcgaaattacggtgtttatttgcggtttatttagtaggtattttattatttttattaacgatatattttgtattgttgttttggattttaattaattattgaggggcgggtagcggggtgagaggagagttagaagtttttaggattgtaagttttttttgtagtttggtttgttttgtggtatatagtaatgtgtttattttagaggggattgaagttattttttgagaaatattatgaaataaattataaatatagagtgattttgtaatacgaaaataaggttaataaaattatgattgtgaatcgtattaagataagtatagataaaaatgaagaagagttacgtagaggagttattgaaaaaaaaggtaaatgaaatagttaaaatagaggtattaatttttacgagttagaggagtttttagagattggttattgtagtttttaattttttgttttagtttttagtagtgtgttttagaggtttagtttagagagatgttttatatagagtatttatcgttatataggttggggaaaaaaaaaaaaagaaaatatcgaatatttaagttttttttgttgttttgtaatgtatattttatgttaagggttaatttattttatgggaaagatatttatttatttttttttttttgagatagagtttcgttttgtcgtttaggttggagtgtagtggtgttatttttgtttattgtaagttttattttttaggtttatgttatttttttgttttagttttttaagtagttgggattataggcgttcgttattatatttagttaaattttttttgtatttttagtagagacggggttttatcgtgttagttaggatggatatttatttatttttattagtgtaaggtttattaatttattgaattatagaatgtttttttgtttttatatatattaaaatatattttttggtagtgacggatttttttattagttagtgagtatagtttttttttttatttagttttttttgatgaatatatatatttgtgtgtgaatatatatatatatatatatattttaatttttatattggttagagagtaaatggaagtgtgatgtatattgtataaaatgtagttttattttaaggaaagaggaaaataagttaatagatttggtgttttt

SEQ ID NO: 1685 - DNA, 2519 bp, Artificial Sequence
  chemically treated genomic DNA (Homo sapiens)
gtagaggaaagggaagatgattataggattagtttattttggaatagatttttgaagggttggatttggggttaaggaataggagagaaaagttttttttatgtattttggtataattatagtgatttttaataattatcgtttttttagtaaaattgttgaaatttagaataatattttttaaattagttattaggggaaagggtaattaattttttttttttttaaatcgtttaattatatgaattaatatatagaaaattatattgtagtgtatattgttttttagtaggcgtggtggtatggaaggacgcgaacgatttcgggagtggcgggtgaggagggaaggggagcgagcgggtgcgaggtgttcgcgtttttttggggttcgggagggaaagggagagggtgtgaggtgtttgttttttcggggtttgggagggaaggtgagtaggtttaaggcgtttgttttttttggggtttgggagggaaggagagagggtgcgaggtgttcgttatttttagggtttgggagggaaggggagcgggtgcgaggtttttgtcgttttgcgaggttgcggagtttgttgtgttttttttttcgtttatttttcgatttgtaggtttacggcgtttaaggtaatagggtttttagttttggaattaattttttgggtttcggaacgtaatttatataaatttggattttgttttttattggcggggagtcgttttcgtatgtagacgtggagaagtcgtttttattcgtagtttttttcgtggatttaggtcgttttttttacgtttttttcggagtttttagatttttcgtggcgtttttggtatcgtttttattgttttatttataaagagttttagttttttttcggggggcgatttttttagttagtcgttgtatagtacgtggttatttttcgtgttttcgtcggcggggttattttcgggttacgaagataaaggcgtaaatgtcgggttaggtgggtatagttttcgggagggtgagggggacggtagggatatgggggttgtagtttatagtgaaggtgggggagatagggcgagagggcgttgttggaggtggggtgtgagggacggtttgcgatattttgggattgcggggtagaaagcgtagttttaggggaggtcggggttagaggtgaagttcgtggggagggcgagattcgggcgtaggtgtttataggcgagggcggggtttaggttttagttgggttttgagtttcggtttaggtttttatttgtggtttcggttttaatttgaggtggagtttgggattaaagtttagacgaggtttttcgtttagggtttgcgttggggattggggtggggatttgtattttgggttagtttgggtgtattttatcgggattatcggggcgggggatatgggtcgggtggttttttgggagaagagggatagggagcgtagttggtggagaggataagaacgaggggcgtagtttatttagagggttataatagagttttaggtgttgagttttatgcgttagatgaggaaagataatggaagagtttaggtttttgttggggtttgagttttagttcgggattcggtttatggtttattttttgatttgagttggggtttggggttaaggtttaggttaggatttgagtttcgggttgtagtttgggggtggggttaggttttagagtgagggtttgggtttgtttgtgttgtgtatgtttgtgaatgtattgggatgttatcgtgtgtatttatgttacgtgtgtgtacgtattagtgtgtgtatgtgtgagtgtttattgagtgtggtattgatagttaatttttttttttttatttatgttttattgttttattttggttggggtgggttttataagttttttttttgggttagttggaggtttttatgttgtttggggagagaagggaaggagagaataggttaaagatgagggtagtttggttttaattagattcggtgttacggggattaagaagtcggaggtttttgttttttgtttttggaggagtttggtttgtttttttgtttatatattgtgtgaaagtatagttgggggtatttgatatgtataggatttgtttttgtttttgtagatgttttagagaataggatagataaggggtttttttagtaagttatttttaatgtgtattgtatgttagtttataagaggggtataggggttttattaggtagtagggaggatgtaaggaagagtgtgtggggatgggggtgttgggtggggttaggtgagtgggtgtttggtttttttttagagtaaaggaaagtgttgaagagtgtgaaattgtgtgatatgttatgttttatgttttgagaatggattgtaggaataagtagatatgggggatttgatgagggttaatgggatgtttatagagataagatttggtttgagttggtgggaaaagtggagatggagttatatggaggaaattgtagagttt

SEQ ID NO: 1686 - DNA, 2519 bp, Artificial Sequence
  chemically treated genomic DNA (Homo sapiens)
agattttgtaattttttttatgtggttttatttttattttttttattagtttaagttaaattttatttttatggatattttattggtttttattaggttttttatgtttgtttgtttttgtaatttatttttaaaatataaagtataatatgttatatagttttatattttttagtatttttttttgttttgaggagaagttaggtatttatttatttggttttatttagtatttttatttttatatatttttttttgtattttttttgttatttgatggggtttttgtgttttttttgtaagttgatatgtagtgtatattggggatggtttattgaagaggttttttgtttgttttgttttttaagatatttgtagaggtaagaatagattttgtgtatattagatgtttttaattgtgtttttatataatgtgtgaataaagaagtaaattaagtttttttagaggtaggagataaggattttcggttttttggttttcgtgatatcgggtttggttgaggttaagttgtttttatttttgatttgtttttttttttttttttttttttaggtaatatgagaatttttaattggtttagggaaggaatttgtaaagtttattttaattaggataagatagtggggtataaatgggaggagaggggttggttgttagtgttatatttaatgaatatttatatatgtatatattgatgcgtgtatatacgtgatataagtatatacggtgatattttaatatatttataaatatatataatataaataggtttaaatttttattttgaaatttaattttatttttaaattgtaattcggaatttaagttttagtttgaattttgattttaaattttaatttaagttagaaggtaaattatgggtcgaatttcgaattggaatttaaattttagtaggaatttgaatttttttattgtttttttttatttggcgtatgggatttagtatttgagattttgttgtggttttttgaatgagttgcgtttttcgtttttgttttttttattagttgcgttttttgtttttttttttttaaggagttattcggtttatgtttttcgtttcggtggtttcgatgagatgtatttaggttgatttagggtgtaaatttttattttaatttttaacgtaaattttgaacgagaggtttcgtttaaattttaattttaaattttattttaaattggaatcggaattatagatggaagtttgaatcggaatttaaagtttagttggaatttgaatttcgttttcgtttgtgagtatttgcgttcgggtttcgttttttttacgagttttatttttgatttcgattttttttagaattgcgttttttatttcgtagttttagggtatcgtaagtcgttttttatattttatttttagtaacgttttttcgttttgttttttttatttttattgtgagttgtagtttttatgtttttgtcgttttttttattttttcgggagttgtgtttatttgattcggtatttgcgtttttgttttcgtggttcggaagtggtttcgtcggcggaagtacgagaagtggttacgtgttgtatagcggttggttgaggaagtcgtttttcgagaagaagttgaggttttttgtgagtggggtagtgggggcggtattaggagcgttacggagggtttggggatttcgggaggggcgtgggggaggcggtttgggtttacgggaggagttgcgggtggaggcgatttttttacgtttgtatgcgaaggcgatttttcgttagtgagagatagggtttaggtttgtgtgggttgcgtttcgagatttagggagttgattttagggttggggattttattattttgagcgtcgtgggtttgtaggtcggagagtgggcgggaaaggggatatagtaggtttcgtagtttcgtaaaacggtaggaatttcgtattcgtttttttttttttttaggttttgagaatggcgggtatttcgtatttttttttttttttttttaggttttaaggaaggtaggcgttttaaatttgtttatttttttttttaagtttcgagaaggtaggtattttatattttttttttttttttttcgggttttaggaaaacgcgggtatttcgtattcgttcgttttttttttttttttattcgttattttcggggtcgttcgcgtttttttatgttattacgtttgttgagggatagtgtgtattgtagtgtagttttttatatattaatttatgtggttaaacgatttagaaaaaaagaagattggttgtttttttttttagtggttaatttgaagagtgttgttttaaattttaataattttattgaggaagcggtaattgttaggagttattatgattatattaaggtatatagaagaggttttttttttttgttttttagttttaggtttagttttttaagaatttattttagaataagttgattttatagttatttttttttttttttgt

SEQ ID NO: 1687 - DNA, 2452 bp, Artificial Sequence
  chemically treated genomic DNA (Homo sapiens)
gaatattttatttaaaagaaggtttttttatagagtatattaggacggatttttagaattattggttggttgtattttatttttaggtttttgattggagatttttttatgtatcgtttattgatttttgtggttgaaagttttgttgttttagttagatggtaaattatattttaaggatagatatttgttatatatgtttgtgttttttagagttgtatttagtatagagttggttataaagtggtttttttaaatttttgtggttttagtttaataaatatttgtaattttttatagttgaataaagatgaatgattttaattcgtttaagttaggttggattttttttattttgattatatatttggttttataaagcgttgagcgataggaagaaagaatggtttttattggtcgagttgaagggtttcgagtatattttttttaatagtataatttggttttttgatataaaaggtagggaaaggaaggggtagcggtttttaatgaatagagacggatggcggtcgggtttttgtcgttattgttgtgtttattgggtagattagttatattttttggtttaggttaaagattagggtagatgatatatggggtatttataggagagttgtgtttagggttttttgttggtttcggaattttttagaatggttttttatatatttttcgttttttttttttttttttgtttttttcggaattttttagagtgggtttttatatatttttttttttttttttttttttgttttttttttttttttagtgaaaggatttttttggtaagagtgttaggttttagttgtttgtgttttgggaaattataagattttttttttttttttttttagttaggattatatatgtagagttatttggtttttttggtttgcgtagttgttgtcggtcgggtcgggggattatgttaggtagtttagttagaggtgagttgggttataggggtgagttgttaggtttgtttatttttttttttggtgtgatttttttaagtttaatttttagggattttttttaggaatgttgagagtattagttgtttcggttatgttaggtatttggttattaggtttttttttattttaggggtaattatcgttagagggaaaaacggaaatattaggttatttgtgatttgtatatttatttttcgtttagagagataagtaggaggttaggggaatagatgggattgtgggaatagttaagggtagagggtgaagggcggcgattagaaggaaagacggaatgtttatatattttttgtcgttttcggttttagtcgtggaggaagcggggttcggaggatattgtattagataggttttgtttagaaaattggaaaagaataaatattgattataagagtgtaggagaatgggtttttttattattaaaaataggtatttagttaggcgaagtgatttacgtttgtaattttagtattttgggaggtaaaggtaggaggatcgtttgggtttaagagtttgagattagtttgggtagtatggtgaaatttagtttttataaaaaatattaaaaattagttgggtgtggtgacgtgtttgtggttttagttattcgggtggttgaggtgggaggattgtttgggttcgggaggtcgaattatgtttatattatggtattttagtttggatgatagaatgagattttgtttttaataataatagtaataataataataaaatatatatttattagttatgattttgttttataggataattggggtaaaaatgtttttgggtgaaattgggtaatttaatttgaaaggtttgggaaatatggtttaattttagtttcgttcgttatttataggttaagtggaggttgcggtttataatatattggatattagatattattaatgtttttattttataaatgggaaaattatggttgagaggttatttgattttttaagtttatttagagacgtggggatgggtcgagttttagagtttgggttttgttttgttttattttatatagtacgaagttttttggttaattaaggaaggagtgtaaggtgattgaagaaaataaaaataaatagaattgatataaaaaataaataaataaaattgagtgttaaagaaggagaatttgggggttgaggttgtggttgtagagtgggagtggggataattaacgttgggtttttgagtgtttttggaagggcgggttttggtgtttagagcgtttggtgtttattttttttttttttttagggtttttgtttgagagtttttttatttatttttggttgttggggtatttgatattttttaaaatataatttttatatttttaatagtgggttgcggaggagttaggattagagtttttagtttagatttttttttttgaaaggatacggttttag

SEQ ID NO: 1688 - DNA, 2452 bp, Artificial Sequence
  chemically treated genomic DNA (Homo sapiens)
ttaagatcgtatttttttagggaaggaaatttgagttagaggttttgattttgattttttcgtagtttattattaagggtgtgaaaattgtgttttggaaaatattaggtgttttagtagttaggagtgggtagaagagtttttagataggggttttgggggaaaggggaaggtgggtattaggcgttttggatattagggttcgtttttttagagatatttaggagtttagcgttgattatttttatttttattttgtagttatagttttagtttttaaattttttttttttggtatttagttttgtttgtttgttttttgtgttagttttgtttgtttttgttttttttagttattttgtattttttttttagttggttagggaatttcgtgttgtatggggtggagtagggtaaggtttaggttttggagttcggtttatttttacgtttttgagtgaatttgggagattaggtgattttttagttatggtttttttatttgtagaatgaaggtattagtgatgtttagtgtttagtatgttatgaatcgtaatttttatttggtttgtgagtggcgagcgaggttgaaattgggttatgttttttagattttttaaattaggttatttagttttatttaagaatatttttgttttaattattttgtaaagtagagttatagttagtgagtatgtattttattattattattattgttattattagaaatagggttttattttgttatttaggttggaatgttatggtgtgaatatggttcgatttttcgggtttaagtaatttttttattttagttattcgaatggttgggattatagatacgttattatatttagttaatttttggtattttttgtagagattgggttttattatgttgtttaggttggttttaaatttttgggtttaagcgatttttttgtttttgttttttaaagtgttgggattataagcgtgagttatttcgtttggttgaatatttgtttttgatgatggaagggtttatttttttgtatttttgtaattaatatttgtttttttttaattttttaaataagatttgtttggtgtaatgtttttcgagtttcgttttttttacggttggagtcgggagcggtagggaatgtgtgggtatttcgtttttttttttgatcgtcgttttttattttttgtttttggttgtttttatagttttatttatttttttggttttttgtttgtttttttaaacgaggagtgagtatgtagattataaataatttggtgttttcgtttttttttttggcggtggttgtttttggagtggaaggagatttggtggttagatgtttgatatggtcgggatagttggtgtttttagtatttttggggaaggtttttggggattggatttgaggggattatattaagaagaggggtgagtaggtttggtagtttatttttgtgatttagtttatttttggttgggttgtttggtatgatttttcggttcggtcggtagtagttgcgtaggttaggggagttaaatggttttgtatgtgtaattttagttaaaaagagaaaggggaaagattttgtaattttttaggatatagataattgaaatttgatatttttgttaaggaagtttttttattgagagagagagagagatagagaaggagggagggaggggagtgtgtgagagtttattttggaaggtttcgggagagatagagagaaggagggagggcggggagtgtgtgagaggttattttggaaggtttcggggttagtaggaagttttgagtatagtttttttgtgagtattttatgtgttatttgttttagtttttggtttgagttaggagatgtggttggtttgtttagtgggtatagtagtggcggtagaggttcggtcgttattcgtttttgtttattgggagtcgttgtttttttttttttttgttttttgtgttagggagttagattgtgttgttgagaaaaatgtgttcgaagttttttaattcggttagtaagagttattttttttttttgtcgtttagcgttttgtaaaattaaatgtatgattagagtggaaggagtttagtttgatttgaacgggttagggttatttatttttgtttagttataaggaattgtaggtgtttgttaggttaaagttatagaaatttggggaggttattttgtgattagttttgtgttgggtgtagttttgggggatataggtatgtatgataagtgtttgtttttgaggtgtagtttgttatttggttggagtaataagatttttagttataaggattagtgaacgatatatgaaggagtttttaattaagaatttgaaggtgggatatagttagttagtggttttgggggttcgttttggtgtgttttgtggagaagtttttttttaggtgaaatgttt

SEQ ID NO: 1689 - DNA, 2410 bp, Artificial Sequence
  chemically treated genomic DNA (Homo sapiens)
taagtagggtatatgtgatttttgttagttaaataaataattttttttaggttttttttgtttttgtagagatagggttttgttgtattgtttagtaggagtgtattaatggggatttatagattattgtagttttgaatttttgggtttaagtgatttttttattttagttttttaagtaattgggattataggtttatattattatatttagttaattaaaataaaatgtttggataggtatagtggtttatatttgtaattttagtattttgggaagttgaggtgggcggattatttgaggttaggagttcgagattagtttggttaatatggtgaaatttcgtttttattaaaagtataaaaattagtcgggagtggtggtaggagtttgtaattttagttagttgggaggttgaggtatgagaattatttgaatttaggaggtagaggttgtagtgagttgagattgtgttattgtattttagtttggatgatagagtaagattttgttttaaaaaataaataaataaaaaaataaataaatttttgtttagtttgggcgtagtggtttatatgtgtaattttagtattttgggaagttaaggtgggtagattgtttgagtttaggagtttgagattagtttgggtaatatagtaaaattttgtttttataaaatgtataaaaattagttaggtatagtggtgtatatttgtagtatttgtagtggaaggtttaggtaggaggattttttgagtttgggaggtagaggttgtagtgagttgagattgtattattgtattttagtttaggtaatagaataagattttgttttaaaaaaataattttttttttttttttttttgtagagatggggttttgttatgttgtttaggttggttttaaattgttaattttaagtaatttttttattttggttttttaaagtgtagggattataggtgttagttattgtgtttggttttttttagggttggtgaaattttttgttgtttattttggttcgaggaggtttaggggtttcggagggggattagtagaggtaggtttttggttgagggagagtgagggtgtgtttaggattttgcgggtgtggttagtatttggtgaatgtatagtcgattcgtaggtttagtttttggcgagtatttattgagagcgtttcgttgtggttaggttcgtttaggtaggttatggtattatagatgtttgtgttcgtgatggagttaaatttggttcggaatacggttttttcgttattatgggttttgtttatgacgggtagaatagtattaagaatttgggggtggggagtggttagttgtgatttattttttagatttttgttatagttttttattttattgtgaagtttggttttttttaggaaagaatacgtgtgttcggtttttttttttgtttttgttagatttttttttatttttttttttgtatttgttagatttttttttatttttttgtttttttagaagttttgagtattttataatattttattatatggttttttttatttttatttagaaatatattcgaatattttttttttattttcgtttttttttttaattttttgtttttatttttattaaattaggaaatgttattgttaagtatatgagggattttttagtttttaaatttattttatgtgatacgattttttgttttttaggagggagggtttggaggggtgggtggaaattttaagaggttgaagaaaagatagggaaggaaaaaagaatgaaggggaaaggaaatgggtaagagtaggaaggttacgggtggttttagtttgtggtgggggtagttcgggttaaagtatagtaggggttttggagtcgagatttattaggaaggtcgtgtagtgggattagggtcgtcgtcggagtttggttacgtagtttttttattgggaataagtggttttatttttgaagggagaaagttttatgagttgtttttattttttatttttagatgtaaaggtttttagggaggagtcgttttgtaggggaggagagggtatttgggaagagatagagtgtgatcgtatttgttgagggtgttgtattgtaacgttaggtgttttagttttgttttattgattagtttttgagttacgggtgagagttgggggtataggagtacgggggcgatttatagaataatagtttgaagggtattaagtgagattagtagttatggttattgtgagggtattatggtcggggtaagtatggggtatggggtgtgtatagggagtagttgttatttgtttttttgtagggtttttagggttggttggaggtaggaggtattttggatgaggtaggagatgagtagagcgaggtttgtaaaaggagt

SEQ ID NO: 1690 - DNA, 2410 bp, Artificial Sequence
  chemically treated genomic DNA (Homo sapiens)
gttttttttgtaggtttcgttttgtttattttttgttttatttaggatgttttttgtttttagttaattttgggagttttgtagagaagtaggtggtagttgttttttgtgtatattttatgttttatgtttgtttcggttatggtgtttttatagtggttatgattgttggttttatttggtgttttttagattgttgttttatgggtcgttttcgtgtttttgtatttttagtttttattcgtggtttaagagttggttagtgagatagagttgaggtatttggcgttgtagtatagtatttttagtaaatgcgattatattttgtttttttttagatattttttttttttttgtagggcggtttttttttgggggtttttgtatttgggaatggagaatgggggtagtttatggggttttttttttttagaaatgaagttatttatttttagtaaggaagttgcgtggttaggtttcggcggcgattttagttttattgtacggtttttttagtgagtttcggttttaggatttttgttgtgttttagttcgagttgtttttattataagttaggattattcgtggtttttttgtttttgtttatttttttttttttttatttttttttttttttttgttttttttttagttttttaaaatttttatttatttttttaaatttttttttttagaaggtagggaatcgtgttatatgggatgggtttggggattaagaggttttttatgtatttggtagtagtattttttgatttggtggggatgaaagtagaggattagaagagagggcgggagtaagaagggagtgttcgagtatgtttttagatgggagtaaaggaagttatgtggtggggtgttgtggagtgtttagggtttttggaaaggtagggggatagaggagggtttggtaggtgtaggaaaggggatagaggagggtttggtaggggtaggagagggagtcgagtatacgtgtttttttttggaaggaattaggttttatagtggggtggggagttgtggtagggatttgggaggtgggttatagttggttattttttatttttaggtttttgatgttgttttgttcgttatgaataaggtttatggtggcgagaagatcgtgtttcgggttaggtttagttttattacggatatagatatttgtaatgttatggtttgtttaggcgagtttgattataacgaggcgtttttagtggatgttcgttaggagttggatttgcgaatcggttgtgtatttattaggtgttggttatattcgtagagttttgggtatatttttatttttttttagttagagatttgtttttattggttttttttcggggtttttaggttttttcgagttaggatgagtaataggggattttattaattttgaagaaggttaggtatagtggttaatatttgtaatttttgtattttgggagattaggataggaggattgtttgaggttggtagtttgagattagtttgggtagtataataagattttatttttataaaaaaaaaaaaaaaaaaaattatttttttgagatagagttttgttttgttgtttaggttggaatgtagtggtataattttagtttattgtaatttttgttttttaggtttaagagatttttttatttgagttttttattataggtgttataggtgtgtattattatgtttggttaatttttatgtattttgtagagatagggttttattgtattgtttaggttggttttaaatttttgagtttaagtaatttgtttattttggttttttaaagtgttgggattatatatgtgagttattgcgtttaggttaaataaaaatttatttatttttttgtttgtttgttttttgagatagagttttattttgttatttaggttggagtgtagtggtataattttagtttattgtaatttttgttttttgggtttaagtgatttttatgttttagttttttaattagttgggattataggtttttgttattattttcggttaatttttatatttttagtagagacggggttttattatgttggttaggttggtttcgaatttttgattttaggtgattcgtttattttagttttttaaaatgttgggattataggtatgagttattgtgtttgtttaaatattttgttttaattagttgggtgtggtggtgtgagtttgtagttttagttatttgggaggttgaggtgggaggattatttgagtttaggagtttaaggttgtaatgatttgtgaatttttattaatgtatttttgttgggtaatatagtaagattttgtttttataaaaataaaagagatttaaagaaaattgtttatttagttgatagagattatatatgttttgtttg

SEQ ID NO: 1691 - DNA, 2424 bp, Artificial Sequence
  chemically treated genomic DNA (Homo sapiens)
taaggatttagtaaattttagttattgtttttattaggtcgttaatataaatgtttgatgagtgaatgaatgattttcgtttgggatttggttgtaaataaagtcgagttgtattttagggaggggtggagattttgtttttgtttgtgttttgaagttagtagggttttgttttaggatatttttatttatttttttgtttagtaagtggaggtgaggggcgtggtttggggtttttcgggaggttatggttattgggttattcggagtttgtgtttatatgaggtttggtagagggaggtttttggttatttatttttgtgttcgggtttattattattggtttttgcgttttttggattttgttttgtacgggtcgtatttttttcgtcggttttcgtttatgttttagttttagttttagttttaatagcggtttttttttgttttttttttgatattttttttgtcgtttaggttcgtagttcgagtgtcgtcgttatggtttcgtcgtagttttgtcgcgcgttggtgtcggcgtaatgggtggcggaggcgttgcgggtttcgcgcgttgggtagtttttgtagttgttggacgttttttggtatttgtcgaagttggggcgcgacgcgcgacgcgagttcgaggagcgttatatttcgggcgtcgtttttttcgatatcgattagtgtagcgatcgtatttcgttttacgattatatgttgttcggggtcgagtatttcgcggagtacgtaggtcgtttgggcgtgggcgcggttatttacgtcgtgatttacgacgttagcgattagggtttttatttcgtttcgcgcgtttggtggatgtttcgcgttttcggttattacgtcgtgttattgtttgatggcggttttcgttattggttgcgttagaatttttcgtttagtttcggtaagagttaatttgttttcgtcgagtttcgcgtttagttcgatttcgtttttattaagatttacgaggatattaaggagaatttggaatttcggcgtttttaggtggtggattttcgagttattggtaggtttcgcggtatcgagttcgagtttcgagacggtaacgcgggggaagggggtaggaggtcgtcgggggcgcggtttttacgttttgagtagtgttttggatttgattttttttttatttttttaatttattttgtttttattttttttttttttttttttttttttttttttttttttttttttttttttttttttttttttatttttgttttttttttatagggtttggttttatcgtttaggttggagtgtagtggtataattatggtttattgtagttttaattttttgggtttaggtgatttttttcgtttagtttgattttgtttttaaaggttattgtatgaggtggggaaggagatttgatttttatttgtttcggtgattttgtttgttaagtagaattataatattggtttttttttttttgtgttttgggtagtgattttttttagtttattgggaattttggttgtttaaatagtttttaatttaatattagaggtgtggggggttattgtggaatgttggggggtaggttttagtatgagagaaaaatttagagggatggttttgattagggttatttatgtttttgaggatggtggaatgaaggtagagtcgggggttgtataaaggaaagttttttttagggattaaagtttggagaattgagggtggaagggggattaaatagaagtgggtagggtagagttttttgtttgtgggttggatttttttaggtaagaagtttgtgggtaagttttgtataatgcgaggaggagtttttataaagtaggttggttagtggttacgttagtgtgagttttttaaatatttcgtgtaagtagatattgttattgtatagaggaggaaatggaatttggtttaaggttttaagaaataatttagtcgggatttagattcggtagtttgcgtatttaatagtcgtgagtaattaggaattttttagtttttttttttgtgtttttaagagtgtaagaaattgattattgtttttagagagttttttgaagagtatttttatggttatagattgggtttggagtcgtttgggtttattatgggttagtattgttttggatggtttgagggtaaggattgtttttgttttttatgtattttgaagattagtttagtatttggtatagagtcgatgttttagagaggtttggtgaatatagaaggtttttgttgtatggaattttgtaaagtaatgttggtgttatcggaattataggaaatagttgatatttaattatttttgaatttatataggtgttagttttatgtggtttagtttaatgagagtattattttaattttgttgggtttttt

SEQ ID NO: 1692 - DNA, 2424 bp, Artificial Sequence
  chemically treated genomic DNA (Homo sapiens)
ggagaatttaataggattaaggtggtgtttttattaggttgaattatatgaaattgatatttgtgtaggtttaaaaatggttggatattagttgttttttatggtttcggtaatattaatattgttttgtaggattttatgtaatagggattttttgtatttattaaatttttttggaatatcgattttgtgttaggtattgagttaatttttaggatgtatgaagagtagggatagtttttgtttttaggttatttaaaataatgttggtttatggtgagtttaagcggttttaaatttaatttgtagttatgggaatgttttttagagagttttttaggggtagtggttagttttttgtatttttgaaggtataagagaaagggttggggagtttttggttgtttacggttgttaagtgcgtaggttgtcgagtttgaatttcggttgggttgttttttgagattttgggttaggttttatttttttttttgtgtaatgatagtatttatttatacgggatgtttgaaagatttatattagcgtgattattgattagtttgttttgtggggattttttttcgtattatatagagtttatttataggttttttgtttgaggaaatttagtttataggtagaaggttttgttttatttatttttgtttaattttttttttatttttagttttttaagttttggtttttggaagagatttttttttatgtagttttcgattttgtttttattttattatttttaggggtatgggtagttttgattaggattatttttttgggttttttttttatattggggtttgttttttaatattttatagtgattttttatatttttagtgttggattgagagttgtttgggtaattagggtttttaatgagttagggagagttattgtttaaagtataggaggggaagggttagtattatggttttgtttaatagataaagttatcgaggtaagtggaagttaaatttttttttttattttatgtagtggtttttaaaggtaaggttaggttgagcggggagggttatttgagtttaggaggttgaggttgtagtgagttatgattgtgttattgtattttagtttgggcggtagagttagattttgtgaaaagaaggtaagggtagggaaaagggggaaaggagggaagggaaagggaaggaaaggaaagaaaaaaggaaaggaaatgaaagtaagataaattaaaaaaataaaagaaaggttaagtttagggtattgtttagggcgtagaggtcgcgttttcgacgattttttgtttttttttttcgcgttatcgtttcggggttcgggttcggtgtcgcggaatttgttagtggttcgggagtttattatttggaagcgtcgggattttaggttttttttgatgttttcgtaggttttgatgaaggcggggtcgagttgagcgcggaattcggcgggagtaggttggtttttgtcggagttgagcgggaggttttggcgtagttagtggcggaggtcgttattaagtagtgatacggcgtggtggtcgaaggcgcggaatatttattagacgcgcggggcggagtagaggttttggtcgttggcgtcgtagattacgacgtgggtggtcgcgtttacgtttaggcggtttgcgtatttcgcgaaatgttcggtttcgggtagtatgtggtcgtagggcgaggtgcggtcgttgtattggtcgatgtcgaagaaagcggcgttcgggatgtggcgtttttcgaattcgcgtcgcgcgtcgcgttttagtttcggtaggtattaggaggcgtttagtagttgtagaggttgtttagcgcgcggggttcgtagcgttttcgttatttattgcgtcgatattagcgcgcggtagagttgcggcgaagttatggcggcgatattcgggttgcgggtttgggcgatagggaggatgttagaagggaagtagggagaggtcgttgttggggttagggttggggttggagtatgggcgagggtcggcgggggaggtgcggttcgtgtagggtagagtttagggaacgtagaaattagtggtggtgaattcgggtataaaggtgggtagttaggggtttttttttgttaggttttatataaatataagtttcgagtgatttaatgattatgatttttcggagagttttaggttacgttttttatttttatttgttgggtaggagggtgggtggaggtattttagggtaaggttttgttggttttaaggtataaataggggtaaagtttttatttttttttaagatgtagttcggttttatttgtaattaagttttagacggaagttatttatttatttattaagtatttatattggcgatttaataggaatagtagttggaatttattgagtttttg

SEQ ID NO: 1693 - DNA, 2313 bp, Artificial Sequence
  chemically treated genomic DNA (Homo sapiens)
ttatttttatttggagggtagtgcggtattttagggcgttatttttttagagtcgtttgaggttagtagagaggaagtgttgtaggagtcgtgagtgggcggttcggtttattattgggagtagttgttttgttgatgttggtagggtgtatttgttttaaataaagaatgattagagattatatttgtaatttttacgttatgagtagttgaggtaggaggattacgttaggttaggagtttgagattagtttgggtaatatagttaaagtttatttattttttaaaaaaatttaaaaattagttaggtgtgttggtatatgtttgttattttaattgtttaggaggttgaggtggattatttgagtttaggagttcgaggttgagtgatttattattatgttattgtattttagtttgggtgatagagtgagatttatttttaaaaaaaaattgttttagaaatgaatagttaggtttttaaagtttgttagtttttgagggtcggggaaggcgggtgtttggagaatagttattttttggtttagtttggttagagtttgtattatagtgttttaggtttagttaggttgttagttttgggttgggaggagggcgaagggtcggttaaggagatttttttttatattgtttttttatttttgtttagtagttgtaggagaattagtttttttgatatttagggggagaaatttagaattaagagtagaaggtagaaatgaaaggatttttttagtgaaaggttagagtggttttttttgtttttgtttaaaaatggtttgtgttgaattatgataaggttaaatgtattaaggtagtagaaatagggggagggtagggggagggtacggggacggtttttgagaaatagaggaataggttaggtcgtagggtttcgggggtagtacgtgttttaaaggtggtgaggggaggggcgatattattagggtagggtttagtttaggtatgtttcggtggataggggagttgttaggattaagttggatggagttaggtcgttttgtggtttttggggagggtttttagagggttgtcgggcgaagggagttttttttaaaacggttttttgagttttgatgtatatatatgtagtttatttttaagtttagcgttttattagtttatcgtttcgttttttttagtatattcggtgcgtagtcgcgattagtttaatcgtggtatttttttatcggttttgagttttggcgtgtttttttacgatattttttgggtacggagttgtgtcgataggtttttgtgattggttgggtatgttttcggggtttgttcgcggggtagcgtgttttagagtttggttgtacgaagcggtgttgacgggtaaattcggttttgttttttttttcggcggttgagggttggtttcgcgttttatttgttagtgatgggatcgtgttgtcgtggacgttcgtgtcgaggtttgtgtgtggatagcgtttagattttttggttgcgcgttcgggcgtgtgttgggtttatggattttgcgtttagttttttgaggagtcgtcggttgtttgtagtggtcgtattatatacgttttcgttagcgacgcggagggtttgatttttttcgatttagtagtttatggtgtttgtttttagtggtcgtcggcgcgaggcgggttcgtgtttcgtttagttgaggtttacgttttttcggtgttcggcgttttggtatgagtttattggtcgtgtgtggtttttttttggagaaatgtttaaaggttttttgtttaatcggtttttttttttttatggtggagttgtgggagttttgggtatattttgggtataggattttttagggacgtggtttgagagggagttttgtggtgggttgggtttgtgttttgtttgatttggggttgtgtgggtgttgatcggggtggggttggttttcgggggtagtttagaagggtttttgtttattttttatatagtttaggattgtggtatagtagtttgtttagatttgttgtgtgatttgaattttgtgttttttgttttgtgttttttggggtttgtagcgttgtttggaagtttttttttgttcgttttttagttataggaggtttttttttgggttgtagaatttatagagttagacgttttttgggtttttagcgtttttttgtataagtggggaaattaggttatggggtttaggtagtgtggaaggcgttgtaggagttgtttagggtgtggggttttttagttttagtgaagagtggtattggggtttgttatagg

SEQ ID NO: 1694 - DNA, 2313 bp, Artificial Sequence
  chemically treated genomic DNA (Homo sapiens)
tttgtgataggttttagtgttattttttattgaggttggaggattttatattttgggtaatttttgtaacgttttttatattgtttgggttttatgatttagtttttttatttgtgtaggggggcgttgggggtttagggggcgtttggttttgtggattttgtagtttagagggaggttttttgtaattggagaacgggtaaggaggagtttttagatagcgttgtaggttttaggggatatagggtaggaggtatagggtttaggttatatagtaggtttgagtaagttgttgtgttatagttttgggttgtgtggggagtggatagaggtttttttgagttgttttcgagagttagttttatttcggttagtatttatatagttttaggttaggtaggatataaatttagtttattataaagtttttttttaaattacgtttttgaaaagttttgtatttagaatatgtttagaatttttataattttattatgaagaggaaagggtcgattaaataaggggtttttgaatatttttttagagaagagttatatacggttagtgagtttatgttaggacgtcgggtatcggggaaacgtgaattttaattgagcgagatacggattcgtttcgcgtcgacggttattgagagtaaatattatgagttgttgggtcgaggggaattagatttttcgcgtcgttggcgggagcgtgtgtgatgcggttattgtaaatagtcggcggttttttaaagagttgaacgtagagtttatgggtttagtatacgttcgggcgcgtagttagggggtttgagcgttgtttatatatagatttcggtacggacgtttacggtaatacgattttattattaatagatggaacgcggaattagtttttaatcgtcggagggagagataaaatcgggtttattcgttaatatcgtttcgtatagttaaattttgagatacgttgtttcgcgggtaaatttcgaaaatatgtttagttagttatagagatttgtcgatataatttcgtgtttaggggatgtcgtggaggggtacgttagggtttagggtcggtggaaaggtgttacggttagattggtcgcggttgcgtatcgaatgtgttgggaagaacggaacggtagattaatggaacgttagatttgggggtgagttgtatgtgtgtgtattagagtttaggaaatcgttttggaaaggatttttttcgttcggtagttttttgggaattttttttaggagttatagggcggtttggttttatttagtttggttttggtagtttttttgtttatcggagtatgtttgggttgggttttgttttgatggtgtcgtttttttttttattatttttggagtacgtgttgttttcgaggttttgcggtttgatttgtttttttgttttttaggagtcgttttcgtgttttttttttgttttttttttgtttttgttgttttagtatatttggttttgttatagtttaatataaattatttttaaataaaaataagagaaattattttgattttttattgagaaaatttttttatttttgttttttgtttttgattttgaatttttttttttaaatgttagaggggttgatttttttgtagttgttgggtaggggtggggaggtagtgtgggaagaagtttttttagtcggtttttcgttttttttttaatttagggttggtaatttggttgggtttggggtattgtggtgtagattttggttaggttggattaaagaatagttgttttttaggtattcgtttttttcggtttttagaggttggtaggttttgggagtttggttgtttatttttaaaataatttttttttagagatgagttttattttgttatttaggttggagtgtagtggtatgatgatgggttatttagtttcgagtttttgggtttaagtgatttattttagttttttgagtagttggaatgataggtatgtgttagtatatttggttaatttttaaatttttttgagagatagataggttttagttatgttgtttaggttggttttaaatttttggtttgacgtgatttttttgttttagttgtttatgacgtgaggattataggtgtgatttttgattattttttatttgaaataggtgtattttgttagtattagtaagatagttgtttttaatggtaggtcgggtcgtttatttacggtttttatagtattttttttttgttggttttaggcggttttggaagaatgacgttttaagatatcgtattgttttttaggtgggggtgg

SEQ ID NO: 1695 - DNA, 2410 bp, Artificial Sequence
  chemically treated genomic DNA (Homo sapiens)
aattgtttgggaaattttattatagtttttggggataagatttgtggtttgttttgttttgaggggtaggagaaaagggggtaatggttcgtaggggtagacgggtaggagtagagtagggggcgaaggtatatttagaatggtaaggaaggggggttagtcgtgagatagtaggggaaggttcgttgttgggttttaaagatgtttggtagaaaaaattttaggttggaaaagtaagcgagagaagttggagggtggtatgtgggagatagttgggggtttatttttgtattgttagttttagttttttatttttatttggatgatgaggtttgagatatttttattgttatttgggagaggttttgggaagggaagattttatagagttatgaggggattaatttttttggtgaattaagttttttgatatttttagagttgcggtgttttgggattttagttttgaaggagaaaggaaggaaggaaaagaggaaaggtttatgtagataatttttttaggttgttgagttttaatagatagtttttgtttttgttttatttaagaagtttaggtttagaagatattaattaaggaaattttcgttaggaagtttggggtagggagagttgttggtttgattagggtatagtcggtaaaagtttttataagatagttatttatagatatgtttaagaattagtatatagtttttaattagagatttttaaaatgaaatatttagggttatatataggaaaagtacgtatatatatatatatatatatatatagatatttatttttgtgtttttttggttatgttgacgagtttttttggtgaagttcggggtttatagagtaatttttgtagataattgtggtttttgtttttggtgtttgtaggaggtaggtatgttgtgtttttttaagatagatggtttagggtattttggtaggatttattaggaaatttatggagaagggaaaagggataagattagtaatagtgaagggagggagaatggtgggagaggattttagatgaacggtgggtcgttggaggttgagtatgttagtaggatgttagtttttagagtaaagtttatgttaaatagttaacgtttgttttttttgtttttaggattattttttcgtacggggagtattttttatattaatattattatgttttcggtgttcggtattatttgttttttgggtattatcgggaattttacggttattttcgcggtcgtgaagaagtttaagttgtattggtgtaataacgttttcgatatttttattattaatttttcggtagtagatttttttttttttttgggtatgttttttatgatttattagtttatgggtaatggggtgtggtattttggggagattatgtgtatttttattacggttatggatgttaatagttagtttattagtatttatattttgatcgttatggttattgatcgttatttggttattgtttattttattttttttacgaagtttcggaagttttttgtggttattttggtgatttgttttttgtgggtttttttttttattagtattatttttgtgtggttgtatgttagatttattttttttttaggaggtgtagtgggttgcggtatacgtttgtttaatttagatattgatttttattggtttattttgtattagttttttttggtttttgttttgttttttgtggttattatagtcgtatacgtgaggattttgtagcgtatgacgtttttagtggttttcgttttttagcgtagtattcggttgcggataaagagggtgattcgtatagttatcgttatttgtttggttttttttgtgtgttgggtattttattatgtgttatagttgatttagttgtttattagtcgttcgatttttatttttgtttatttatataatgcggttattagtttgggttatgttaatagttgttttaatttttttgtgtatatcgtgttttgtgagacgtttcgtaaacgtttggttttgtcggtgaagtttgtagtttaggggtagtttcgcgttgttagtaacgtttagacggttgacgaggagaggatagaaagtaaaggtatttgatattttttttgttattttgtatatttttaagttagggtattataatacgttatcgggagagatgttgagaaaaatttaagatcgttcgggaaatgtaggaaggtcgggttgtgaggggttgttgtaatgaaataaatatattttatggggtttatacgttgttggggaggtttggagttaggtttggggtttttagatattagaaatttttttgggggagtaggatgagatttttggatagaatagaagttgagtaagagaatatgttggtttggataatcggttg

SEQ ID NO: 1696 - DNA, 2410 bp, Artificial Sequence
  chemically treated genomic DNA (Homo sapiens)
taatcggttatttaaattaatatgtttttttgtttagtttttgttttatttaaaggttttattttgtttttttaaggggatttttgatatttgaaaattttaaatttgattttaggtttttttagtaacgtgtgagttttatggaatgtatttattttattgtaataattttttataattcggtttttttgtatttttcgagcggttttgggttttttttagtatttttttcggtggcgtgttgtggtgttttgatttggaggtgtgtagggtggtaggggaagtattaggtgtttttgttttttgtttttttttcgttagtcgtttgagcgttgttgatagcgcgaagttgtttttgggttgtaggttttatcgataggattaagcgtttgcggaacgttttatagagtacgatgtatataaaggggttgaggtagttgttggtatagtttaagttgatggtcgtattgtataagtagataaaggtgagggtcgggcggttgatggataattgggttagttgtagtatatagtagggtgtttagtatataaagaagattagatagatggcgatggttgtgcgggttattttttttgttcgtagtcggatgttgcgttgggaggcgggggttattgaggacgttatgcgttgtaggatttttacgtatgcggttgtgatgattataaaaggtagggtaaaggttaggaaaaattggtatagggtgaattagtagaggttagtgtttgggttgggtaggcgtatgtcgtagtttattgtattttttgggaaggggatgagtttggtatatagttatataggggtgatgttgatgaaggagagggtttataggaggtagattattagggtggttatagagggttttcggaatttcgtggaagagatggggtggatagtggttaggtagcggttaatggttatggcggttaggatgtaggtgttggtgaattgattattggtatttatggtcgtgatgagggtgtatatggtttttttaaagtgttatattttattgtttatgagttggtggattatgaagggtatgtttaggagaaagaggagatttattatcgagaggttgatgatgaagatgtcggggacgttgttgtattagtgtagtttggatttttttacgatcgcgaagatgatcgtggagttttcgatgatgtttaggaggtagatggtgtcgaatatcgaaggtatgatgatgttgatgtaggagatgtttttcgtgcgaggaggtgattttggggatagaaggagtaagcgttggttgtttgatatgggttttgttttgagaattgatattttgttggtatgtttagtttttagcgatttatcgtttatttggaatttttttttattattttttttttttttattgttgttaattttgtttttttttttttttttatgagttttttggtgaattttattagagtgttttgagttatttgttttggaaggatataatatgtttgttttttgtaggtattagaggtaagaattatagttgtttgtagagattattttgtgagtttcgggttttattaggaaaattcgttagtatagttagaaggatataaaagtaagtgtttgtgtatgtgtgtgtgtgtgtgtgtgcgtgttttttttatgtgtagttttgagtgttttattttggagatttttggttggaaattgtgtattgatttttgggtatatttgtgggtgattgttttgtagaggtttttgtcggttgtgttttggttaagttagtagttttttttattttaggttttttagcggggatttttttgattggtattttttgagtttgggttttttgagtgaagtagagatagaaattgtttgttggagtttagtagtttggaaaaattatttatataagtttttttttttttttttttttttttttttttttaaagttggaattttagggtatcgtagttttggaaatgttaggaagtttaatttattagaaaagttaatttttttatggttttgtgaagttttttttttttagggttttttttaggtggtagtaaggatgttttagattttattatttaagtgggagtaaaaagttgaggttaatagtgtaggagtgagtttttagttgttttttatatattattttttagtttttttcgtttgtttttttagtttggaattttttttgttaagtatttttggaatttagtagcgagtttttttttgttgttttacggttggttttttttttttgttattttgaatatgttttcgttttttgttttgtttttgttcgtttgtttttgcggattattgttttttttttttttgttttttagagtaaagtagattatagattttgtttttaagaattgtgataaagttttttaagtagtt

SEQ ID NO: 1697 - DNA, 2494 bp, Artificial Sequence
  chemically treated genomic DNA (Homo sapiens)
agtttatgggagtttttgaattatatagaattatagtatatagtaaataatatattaaatttttgttattttattgggttttgtttatagatttatttaggtattattgtggttttttgggttttttttattttaatttttattttaagttattattattgaggttgattaataaaaatataatattaaatttttttatttttgaggttttttttttaaggggaggtagaaatagaatattttttatcggggagggaaaggggtttaataaaaattggtataattagttaaatattgatttcggttaggttttttttgtgtttatgggtttagttttggttggttgtttttttttagggagtttttttttatttcggggtttgaggtggtattaggagggggttgggggcggttagtattagcggcgttttgtttagtttttttgtagggagcgagtaggtaggtaagtcgttgggcggtgggacgttattatcgtaggaaatcgcgaatgaatttttagagtttggtgatttataggttggcgtcgaggtttattaggtattggatttcgggcgtgagtatgcgtcggtagagttgcgcgtgtcgttgttcgatgttttttttgaggttgtagtttaggatggatttggtgtttagcggttgttagggttgtatggtttcgttttggatggcggcggcgtttacggcgtggttttcgtcgatgtagatggttcgtatgcgttcgttggtatggcgtagggcggttatttcgcgggttatgcgttttcgttcgaaggtttttattttgcgttagaagttggcgttgaagtggcggtagaggtgggagtttagtatgttttaggcggtggcgcgtttatatagttttttcgagagtcgcggtacgggcgagtcgcggcgggcgttgagtttgaagtagagtacgttttttagtttttagtatagtaggttttttagtagtattagcgattcgtcgaagtatttttgaaggagtattaggtggaagcgacgttttatttttaggatgtgtttttgtatttgcgggttgttggggtttaggttgttgttatagtttaggtcgaagaagagtaggtttcggaggtagtgggtattgaagtcgttggggtcgtagtagcgattcgggttttgtaggaattcggttagtttgtcgtcggtcgagagtttttacgtgaggggtattatcggttcgaagtagtggaaggaggattcgaataagcgggcggggtcgcggagtatcgtgatgaagatggcgttggtcggtattaggtcgcgtatttcgtcgtagtggaagcgtatgtggttgtagatgatgttgaagtaggtttcgggtcgatagttttgtattaggttgcgggcgaagaaggtcgggtagtcgaagttattgcggtcgttagggaaggcgaatttgagtcggtgtttttggtcgaagcggaataggatgttgagtagggtgttgttggtcgttttgtgcgtttttaagaatacgatgttgcgtcgcggttggtattttttcgtcgagtcgttggttcggattattgtttttggttcgagtgtaggtggagagtaggacgttgcggttttcggggttttgttggggatagagaggtggggagagttttaggggggtgttggggtttttaggattttggtagttagagagggagattattgggaatagtggtggtaaaggagttgggatagtgagatttgtggggtttgagtttaggttgggtgtttgcgcgggtggtttggtttttttagttttatgttttttttttgtgaaatggggacgataataggttttatttacggtgttgtgagatgaggtatataggttttttttttatttatggttattgtgttgtatgtattatgaattagtattagtttgggttatatgaaattgttattttataggataaaaatggtttatttttgtagaaatttgtagttttttttgtgttaagttaatattattaattattggtattgtattagttataggttgtgttgggtttgtgtagagtagttttatgaggaaacgggagagtttggtttttaggagttgggtttggagttagatcgattcgtttgaatttatgtttatggataggtcgtttttattagggtttcgttggtattttagatgatgtaaatttgagttttgtatagatagtgttatttgatttttatgttttatgaggaaggttttgggttttttttgtttgtttgtttttttttttgttttgagatagttttatttcgttggtttagtttggagtatagtggtgttatttcggtttattgtaatttttgtttttcgggtttaagtaatttttttgttttagatttttaagtagttgagattatagatatatattattatgtttagttaatttttgtatttttagtagagatggggttttattatgttggttaggttggtttcgaattt

SEQ ID NO: 1698 - DNA, 2494 bp, Artificial Sequence
  chemically treated genomic DNA (Homo sapiens)
gagttcgagattagtttggttaatatggtgaaattttatttttattaaaaatataaaaattagttgggtatggtggtgtgtgtttgtaattttagttatttgggagtttgaggtaggagaattgtttgaattcggaaggtagaagttgtagtgagtcgagatggtattattgtattttaggttgggttaacggagtgagattgttttaaaataaaaagaaaaataaataaataaaaaaaatttagagttttttttatagagtatgagaattaggtaatattgtttgtatagggtttagatttgtattatttgagatgttaacggggttttggtgggggcgatttgtttatgggtatggatttaaacgggtcggtttgattttaggtttagtttttgagaattaggttttttcgtttttttatggggttgttttgtatagatttagtatagtttgtagttggtgtaatattagtggttggtgatattaatttgatatagaggaaattgtaaatttttgtaaaaatggattatttttgttttataaaatggtagttttatgtggtttaagttgatattgatttatggtatatgtaatatagtggttatgaatgagaggagagtttgtgtgttttattttataatatcgtgaatagggtttgttatcgtttttattttatagaagaggaatatgaggttagagaggttaaattattcgcgtaggtatttagtttggatttaggttttataggttttattattttagtttttttgttattattgtttttaataatttttttttttaattattagagttttgagggttttagtatttttttgaggttttttttatttttttgtttttagtaggatttcggaggtcgtagcgttttgttttttatttgtattcgagttagaggtagtgattcgggttaacggttcggcgggggagtgttagtcgcggcgtaatatcgtgtttttgaagacgtataagacggttagtagtattttgtttaatattttgtttcgtttcggttagaagtatcggtttaagttcgttttttttaacggtcgtaatgatttcgattattcgatttttttcgttcgtagtttggtgtaggattatcggttcggggtttgttttaatattatttgtaattatatgcgtttttattacgacgaggtgcgcggtttggtgtcgattaacgttatttttattacggtgtttcgcgatttcgttcgtttgttcgagttttttttttattatttcgggtcggtggtgttttttacgtggaagttttcggtcggcgataagttgatcgagtttttgtaagattcggatcgttattacgattttaacggttttaatgtttattattttcgaaatttgttttttttcgatttgggttatgataatagtttggattttagtagttcgtaggtgtaggagtatattttggaggtggagcgtcgtttttatttggtgtttttttaagagtatttcgacgagtcgttggtgttgttgaaggatttgttgtgttgggagttggaggacgtgttttattttaagtttaacgttcgtcgcgattcgttcgtgtcgcggttttcgggggagttgtatgggcgcgttatcgtttggaatatgttggatttttatttttatcgttattttaacgttagtttttggcgtaaggtggaggttttcgggcgggagcgtatggttcgcgaggtggtcgttttgcgttatgttaacgagcgtatgcggattatttgtatcgacgggggttacgtcgtggacgtcgtcgttatttaggacgaggttatgtagttttggtagtcgttgggtattaagtttattttgggttataattttaagaagagtatcgggtagcggtacgcgtagttttgtcggcgtatgtttacgttcgagatttagtatttgatggatttcggcgttaatttgtgggttattaagttttggaagtttattcgcgattttttgcggtggtgacgttttatcgtttagcggtttgtttgtttgttcgttttttgtagaggggttgagtaggacgtcgttggtgttggtcgtttttagtttttttttggtgttattttagatttcggggtgagggggggttttttggggggaggtagttagttaagattgggtttatgaatatagagagggtttaatcgagattagtatttaattaattatattagtttttattaaattttttttttttttcgataaagaatgttttatttttgtttttttttaaaggggagattttagaagtaaaggaatttgatgttgtgtttttgttaattagttttagtggtggtgatttggggtgggggttggggtggggggaatttaagagattatagtggtgtttgggtgagtttgtgggtagagtttaatggggtggtagggatttgatgtgttatttgttatatgttatagttttatatggtttagggatttttatgagtt

SEQ ID NO: 1699 - DNA, 3457 bp, Artificial Sequence
  chemically treated genomic DNA (Homo sapiens)
aaaaattagtcggatgtggtggcgggtgtttgtaattttagttattcgggaggttgagatagaagaatcgtttgaattcgggaggcggaggttgtagtgagtagagattgcgttattgtattttaatttggtgatagagatgtcgtttaaaaaaaaaaaatgtaaggattattgtgaaattcgtatgttaatgtaaaatattatttgtgcgtttagaagataaagtgatttttttttttagaaaaggtaaaacggtttaagggagcgtgagagtcgtggatttgattaatttggtttagtgttttgtgtcgttttttagttgtaggatttgagaaaacgtatttgaaaattcgttaagtttcggttttttgattatataaggttatatttttttagaagttgcggggaggtttatatattattatcgcgtcgggtatatagtaggcgtcggttttagtttttttgttttcgttcgcggagtttttagcgtttagtcgaggttatagcgagttgaattgaatttaaggttcgtattaaatttataggtatttgggggcggagtattcgtaggcgcggttttcggcgcgcggtttagttttttttatatgtagatgaaaattacgatttaaacgtttttatggtggaaattagaagacgcgtagggaaaatagggacgcggaaattgtcgggaagcgtaggggttgataagtagtttggtttaggtcgttttacgagcgttttttcgcgggagtagcgttttcgaggtcgttagcgagttagaggaaggtagggcgtattcgttttttagtaagaacgcgatgtattcgggcgcgacgacggtttaggtagtttttaggaggttgggatattagttcggtcgttttttttttttcgcggtttttcgtttcgttttcggttttgagtggcgagtggttcggttagaattcggacgtttttatttgagcggggtttatagtatagtatttgcgggcggggcggttttggagtttcgtagtcgcgcgcgtcgttcgttagtaaagtttacgcgtcgcgtcgagcgtagttatatagttttacgtagttattcggtcgtcgtcgtgcgtacgtgtacggcgtgcggtttttttttttcgcgagttcgttcgttgtatagttaattagcggtcggcgcgcgcggtattacgggagttgtagttttgtaagcgcgcggagttcgtcgggcgtttatggaattcgattcgtaggttaaaggggtttcgttgtaaggaagaagtgcggggtttcgtcgttttttagatcgagatcgcggtgagttggtcgcggcgtataatgggtacggtttgggcggcggcgttcgtattatcgttttgtgtttgcggatttcggtaatattgcgcggtaggttttaggtcggttttttttagtttcgcggattgtttgggtcgggggttttaattttgattttagggtcgggtcgttggggtagatttttagtgatgtttaggttttttgggtttttgttagttaagggacgttcgtcgcgcgttaattgttaagttttttattgtttttgtaaatttgttgacgtttttttagcgtatagggagattgcgtacgtgagttcgttttcgcgcgtattgcggagaggtagaggtacgaatgtagtataaggtataaaatgattattttagagagggttagatgattaagttagtaaatatttagggaatacgattgtgttcgttgcgcgtttttcggagtagatataagggtgaatgaataaagaatggatttcggttattgaaagtggagaggtagtcgatttcgttcgtggaggtttttagtagagttggatttggtagtttttcggttatgaggggagattttgttggaggaaagaggtttttatttttatcgtttgaaatgtgtaggatgtttttagattttttggtttatttataggtatagttatgttaaaaacgcgggattttataatgtatttagtattagtagagagggagtcgaggatatggatagagattgtattagtttatatattagtaggttagggtgcggtggtttatttttgtaattttagaattttggaaggttaaggtgggaggaaaatttgagtttaggagttttagattagtttgggtaatatagggagattttttttttattttaaaaataataaaatagggtcgggtgcggtggtttatatttgtaattttagtattttgggagattgaggcgagtggattaggaggttaggggtttaagattatttagttaagatggtgaaatttcgtttttgttgaaaattgtaaaaattagttaggcgcggtggtaggcgttttaagttttagttattcgggaggttgaggtaggagaatcgtttgaatttaggtagtagaagttgtagtgagtcgagattgcgttaatgtattttagtttgggtgacggagtgagatttcgttttgaaaaaaaaaaaaataataataataataataaaatgaagaagtagttagcggtgttttttggtttttagttttgaagggtaagattttaatttagtttaattatagttaattagaatttggaagattaatttaagttagttaaatttataatagttcgatatttaaattttgttaggggatatagttttttaggattgtaatgtttttaattttttttttttattaaattatttagaaattgatttagttattagaaattttttggtatgatggtttttaaatatgtttatagttttttttgataatcggttttttaaaagtatagttaggcgcggtggtttatatttgtaattttagtattttgggaggttaagttaggcggattatttgagattaggagtttaagattagtttggttaatatggcgaaattcgtttttattaaaaatataaaaattagttcgttatgtatttgtaattttagttatttgggaagttgaggtaggagaatcgtttgaatttgggaggtggaggttgtagtgagttgagagcgtgttattgtattcgagtttgggtaatagagtgagattttattttaaaaaaaaaaaaaaaagaaagaagaaaaaaaggtcggttatagtggtttatgtttgtaattttagtattttgggaggtcgaggtaggtggattatttgaggttaggagttcgtgattagtttggttaatatggtgaaattttgtttttattaaaaatataaaaattagttaggtatggtggtgtgtgtttgtaattttagttatttgggaggttgaggtaggagaattatttgaatttgggaagtagaggttgtagagagttgagttgagattgagttattgtattttagtttgagcgatagagcggaattatgtttttaaaaaaaaaaaaagttggagttgggtgggtatggtggtttatgtttgtaattttaatat

SEQ ID NO: 1700 - DNA, 3457 bp, Artificial Sequence
  chemically treated genomic DNA (Homo sapiens)
gtgttgggattataggtatgaattattatatttatttaattttagttttttttttttttggagatatagtttcgttttgtcgtttaggttggagtgtagtggtttaattttagtttagttttttgtaatttttgttttttaggtttaagtgatttttttgttttagttttttaagtagttgggattataggtatatattattatgtttggttaatttttgtatttttagtagagatagagttttattatgttggttaggttggttacgaatttttgattttagatgatttatttatttcggttttttaaagtgttgggattataggtatgagttattgtgatcggtttttttttttttttttttttttttttttttttgagatagagttttattttgttgtttaggttcgagtatagtggtacgtttttagtttattgtaatttttattttttaggtttaagcgatttttttgttttagttttttaagtagttgggattataggtgtatgacgagttaatttttgtatttttagtagagacgggtttcgttatgttggttaggttggttttgaatttttgattttagatgattcgtttgatttggttttttaaagtgttgggattataggtgtgagttatcgcgtttggttatgtttttgaggagtcgattgttaaaaaaaattgtgggtatgtttaaaagttattatattaagaaatttttaatgattaaattagtttttaggtagtttaatagaaggaagggattaggaatattgtaattttagagagttatgttttttggtagggtttaagtgtcgggttattgtgagtttgattgatttgaattagttttttaaattttgattagttgtagttgaattgaattaagattttgttttttaaagttgaggattaaaggatatcgttaattatttttttattttattattattattattattttttttttttttaagacggagttttatttcgttatttaggttggagtgtattggcgtaatttcggtttattgtaatttttgttgtttgggtttaagcgatttttttgttttagtttttcgagtagttgggatttgaggcgtttgttatcgcgtttggttaatttttgtagtttttagtagagacggggttttattattttggttaggtggttttgaatttttgattttttgatttattcgttttagttttttaaagtgttgggattataggtgtgagttatcgtattcggttttattttattatttttaaaatagagaaggggtttttttatgttgtttaggttggtttggaatttttggatttaagttttttttttattttgattttttaaagttttgggattataggggtgagttatcgtattttggtttgttaatgtgtgagttagtgtagtttttgtttatattttcgattttttttttgttagtgttaagtatattgtagggtttcgcgtttttagtatagttatatttatgaatgggttaaagaatttgagggtattttatatattttaaacggtgggaatggagattttttttttttagtagaatttttttttatgatcgggggattattagatttagttttgttaagggtttttacggacggagtcggttatttttttatttttagtgatcgaaatttattttttgtttatttatttttgtgtttatttcgggaaacgcgtagcggatatagtcgtgttttttaagtgtttgttgatttagttatttggttttttttggagtagttattttgtattttgtattatattcgtgtttttattttttcgtagtgcgcgcgggggcggatttacgtgcgtagtttttttatgcgttgggagggcgttagtaggtttatagaaataatgaaagatttaataattggcgcgcgacgagcgttttttgattggtaggggtttagaggatttgaatattattaagggtttgttttagcggttcggttttgaagttaaggttgagattttcggtttagatagttcgcgaagttgagggaggtcggtttggggtttgtcgcgtaatgttatcgggattcgtaggtatagggcgatagtacggacgtcgtcgtttaggtcgtgtttattgtgcgtcgcggttagtttatcgcgatttcggtttaggaggcggcgggatttcgtattttttttttgtaacggagtttttttggtttgcgggtcgagttttataggcgttcgacgggtttcgcgcgtttataggattataattttcgtgatgtcgcgcgcgtcgatcgttgattggttgtgtagcggacggattcgcggggggggggggtcgtacgtcgtgtacgtgcgtacggcgacggtcggatggttgcgtggggttgtgtggttgcgttcggcgcggcgcgtgggttttgttggcgggcggcgcgcgcggttgcggggttttagggtcgtttcgttcgtaggtgttatgttgtgggtttcgtttaggtgaggacgttcgggttttggtcgagttattcgttatttagggtcggaggcggggcggggagtcgcggggaaggaggggcggtcgggttggtattttagttttttgggaattgtttggatcgtcgtcgcgttcgagtgtatcgcgtttttgttggagggcggatgcgttttgtttttttttgattcgttggcggtttcggaaacgttattttcgcgggagagcgttcgtgggacggtttgggttaggttgtttgttagtttttgcgtttttcggtagttttcgcgtttttgttttttttgcgcgttttttgatttttattatgaggacgtttgggtcgtgatttttatttgtatgtggaggaaattgggtcgcgcgtcgggagtcgcgtttgcgggtgtttcgtttttaagtgtttgtgggtttggtgcgggttttgggtttagtttagttcgttgtgatttcgattgagcgttggaggtttcgcgggcgggagtaggagggttggagtcggcgtttgttgtgtgttcggcgcggtagtgatgtgtgagttttttcgtaatttttgagaaggtgtgattttgtgtggttaggaagtcgaagtttgacgagtttttaagtacgtttttttaggttttgtagttgggagacggtataggatattaaattaggttggttagatttacggtttttacgtttttttgggtcgttttgttttttttggaaaaaggaattattttgttttttaaacgtataagtaatattttatattaatatacggattttatagtaatttttgtattttttttttttagacggtatttttgttattaggttggagtgtagtggcgtaatttttgtttattgtaattttcgtttttcgggtttaagcgatttttttgttttagtttttcgagtagttgggattataggtattcgttattatattcggttaattttt

SEQ ID NO: 1701 - DNA, 2424 bp, Artificial Sequence
  chemically treated genomic DNA (Homo sapiens)
tttaattgtttttatagttattagggtagaaaaaattgagattaggggtagggtataaaggagaatatatttatgttttatttgtataattataaattaatgttaaaaagaatgtaaagttaggtttagggtagggatgaagaggttgtagatgtttttaagtattggaaagttttggttttttggttttatgtttttttttttttttttttttttttttatttttgagatagggtttttttttgttgtttaggttggagtgtaatggtacgattttggtttattgtaattttaaatttttcggtttaagcgatttttttattttagtttttcgagtagttgggattataggcgtacgttaggtggtttagttaatttttgtattttttaaaatttttttgagacggagtttcgttttgtcgtttaggttggagtgtaatggcggaatttcggtttattgtaattttagttttttgggtttaagcgattttcgtgttttagttttttaagtagttgggattataggcgcgcgttattacgtttagttaatttttgtattttttgtagagacgggtttttaatatgttggttaggttggtttcgaatttttgattttaagtgacgcgttcgttttagttttttagagtgttgggattttaggtggagttatcgcgtcgtatttttcgggtttttttttaattcgggtttttgggttttttaggttttcgttttttttttttacgtcgtttcgcgttcgttttagatttttttgggattcgtcggtttggcgttttggttcgttcgagttttacggtttttcgggttttaatttcggcggggtaggtatttttttaggaagtttcggagtaggttgtcgttgtataggtggtttaggttggcggtttttgatcgaaggtcgcgtcgggttagtgtgtagttcgtggttgagaggcggttgttgaggggtcgggcgggttaggggtcggttagtcgtcgttcgtttttgttttgtatatttatgaagtttagcgaggtcggtcgtttaggttagtcgtggacgggttatgaattatttatgaggaaatttttggtttcgtttagaaaggtttcgttgattatttatgagtcgaggagcgggtttgggtcggaaaaggtcgttgattttcggtgggagggaagcgtcgacgagttgaggtgagggttgttgagacgcgaggtttcggtttagagagggtattcgggcgttgttagttttgtttttatgttaaaaaataatttttttttttttttttattatttaaggttttaagttggatttgaaagtattatatttcgtgagggtttaaagtattgtgaagagaatcgggagggtagggggttgaggaggaaggtaaaagggaggcgattttttttagaattggatagagagtatttaggtagttttgaaatttagatttttttggatatgaaattaaatttgttgagtaagtagtagttataatgagttatgatgaggttggtagggtagacgatgtttgtgttcgatattggagggggtcgtgtgtggtggagttttggggaagtttattttatttgggttagattttttttagttattgaggttttttgttaggatcgatgtttggtataggttaagaggtgagagaggtggggataagatatttcgttttttttgattttagttttttttttattttagtgaggatttgttaattaatttttatggattttagttttttaaatagagggagagagttttgaattttaggattagttaatcgttaaaatgtgttcgagtacgtagggtattggataggttgtgtagtatatcgtgtatttagttggtagaaatgaggggtggttttggtttttaaaggggtttttaattttagtaggattataatttaattttttttttattggattattaatttgttgaggtaggaatagtattttatatttcgtaattttgtatgttgttgtttggtatattgtagttgtttcgtagatgttgaatgaatgaataattgaaatagtatgaaaaagatattaaaaagttaaaagagtatgaataaatatttaattaatatagtggaagttattttttttgaatgagtataggtaggggaattattagggttaaatggaatttgttaaaatggtgaataatttattgaagtaagttttgttggaaggtttaagtaattgggcgaattttggtaaattaagtttttttgtttagttttattttttttttttttttttttttttttttgtgagatggagtcgagttttgtgttaggttggagtgtagtgacgtaattttagtttattgtaatttttatttttcgggtttaagcgatttttttgttttagttttttatgtagttgggattataggtg

SEQ ID NO: 1702 - DNA, 2424 bp, Artificial Sequence
  chemically treated genomic DNA (Homo sapiens)
tatttgtagttttagttatatgggaggttgaggtaggggaatcgtttgaattcgagaggtggaggttgtagtgagttgagattgcgttattgtattttagtttggtatagagttcgattttattttataaaaaaaaaagaaaaaagaaaaggaaagtgaggttaagtaagggaatttggtttgttaaagttcgtttaattatttagattttttaatagagtttgttttaataaattatttattattttaataaattttatttggttttggtaatttttttatttgtgtttatttagagaaaatggtttttattatattaattgagtatttgtttatgtttttttgattttttaatattttttttatgttattttaattatttatttatttaatatttacgaggtaattataatgtgttaggtaataatatgtaggattacgagatgtaaaatattgtttttattttaatagattgatggtttaatggaggagaaattagattatgattttgttgagattaaaaatttttttaggggttagaattattttttatttttattagttgagtatacgatgtattgtatagtttgtttagtgttttgcgtattcggatatattttggcgattggttaattttgaggtttaagattttttttttttgtttagggaattaaagtttatagggattaattggtaaatttttattaaagtgaaaggggagttgaggttaaggggggcggggtgttttgtttttattttttttattttttggtttgtattaggtatcgattttggtagaaaattttaatggttggggagaatttgatttaggtaagataaatttttttaaagttttattatatacggttttttttaatgtcgggtatagatatcgtttgttttgttagttttattatggtttattatggttgttgtttgtttagtaagtttgattttatgtttagaaaaatttgaattttaaaattatttgggtgttttttgtttagttttgggggaaatcgttttttttttgtttttttttttagttttttgttttttcgattttttttatagtattttaggtttttacgaaatatgatatttttaaatttaatttaaagttttaagtaataagaaaagaaaaaaaaattgttttttgatataaagatagaattaataacgttcgagtgttttttttgggtcgagatttcgcgttttaatagtttttattttagttcgtcgacgttttttttttatcgggggttaacggtttttttcggtttaaattcgtttttcggtttatgaatagttaacgaggtttttttgggcgggattagaggtttttttatgaataatttatgattcgtttacggttagtttgggcgatcggtttcgttagattttatgaatatgtaaagtaggggcgaacggcggttagtcggtttttagttcgttcggttttttagtagtcgttttttagttacgggttgtatattgattcgacgcgattttcggttaggggtcgttagtttgggttatttatataacgatagtttgtttcggggttttttgaggaggtgtttgtttcgtcgaggttaggattcgagggatcgtggggttcgggcgggttaggacgttaggtcggcgggttttagagaggtttgaggcgggcgcggggcggcgtaggggagggaagcgagagtttggggggtttagggattcgagttagaagaaggttcgagaagtgcggcgcggtggttttatttgggattttagtattttgggaggttgaggcgggcgcgttatttgaggttaggaattcgagattagtttggttaatatgttgaaaattcgtttttataaaaaatataaaaattagttgggcgtggtggcgcgcgtttgtagttttagttatttgggaagttgaggtacgagaatcgtttgagtttaggaggttgaggttgtagtgagtcgagatttcgttattgtattttagtttgggcgatagagcgagatttcgttttaaaaaaattttaaaaagtataaaaattagttgggttatttgacgtgcgtttgtagttttagttgttcgggaggttgaggtaggaggatcgtttgagtcggggagtttgaggttgtagtgagttaagatcgtattattgtattttagtttgggtaatagagggagattttgttttaaaaataaaaaaaaagaaaagaaagaaaaaagatataaggttagaaggttagagttttttaatatttgagggtatttgtaatttttttatttttattttggatttgattttgtattttttttaatattaatttgtaattatgtaaataaaatataaatatatttttttttgtgttttatttttaattttagttttttttgttttggtaattgtgggagtagttggg

SEQ ID NO: 1703 - DNA, 2371 bp, Artificial Sequence
  chemically treated genomic DNA (Homo sapiens)
ttttaggttttttatgtggttgttggttagaagtatatttgataaggtgtttcggttgttttggtcgtttttatatgaagtttgtttagttaaggtatttttaggggtttaatgagaagggaattgtggttgggtgatttcgaaggtgatgggaaagacgttgttttttatttataaagttgttagggttagttggggaaaagtagaggaaagggaaattataagaaagtagatttaaagaaatagaatttgaaagagttttttaggttgttgtttagaatatttggaattaagttaatgggtatggagggagagtagttgttaagttattttttggtacgagttttgagagtcgtttgagggagttggagtagacgtcgtgggattttttttttgagttattgtagtttttttttggagtcggttcggggtggcggtttaaatatggaaatgtggtttgaattttttttttagtaatcgttgttgggttttagtttttttttgtgaggcgggtagttgagcgaaatgaaattataatatttaattataatattgcgagtgttagatattgcgttgagttttgtatgtggatttttttaatttttaaaataattttagaggtggtaatgattgtatttattttatagatagaataattggttagagagggtgtgtgtgtgttatttaaggttacggagttagtaagggtatcgggtgagaatttgaatttagagttattggttttttaattatagcgtttttttgttgagtagggataagtatttatttttttagttttttttgtagttagggagttagaatattttgggatcggaaattgttgtttggatgattttagttagttatttcgtttcgtagacggggaaagtgagaattagagaaggtcggtgattggtttaaggttacgttgtgttttatattttttttttattttcggacgtttagttttttaatagttttagtatagagttggggaaaaatttttagagatatttttttgggaagatagttggaaggtagggttgagtcggggttatttgtgatttagcggtgaggtgatgaggtattgacgaaagtattgtattttttttttttgagaaacgttttggtattagatgagttttgggggagggaggagaggaatttggtagggatttggttataagttatttggagggtggcgtgaggatcggaaaagtcgttgttcgttttgtttggttttattttttgaatgaggttattgaatgtgtacgggaggtttagcgttgttttattttagtttgatggagaaattttattcgaaattttaaagtagggtagggatatttttattagatatttttgtagtttttgttttgtgggacgaagtaagggatgatgatatattcgtttgtttattcggaagtgagttttaggttattgtattagaagggtgataatttaatataagttattgttaagtaattttcgcgtgtttagtatttatatttttttgttttattttgattattatattgtataggagttattatttttatttttcgtttttatttatagatgaggatatcgagatttagagagttttttgttttgttttgttttttgagatggagttttgttttgttatttaggttggagtgtaatggtacgattttagtttattgtaatttttgttttttgggtttaagagatttttttgttttagttttttgagtagttgggattataggtatttgttattatatttagttaattttgtattagagatggggttttattatgttggttaggttggtttttaatttttgatttcgtgatttatttgttttagttttttaaagtgttgggattataggtatgagttatcgcgtttggtttgttttattttttgttttgtttgtttgttttgttttgtttttagagatagggtttggttttgttttttaggttagggtgtagtggtgcgattatagtttattgtagttttaaatttttgggtttaagtaattttttcgttttagtttattaggaattggaattataaatgtatgttattatttttagttaatattttttttttttggaaaaatgaagttttattatgttgtttaggttggttttaaatttttgggtttaagtgatttttttgtagtgttgggattataggtatgagttattttgttcggttaattttagagagttttgatgaagttataaaattttgattatggagttagaatttaaatttaggtatgtgaggtttgagtttaggtttttattagggttattgtgttgtaattgttattattttttggtattttaagtgatattcgagtattatttaagggaa

SEQ ID NO: 1704 - DNA, 2371 bp, Artificial Sequence
  chemically treated genomic DNA (Homo sapiens)
tttttttgaatgatgttcgggtgttatttgaggtgttaggaagtggtggtagttgtagtatagtggttttggtggaagtttgggtttagattttatatatttagatttgagttttggttttatggttagaattttgtaattttattaaaattttttgagattggtcgggtagagtggtttatgtttgtaattttagtattgtaggaggattatttgagtttaggagtttgagattagtttgggtaatatagtgagattttatttttttaaaaaggaaaaatattagttggggatggtggtatgtatttgtagttttagtttttggtaggttgaggcgagaggattgtttgagtttaggagtttgaggttatagtgagttatggtcgtattattgtattttaatttggaaaataaagttagattttatttttgaaaataaaataaaataaataaataaaataaaaaataaaataggttaggcgcggtggtttatgtttgtaattttagtattttgggaggttgaggtaggtggattacgaggttaggagttggagattagtttggttaatatggtgaaattttatttttaatataaaattagttgggtgtggtggtaggtgtttgtagttttagttatttaggaggttgaggtaagggaattttttgaatttaggaggtagaggttgtagtgagttgagatcgtgttattgtattttagtttgggtgatagagtaagattttattttaaaaaataaaataaaataaaaaattttttgggtttcggtgtttttatttgtaaatggaggcggggggtgagaataatggtttttgtgtagtgtagtggttagaatgaagtaagaaaatgtgaatattgagtacgcgagagttgtttagtaatgatttgtgttaggttgttatttttttgatgtaatgatttgagatttattttcgggtgggtaggcgagtgtgttattattttttgtttcgttttataggataaaggttgtaaaagtatttggtgggaatgtttttgttttgttttgggatttcgggtaggatttttttattaggttggagtggggtagcgttgagtttttcgtgtatatttagtgattttatttaggggatgagattaaatagaacgggtagcggttttttcggtttttacgttattttttagatggtttataattagatttttgttaaatttttttttttttttttttaagatttatttgatgttaaagcgttttttaaaagggggaaatatagtattttcgttagtattttattattttatcgttgggttataaatgatttcggtttagttttgttttttagttgtttttttaaggggatgtttttgaagatttttttttagttttgtgttggggttgttggggagttggacgttcgggaatgagaggaggatatgggatataacgtgattttgggttagttatcggttttttttggtttttatttttttcgtttgcgaaacgaggtagttggttgaggttatttaggtagtagttttcggttttagggtgttttggttttttgattgtagggagagttgggaagatgagtatttgtttttgtttagtaggagagcgttgtggttaggaagttagtggttttgggtttaaatttttattcggtgtttttgttggtttcgtgattttaggtaatatatatatattttttttgattagttattttatttgtaaagtgggtgtaattattgttatttttggagttgttttaaggattaagaggatttatatgtagaatttagcgtagtgtttgatattcgtaatattataattaaatattataattttatttcgtttaattgttcgttttatagagagaaattgaggtttagtagcggttgttgggaagaggatttagattatatttttatgtttgagtcgttatttcgggtcggttttaggaggaagttgtaataatttaggggaaaagttttacggcgtttgttttagtttttttaggcggtttttagagttcgtgttaagagatggtttggtagttgttttttttttatgtttattagtttagttttagatgttttaggtagtagtttggggagtttttttaggttttgtttttttggatttatttttttgtagttttttttttttttgtttttttttaattggttttggtagttttataaatgaaaaataacgttttttttattattttcgaaattatttaattatagttttttttttattagatttttggaaatgttttggttagatagattttatgtagggacggttaggatagtcgggatattttattaaatgtgtttttgattagtaattatatgaaaggtttagag

SEQ ID NO: 1705 - DNA, 2500 bp, Artificial Sequence
  chemically treated genomic DNA (Homo sapiens)
ttttggagaataggatacgtggagggttaggaaggggttaggtttagagacgggagattttttttcggagtaggtggaggtataggattattcgttattttatttgtcggtatttgcgggggagtttaggtattttttgtaagtttttttgattatttggtttaaagaaaatagaagtatggaggtcgttaagtatttttaagaaataattttatgaatatggtattatttttttagaaagaggggtttggggtaggtagaggagagaagggagattaaattgagagttaagtttttagacggttttgtaggaggagaggatgtagttgtttagagggaagtaggattatatttaaggaagtgtgtggggtttttggatgatattagtatttagtgcggttttgtttggtaatcgtttttaaggtggtaggagtgggtgttttttgtgtgttagtgggtagtttttgttgaatttatagtttattggggagtttgatagtggggttatgtgtttgatatttttttttgtttgtggatttggtaaggtagggagtagaaaatagagttatttgaaggttttttgtttgcgtttgtgtgtagtgtggatttagttgtgttttttatttgttgggagagtatagttattatttataagtagtgttattttcgtgggtggcgaggatagaataggagtttttgttttttgtatttatttgggttcggtgggtttttttgttttggtttttatttttgttttagcgattatttagttttgtataggaatatatgttgtttagaaaagttaaatttagtttttgtttttgttttttttggttttatgatgtgtatttgttattttgaaattggaaattagtttattaatgtttgtgttaattttttattttttttttaatttttttttttatacgattttttatttatgtaggatgtgtgttgtttaatgatgggatgattatatttttttatgttttaaaagtgttttttttttatagggttttagggttggtggttgttttgggtttatagttacgttttattcgttttttgttttaatagtttgtgtggtggtaaagtcggtgtggggttggggaacgtagcgttttttaggaggggattcggttttttttttgtagtgtaggcgaaggtttagatgttagtgtgattttttataaggcgtggtttttagatttttcggtcggaagtgatgtttttttgtcgcgggttttgggtttgaagtagtttggtttttttttggtaagtggttggtgttttagtagttgtaatttgagtttagttatttatatattatcgtggtcgatatttttattaaaaagttttttgagacgatttgcgtgtatgttgattttatgattagcgtcgttgggaagaattttagagtcggtggggtggggttggaagtagtaggtgtagtgatagggttgggtgtttaggaggttttagtgtttaattaggttaaggtggttaagtttaggttgtagggaaggtcggtttggggggtgtgggtgagtataggtaggtattagttgggtagtgttaggatgttggagtagtattcgtaattttattgagtggggtagtttggttggggtagggatcgttgttgttttggtagagagagaggatttttattggggagaggttgttttgattttgtaggtgggatagggatagatggttattagggtgattcggttggtttttttttgttatgttaagttttgggatatggaggatttttgttatatagtttgggttcgggtttttatttgtggttatcgttttggtatgagttttttagttttgggtggtttttgtttggttcgggatttggtgttgttgttgagtttagtttttttgttattttcgtatgggtcgtgggtggtgatgttagttgttttttattttggttttagtagtttatttagtttataggggagttgttttgggttggagatgggtatgtattttgggttttatttgaatgaatgtagtttgaggagattcggttatatatattgggttataggttattttcggtaatgtttatattagtcgttagtttgagtttttttaggagagtaaggtttatacgataaaggttgttcgtggttagtgaggtggttgagtttagttaggatttttttcggattttcgggatgtggttttgttcgtgagttgtttggttagttttttcggggtgagaggggtttgttatacgggtttttgtttgtagtgtgattttttttagttttttttagtagttttgtttgtagagtgttattattattatgattatttttttgatattgcgagggtcgggggacgttttgggtagagatagggttcgtggtagtagtaggtttaggggcgttttatattggtgggttggggatttggtggagattacgttaagggttggataaggggacgagtttttattttggttttttcgtaggtt

SEQ ID NO: 1706 - DNA, 2500 bp, Artificial Sequence
  chemically treated genomic DNA (Homo sapiens)
ggtttgcggagaggttagggtggaggttcgtttttttgtttagtttttggcgtggtttttattaggtttttagtttattagtgtagggcgtttttgagtttgttgttgttacgggttttgtttttatttaggacgtttttcgattttcgtagtgttagggaaatgattatggtggtggtgatattttgtaggtagggttgttgagagaagttgagaagggttatattgtaggtaggggttcgtgtgataagttttttttatttcgagagagttgattaggtagtttacgagtagagttatatttcgggagttcgagaaaggttttggttgggtttagttattttattggttacgggtagtttttgtcgtgtgagttttgtttttttggggaggtttaggttgacggttgatgtgggtattgtcgagggtaatttgtggtttagtgtatatggtcgggtttttttaagttgtatttatttaagtaggatttagggtgtatgtttatttttagtttagggtagtttttttgtaagttgggtgagttattgaagttaaggtgggaggtagttgatattattatttacggtttatgcggaggtggtagaaaggttggatttagtagtaatattaaatttcggattaggtagaaattatttaagattgaggggtttatgttagagcggtggttataggtaagaattcgggtttaggttgtgtggtaggaattttttatgttttagggtttagtatagtaaaggaagattagtcgggttattttggtggttatttgtttttgttttatttgtagagttagaatagtttttttttagtggggattttttttttttgttaaagtaatagcggtttttgttttaattagattattttatttagtggagttacggatgttgttttagtattttaatattgtttagttggtgtttgtttgtgtttatttatattttttaggtcggttttttttgtagtttgggtttggttattttggtttgattgagtattgaggttttttgggtatttagttttattattgtatttgttgtttttagttttattttatcggttttggggttttttttagcggcgttgattatgaagttaatatgtacgtaagtcgttttaggaaattttttaatgaaagtgtcggttacggtggtgtgtaggtggttgagtttagattgtagttgttaagatattagttatttattaagagaaagttaggttgttttaaatttagggttcgcggtaaaaaagtattattttcggtcggggagtttggaagttacgttttgtgggaggttatattggtatttaggttttcgtttgtattgtagaaggagagtcgggtttttttttggagaacgttgcgttttttagttttatatcggttttgttattatataggttgttgaggtaggaggcgggtaagacgtagttgtagatttaaagtaattattagttttgggattttgtgggagaggagtatttttagaatatggaaaagtgtggttattttattattagatagtatatattttatataaataaaaagtcgtatggggaaggaggttggggagggaataaaaaattggtatagatattgatagattggtttttagttttaaggtaatagatgtatattatgagattagaggaggtagagataagggttggatttggtttttttaagtaatatgtgtttttgtgtagggttgaatggtcgttgagatagagatggaagttaggataagggagtttatcgggtttagataggtatagagagtagaggtttttgttttgttttcgttatttacgagggtgatattgtttgtaaatggtggttgtgtttttttagtaagtaaaaagtataattaaatttatattgtatatagacgtagatagaaagtttttaagtagttttgttttttgttttttgttttgttaggtttataagtagagaggagtgttaggtatatggttttattgttaggttttttagtgagttgtgggtttagtaggagttgtttattgatatataggggatatttatttttgttattttgggagcggttgttagatagagtcgtattgggtgttggtgttatttagggattttatatatttttttaaatgtgattttgtttttttttgggtagttgtattttttttttttgtaggatcgtttggaaatttggtttttagtttgatttttttttttttttttgtttgttttaagtttttttttttaaaaaagtgatgttatgtttatgggattattttttgaaaatatttggcggtttttatgtttttgttttttttgagttaggtggttaggagggtttataaagaatgtttgggttttttcgtaggtgtcggtagatggggtagcgaatggttttgtgtttttatttgtttcgggagggagtttttcgtttttaggtttggtttttttttaattttttacgtattttgttttttagag

SEQ ID NO: 1707 - DNA, 2431 bp, Artificial Sequence; identical to SEQ ID NO: 1667
  chemically treated genomic DNA (Homo sapiens)

SEQ ID NO: 1708 - DNA, 2431 bp, Artificial Sequence; identical to SEQ ID NO: 1668
  chemically treated genomic DNA (Homo sapiens)

SEQ ID NO: 1709 - DNA, 2451 bp, Artificial Sequence
  chemically treated genomic DNA (Homo sapiens)
taattaaagatttttttaaatttagtagggattagtaaatatttatagaagattagagattttttgtgagtgtaaagggtttagagtgatttgatgttatagattaaattttatggtttttttaaatttatgtgttaaaatttaattttttatatgatgggatttggaggtgaggttttggaaggtgattagattatgaaagtagagattgtatgaatgggattagtgtttttattaaagggattgttgagagtttttttattttttttgttatgtgaggatatagtaaaaagatggtagtttatgaataaggaaggaagtttttattagatacgaaatttgttgacgagttgattttggattttattatttttagaagtatgagaaatgaatttgtttttttgttatttagtgtagtgtattattttttggtatttagattggttatagtattaatatattaatttgtatacgtaatttttgaaattttgatgttaaatttttgatggtaataggtgattgatttgttggaggaatggattgatatgatttttttttttataataaattagagagtaaaaataagtaaaagtaggttaaggttttttaaaagtcgtatttgaaaggtttttagtaatagttgattagatggtaatttaattatataaataattacggtaaagatatataattattagatatttttagaatagtttttaaaataatatttgataatattagggagttaaagaaggtacgaatttttaaaaagttaaattttatttaaatgttattgtagaaatttgtaattttaatattatggatgaattttagggtaggtggtggtatggtatggcgatttgggggtataagtgttgagttttgaagtttcggttttgatattttttggagatgttttttggtttttatatttttgtttatttgttaagaagagtttgttttgggtagtattttagggataaatagtttagaagtttagttgagggtagatttttaaggttggaggaagaagtcgtttttgggagtaggaggagttgttggattttttttttttaggtttttttttttgttttttagcgttttttgtaggtaggtaaataattttagtaggagtagtagtaggttttttagtcgtagggttgtagttttgttgaatgagagaagtttttttttggcgagttagaggagcgtaggttatatattcgggtttttatttttatgttttttattgtgtttaggattgagtttagcgtgggagatgcgggttggggtcgtgttggttatttttttttttttattttttgttttagttatgtttttagttttagggttgaggttagtggttagagtagattttatgatgttaggtagttttttattgggttggtttttggtaggattaggataggggtaggagggatttggagttgttgatagttttagttttgtttttgaaggggggtttttttttggtgttggtattggtttattagttggcgttggaattttttgtgttgttgtatatggaataggagatgaaaaagaagaaagatttattaacgttagttattttttattggaatttttatatatagaattaatttcgttgaatgtaaggtattttagttcgaaaatattgtttttgtaaaggtttatagattataggttattttatcgtgtgtttgtgtttcgatgaattttagaggttttagttggataagaataatgtgtagatgtggtcgcgatgggattatcggtggggtttggtttggtagggtttgttttgggttgttttgtggtatttgggggcgtttttgtttaaatggttagaggcgtttggagtgagagatgagtgaggtattgttttttataagagggtattagttgcggggattcgtttatagattttgatttaaatgacggatgaataaaacgtatattgatatagagttattttgttttgttagttttgttgagtgttttattgtttgtatattaagagaggtttgttattgtagttggtcgtgaatagttcgtattgtaggtatttatttagtatagaatttataacggaagttttgagtaaatatttttgtggataattaatatggttaagagagtagttttattaatgattaaagtttaggtattatggtttaaagtaaatattattgggggtaatttttcgggtttatttttttttttttttttaagaggattatttggtttaaaggttagttaatggaagtagggtaaatagatttaattggggaagtttttattgtttttaatatttattttatgagttaatgttttaagataagaagtagttgtttttagtttgtttaattattataagttatgtaattttttcgttttttaaaaggtttgtgattattttttgtaattttttttaatatttttttttaa

SEQ ID NO: 1710 - DNA, 2451 bp, Artificial Sequence
  chemically treated genomic DNA (Homo sapiens)
ttaaagggaaatattagggaaagttatagggaatagttataaattttttggaaggcggaaaggttatatagtttgtaataattgaataggttgaaggtagttgttttttattttagagtattagtttatagggtaaatgttagggataatagaggtttttttagttaagtttgtttattttatttttattaattagtttttgagttagatagtttttttggggaggaggggggaggtagattcgggaaattgtttttagtggtatttattttaaattatggtatttgagttttaattattggtagaattatttttttaattatgttaattatttataagagtatttatttaaagttttcgttgtaaattttatattaaataaatgtttgtagtgcgagttatttacggttagttgtagtgataaattttttttggtgtgtaggtagtgggatatttagtaggattggtaaagtagaataattttgtgttagtgtacgttttatttattcgttatttgggttagggtttgtgggcggattttcgtagttaatgtttttttgtgaggggtaatattttatttattttttattttaggcgtttttggttatttgggtaaaggcgtttttaagtattatagggtagtttagggtaggttttattaggttaggttttatcggtgattttatcgcggttatatttgtatattgtttttgtttagttggagtttttggagtttatcgaggtataggtatacggtgaggtggtttatagtttatgagtttttgtaggggtagtgttttcgggttggaatattttatatttagcgaggttgattttgtgtgtgaaaattttagtggaaagtgattgacgttggtgagtttttttttttttttattttttgttttatgtgtagtaatataggaaattttagcgttagttgatgagttagtgttagtattaggggaagatttttttttagggatagaattggagttattagtagttttagattttttttgtttttgttttggttttgttaaggattagtttagtgaggagttatttgatattatgagatttgttttagttattggttttagttttggagttgaaagtatggttggagtaagaggtggaagagagggggtggttagtacggttttagttcgtattttttacgttgggtttagttttgggtatagtgggagatatggaggtagagattcgggtatatggtttgcgtttttttgattcgttagagagaggttttttttatttagtagagttgtagttttgcggttgaagggtttgttgttgtttttgttggggttgtttgtttgtttgtaagaggcgttggggggtaggaaaagaaatttgggaggaggggatttagtagttttttttgtttttagaggcggtttttttttttaattttggaggtttgtttttaattgggtttttgggttgtttgtttttgaggtgttgtttaggataggttttttttgataggtgggtaggggtgtggaggttagggggtatttttaaagggtattaaaatcgaagttttaaaatttagtatttgtgtttttaaatcgttatgttatgttattatttgttttagaatttatttatagtgttaaaattataagtttttataataatatttaaataaagtttgattttttgaaagttcgtgttttttttaattttttaatgttgttagatgttgttttagaggttattttgaaaatgtttgatagttgtgtatttttgtcgtggttgtttgtgtgattgaattattatttaattaattgttattggaaattttttaggtacggtttttagaagattttgatttatttttgtttgtttttattttttggtttattgtggaaagagggattatgttagtttatttttttagtagattaattatttgttgttattaaagatttggtattagaattttaaaaattacgtgtataagttgatatgttggtattgtagttaatttgggtgttaaaagataatgtattgtattaggtagtagagaaataaatttattttttatgtttttggagatggtaaaatttaaggttaattcgttagtaggtttcgtgtttgatgagggtttttttttttgtttatagattgttatttttttattgtgtttttatatgatagaagagatgagggagtttttagtagtttttttgatagggatattgattttatttatatagtttttgtttttatgatttaattattttttaaggttttatttttaaattttattatatggggaattagattttaatatatgaatttgaggggattataagatttggtttatagtattaggttattttgagttttttgtatttataagaaatttttaattttttataagtatttgttggtttttgttgggtttagggaaatttttaattg

SEQ ID NO: 1711 - DNA, 2402 bp, Artificial Sequence
  chemically treated genomic DNA (Homo sapiens)
ttgtttttgtaggttgagttttggagtttttttgtgttcgggatggagttggagtttatttttttgatttttattcgggagtagtggagttttgagtttttttgaatattggggaggatgggtgtagacggattgtgtatttttgttttttttgttaatttggtgggtaggtgttgagtttataaggttttagaattttataacgaagttagggtgtttggtgggagtttagggagttttagttgttgtttatttttttttttttttaaaaagtttgtttatttgtggcgtggggattattattagtggggagtggttaaggtaggttaggtagggacgtagtttataagtttcgtggtattttttttttttttgtggatttttggggtgatttttttgtttttgtttttgttttttagaaatgtttttattaatttgagcgtggtggtttacgtttgtaattttagtattttggaggttgaggcggggtagattatttttggttaggggttcgagattagtttggttaatatggtgaaattttatttcgattaaaaatataaaaaatgagtcgggtatggtggcgtttgtttataaatttagtaattcgggaggttgagttgggagaattatttgaatttagtggagattgtagtgagttaagatagtattattgtattttagtttgggtgataaagtgaggttttattaaaaagaaaaagaaaaaaaaagttttaatttgtgtgttttgtttttttttaggattaggtttgttaggtagtagtgggagttgattttttagtagatttataaattgaaagttgaattggatgttatgttttttcgagaagatgtagacggtacggtagggtgttgatagtaggtttatgtagagttttagggttatgttgagatatatgttaggttttatagttgtagttggttagttatagatttgggtttatgtttggttagagtttttggttttgtgtttttttcgatttgggtttaggattttgtattttggaattttttgtttttttttgtgttgttataaggttaggaagtttgtaatttttatagtattaaggattttaaggaggtttaggagtaggttggtagaggttcgtggtaaaggtgtggtagtcgtgattttatttttttttttttacgtgtgtttgtgtttcgtggcgttattttatagatattttgtttgagaagggattatgtttgggaatttttagggtcggattttgattgtagaatttgacgaaaggggttttgtagggtttagaatgaggaggaggtaatgagaattatttttggaggattttagaagtagaggttgggagtatttataggtgaatggagtttgaattatgattagaaaggaattgggagaaagagatataggaatttgggagtttcgggagtagtggggatattattattaggaagttagggggtattcggtaatgaaagtggtagatgtaataaaatttttaatatattgttgtataatgtataataatgtaataaaaatatattttttatatattattgttttaattttagttttatttattgttttttttatatgaatttttttttttatattttattttttagttaattttaattaggttttttgtttatattagttatattaagtttagttgtttattttattttgtgattaggatgagtatttaatttgaaatatgtatttatcggtgtattatgtatagtggtttaaatagttttatatgaagttattttagttattatttttttattagttttattaataagtggtttatttaatttgtatatatttattggaatagaagaatttttttggttgtttttattattatgatttttggttataatatgatttatttttatattagtagaaattagtcgagtttttttagatttaatagagggggaattagaattaatttcgggttttaacgtcgaatatgttgtaggtttatttgttttgttttttatagtagattatataaatattattataataaatgttttgaaggtcgtaagaggttcgtgggtgtagtgtataggagattatatttggggatagtagttgtagtagattttaagttgggttatttttgttatttgttaggtggtgtttggcgaaggtaagtagtttttattcgttcggggaatatagcgcgattttcggcggtatgttttttagtattattttaggaggtattaggattatttattattggaaatttttgatggagtgttgaaatttattcgtgattaaaatatttttaagggatttgtttattattttcggggttattagttttgttagtgatgatttttttaacggaagttagttagagttatttgagtaatagttt

SEQ ID NO: 1712 - DNA, 2402 bp, Artificial Sequence
  chemically treated genomic DNA (Homo sapiens)
ggattattgtttaggtggttttggttggttttcgttggggggattattattggtagggttggtgatttcgggaatggtgggtagattttttgggagtgttttggttacgggtaagttttaatattttattaggaatttttagtggtagatgattttggtattttttggggtggtgttgaagagtatgtcgtcgggggtcgcgttgtatttttcgggcgggtgggagttgtttgttttcgttaagtattatttggtaagtggtagggatggtttagtttggggtttgttgtagttgttgtttttagatatggttttttgtgtattgtatttacgaattttttgcggtttttagggtatttattataatgatatttatatagtttgttataaagaatagggtaaatgggtttgtagtatattcgacgttaaagttcgagattaattttgattttttttttgttaggtttaaagaggttcggttggtttttgttagtgtggaaataagttatattatggttagaggttatgatggtaggagtagttagagaaatttttttgttttaatgagtatatataaattaaatgaattatttattaataggattgataggaggataatagttagagtgattttatatgagattgtttgggttattgtatatagtgtatcgatgagtgtatattttaaattagatgtttattttgattataggatagagtagatagttaggtttgatgtggttaatataaataggaggtttagttaagattaattagagaatggggtatggggagagggatttatatgaggagggtaatagatagagttagagttggaataataatgtatagggggtgtatttttattatattattgtatattatataataatatgttaaaagttttattgtatttgttatttttattgtcgagtgttttttgattttttggtggtggtgtttttattgttttcgaagtttttaggtttttgtgttttttttttttaatttttttttagttatagtttaggttttatttatttgtggatgtttttagtttttatttttagaattttttagggataatttttattgttttttttttattttggattttgtaaagtttttttcgttaggttttgtaattaaagttcggttttgggaatttttaggtataatttttttttagatagggtgtttgtgaggtggcgttacgggatatagatatacgtgagagggggagagtagggttacggttgttatatttttgttacgggtttttgttagtttatttttgggtttttttagaatttttgatgttgtgagaattgtaggttttttggttttatgataatataaagggaaataagaggttttagaatgtagggttttgggtttagatcggagagggtatagggttagggattttggttagatataggtttaggtttgtggttggttagttgtagttgtggggtttggtatgtgttttaatatggttttggagttttatatggatttgttgttagtattttgtcgtgtcgtttatattttttcgaagaagtatgatatttagtttaatttttagtttgtggatttgttgaaaggttagtttttattgttgtttggtaggtttggttttggggggaggtaggatatatagattggagttttttttttttttttttttttggtagagttttattttgttatttaggttggagtgtagtggtgttattttggtttattgtaatttttattgggtttaagtgatttttttagtttagtttttcgagttgttgggtttataggtaaacgttattatgttcggtttattttttgtatttttagtcgagatggagttttattatgttggttaggttggtttcgaatttttgattaaaagtgatttgtttcgttttagtttttaaagtgttgggattataggcgtgagttattacgtttagattgataggggtatttttgagaagtagggatagagataagggaattattttagaggtttatagggaaggaaaagatgttacggggtttgtaggttgcgtttttgtttagtttattttagttattttttattaatgatagtttttacgttatagatgaataggttttttgaggagaagggggaatgaatagtagttgggattttttgggtttttattaggtattttggtttcgttgtgggattttaggattttgtgaatttagtatttgtttattaggttggtaaagggggtagaagtgtatagttcgtttatatttattttttttagtgtttagaaaggtttagggttttattgttttcgagtgagggttagaggggtgggttttaattttatttcgagtatagagggattttaaaatttagtttgtaaaagtag

SEQ ID NO: 1713 - DNA, 2500 bp, Artificial Sequence
  chemically treated genomic DNA (Homo sapiens)
aatatttgtacgtttagtagtaatggggttttattgtgttgtttaggttggtttcgaattcgtgattttaggtgatttgtttatttcggttttttaaagtgttgggattataggcgtgagttattatgttttatttttattcgttttttattataggagttaaagaatattttttttttggtttgcgttttttttttttttttttttttggttttattaagatattttaagatgagtttttgttatttttatttgaaaaagttttgattagtttattttttcgaattaattagaagatataaagtagagtttatttttttggaaatgggttttttatttttttttttttttttttttttttagtttggaaattttttttttttatttttgtttgttttaggttttattggttatgatcgttttttattgttgggttttagtttttttttttttttataaattttttttttttttagatgaaaagattaatattgaaaaggtaagttgatgtgtttcggtttgtatagagttttggaagtagagttgggatttgaattttgggtttttgattttttgtttagggttttttattttggtagagtaggagattaattttttttttttttttttttttaaatgaagtttttatatatagttatttatatatgtataagtagtttttaaggttagagaagttaattttaaattttagagttgtggaggttttatagattatatggagttttagttagtgattaaatttgaggtaatagtatttggaggtttagttttagtattgaggggagttggagggaaaaattaagttaagagtaaaattttttcgttttgaaaataatagtggtataatataatatttttggattgtgggaaataaaatggagagggatatgattagaaggaaatttttagaattttattaattttacgttttttaaattggtataattggtgataattttagagttatttgttatcgtattaaagtttgatagagaaggatgatttataggagtagttttgttgtgtttgaggattgtttgatatttgaaatgagtttcggattagtttttggttgaagtttatttaggtttttttcgcgaaggttaagttattagagttaattattatttttgttttattttgtttaaatatcgtcgtcggggttgataattgtatttagtgaatatttgtattggaattcggagtatttatttttttttatttgtagtttgaggaattttgattttttggtgatttttagaagtttttggacgtagttgttcgtgaggcggatttgttcgtcgtcggtttcggggttggacgatacgttcggagttttagggaggtcgcgaggagtttgtttttcggttaggaagtgatcgttgtttgcgtcgcggtttttaaggataatttttgggcggtaattatttttttttatttaggagattaatttttttgttgaggttttatttaaggttgtagtatttatttattgaggtttttaagaaatttgtttgttttaggaaattttttattgagatttgtttcgtattgttatttggtggtaagatataaaaatatattttttacggtgggattagattgcgcgtttgtttcgtttttatttcgtttttttttcggtggtggggtagagggatggtggaaagggaattaagagttagtttttagaagtgtaggtatttgggattgagattggagtggggttatatttttttttttgtttttagtattagttatagttttgttattgtgtttttagttttttttttttttgtagatattggttatttgtgaaattaattgtattttttttttgtattgttttttaggatatttggaattagcgtatagtttattgttagtaattggatagaatcgtatggtaggaatttagaagaggagtttaatttttgagtttatatttttttttttgggttttatttttttattttattttatatttagttttttgatgatgtttaggatatttttttagttattttaatttttttttttgtaagggataggagggataaagtaaggttatatatttagaaagagtttgtttattttttgtaagttttagtttttttttttataaagtgggtataagaatttttgttttggagggttttgtgtgtgttttaggagatgttggattaatattagtgtttattttattttttatttttttattttttaggttttttgttagttatgtgatgtaggttaggatgtaaaggagattaatagtatagattattttttttttagtgttatttgtgttttgtaggtttagtgggtgtttttattagagttttgtattttgagtttagtttttatttgttttttggaagatgttggttttagaattttttgttttttttttgtaggtattgtggtatttatagttgatttgtagagagtttagatgtattttataaataaggaatgtatt

SEQ ID NO: 1714 - DNA, 2500 bp, Artificial Sequence
  chemically treated genomic DNA (Homo sapiens)
agtatattttttatttatgagatgtatttgggttttttgtaaattagttgtgaatgttataatgtttgtaggagggaggtagagaattttggagttaatattttttagaaggtaggtagggattgggtttagggtataaggttttagtaggggtatttattgggtttgtagagtataaatggtattggggaaaaagtgatttgtgttgttgattttttttgtattttagtttgtattatataattggtagagagtttggaggatggggaggtgggaaatagggtggatattaatattaatttagtattttttgaaatatatataaaattttttaaggtagggatttttgtgtttattttataggggaggaaattgagatttgtagaaggtaggtaagttttttttgaatgtataattttgttttgttttttttgttttttataaagaggagagttaaggtggttggaaggatgttttgaatattattagaaaattaaatataaaataaggtaggaaaatgaggtttaggggaaggaatgtggatttagagattaagttttttttttaaatttttgttatgcgattttatttagttgttaatagtgaattgtacgttggttttaggtgttttggaagataatgtaaagagggaatataattagttttataagtggttaatgtttgtaaagaggaaagaaattagaggtatagtgatagagttatggttggtattgaaaatagagaaggaggtgtagttttattttaattttaattttagatatttatatttttgggaattagtttttggttttttttttattatttttttattttattatcggggagagggcggggtgggggcggagtaggcgcgtaatttgattttatcgtggagggtgtgtttttatattttattattaggtggtagtgcggggtaggttttagtaggaggttttttaggataggtaggttttttaggaattttagtgagtgagtgttatagttttaggtggaattttaataaagaaattgattttttgggtggaggaagatggttgtcgtttaggggttgtttttaagggtcgcgacgtagatagcggttattttttggtcgaggggtaggtttttcgcggtttttttgggatttcgggcgtgtcgtttagtttcgaggtcggcgacgggtagattcgttttacggatagttgcgtttagaggtttttggaaattattaaaggattagaattttttaggttgtaggtggagggaggtagatgtttcggattttagtatagatgtttattggatatagttattaatttcgacgacggtatttgaatagggtggggtaagagtggtggttgattttgatagtttagttttcgcgaaaggggtttaggtggattttagttaagaattgattcgaagtttattttaagtgttaaataatttttaagtatagtaaggttgtttttgtgggttatttttttttgttaaattttgatgcgatgataggtgattttgagattgttattagttgtattaatttgaggaacgtggaattagtagaattttagaagtttttttttaattatgtttttttttattttattttttatagtttaggagtattgtgttatgttattattatttttagaacgggaagattttatttttggtttaatttttttttttaattttttttagtgttaaggttgagtttttagatgttgttattttagatttaattattagttgaaattttatataatttgtagagtttttatagttttaaaatttggaattaatttttttggttttaagagttgtttgtatatatgtggatagttatgtataaaagttttatttaaaaaaaaagaaagagaagaaattgattttttgttttgttagaatgaagagttttggatagagaattaggagtttagaatttaaattttagttttgtttttagggttttgtgtaaatcggagtatattaatttgtttttttagtgttggtttttttatttgagaaagggggagatttatggagggaggaggagattgagatttagtaatggaggacgattatggttaatgaagtttgggataggtagaagtggagagaaagaatttttaaattagaggagaaaaaaaaaaagagggggtaaagggtttatttttaggaaggtgagttttgttttgtgttttttggttggttcgggggagtaaattagttaggatttttttaaatggaaatgatagaaatttattttaaaatgttttggtagaattaaaaaaaaaaaaaaaaaaaaaacgtaaattagggagagagtgttttttggtttttgtgataaaaagcgaatgggagtggggtatggtggtttacgtttataattttaatattttgggaggtcgaggtgggtagattatttgaggttacgagttcgagattagtttgggtaatatagtgaaattttattgttattaaacgtataaatatt

SEQ ID NO: 1715 - DNA, 2480 bp, Artificial Sequence
  chemically treated genomic DNA (Homo sapiens)
gagattttattttaaaaaaaaaaaaaaaaaaaaaataaaaaaaaatttaattaattaaaaaataaaaggtatttatttggtaggttttggtaattttagagttaatttgtgtggtgtggtggttaggaggtttagtgtatatttaataaatattagtggttattatgatttatttatagttgtaagttattttcgcgattgggaagtttttagaatttagagtttttgtttttggtaaaatttttttgttttaggtttttttttgttaagagattgttttttttatagcgcgaatagatggttatggattattttataaatgattttttattgaaggtgtttagtttggtttgtttttttaggaagtaggttgaggtttttttagaaagttgtttagaagtagtgtttttttagttgttgcgacgatagttggttgaacgtgttttaatttagttttgatttttgttttttttgagtttgtgtagtagtcgtgtttattattaagtgttgtcggtagagtttggtggtggaacgttaaagtgtgtgttttagtaaatgttcgttacgtgtttgcgttagtttatgtacgttatattttcgtagtttttagttattttattaataggtttgaattagttttataatattggggagtgaagaatgaatgattttatttttttttttttagtttgtttattttattttttattatattttgtgtttagaatagtgtttggtacgggtagatgtttagtaggtatattttattttatttttatttttgagatagagttttgttttgttatttaggttggagtgtagtggtacgatttcggtttattgtaattttcgttttttgggtttaagcgattttttttttttagttttttgggtaagtgggattataggcgtttattattacgtttggttaatttttgtagagagagttttgttatgttggttaggttgagttggagtaatgttttttttattttatggagtttttatttattatagttgttagttttttttaattttaggaattttcgttttaagggaaataggatagatagcgttcgtgttttattttgtttatttttagatgaggaaatagttattaaggtttcgtgtaaattcgtcgtttatttaatagtttatattatttgttttgttttagtttttcgttcgttagttggtgtttttggtagttagtaggttcgcgggggtttcgttttagttaggttgggggtcgggggttgggttttaggaattttgttgttgttgttggggttgttttaagttagcgtggatagaagtttagagtttaggggtattttagggttgaggggtttaggttggtttttgggtttcgggtttagggtagttatttagggtgtgtgtttgtagttaattagggttgtggggaggaaggttttcggtattgttatagtttgtaggttttatgagtttggttttggggttgggaaggtgggagtttttggttttaggaggttgtttttgtttttaattttcggtagagtgtttacgggaggagggggaggagtcgtttttatagtgggttatagttaattgtttataggttttaggtcgttattttgagttggtttttaggttatagttttttttgtttatagttttattatgttaggattaggataggagtgggtgttgtcgatagggaataaagggggtagcgtggggttgagtttttggggtaggtagggtgtttcgtgatttacgggttttttattgtttttggaaattttattggttttgttttattatggagggggtagttggttttggttgttttagtcgattaggaagttattttggtttttaggggtggtaggcgtttgcgtgttattaatagaaattttgggttagggcgggttggagagtttaaggtttggagtttttatgggggtgttttttttacgtaggaaattgattagagtgtttttaggagtttgttttgaaggtgggggtggggagtggttggtttggttgggttaagggttagtgggttagggttttagtatttttttttttttggttgtaggaggttttgtggtaggtatggggttgtcggtggaaggtgtagtaggacggttgtgtagtgggggcgttcgattttttgtttttgttaggtttaggttaggtttttttaagggtttatagtatagattttcgtggagatgaatgaaattgtagtcgtagtggaagttatttataaatacgcgttttagtgggtttagttttggggttttttttttaatggtattgttatgttggttggcgtaggtgaagggtttggggttaggaggcgtgagatgaagttagtttcgttgaagagttcgtggttgaggagtcgttgtttgagtttttagggtttagtgtgtttaggattcgttaatagggtggtagagagtaggtgattgtgttggttggttgttggg

SEQ ID NO: 1716 - DNA, 2480 bp, Artificial Sequence
  chemically treated genomic DNA (Homo sapiens)
tttagtagttagttagtatagttatttgttttttattattttgttggcgaattttggatatattgggttttgaaggtttaggtagcggttttttagttacgagttttttagcgaggttgattttattttacgttttttggttttaagttttttatttgcgttagttagtatggtaatgttattgaggaggaggttttagagttgggtttattggggcgcgtgtttgtagatgatttttattacgattataattttatttatttttacgaggatttgtgttatgggtttttagaggggtttgatttagatttggtagggataggggatcggacgtttttattgtatagtcgttttgttgtattttttatcggtagttttatgtttgttatagggttttttgtagttaaggaggagggggtattgagattttggtttattagtttttggtttagttaggttagttattttttatttttatttttagagtagatttttgggaatattttggttaattttttgcgtgaggaagatatttttatagaggttttagattttgagttttttagttcgttttggtttagggtttttattgatggtacgtagacgtttgttatttttgggagttaaaatgattttttagtcgattaggatagttagaattagttgttttttttatggtgggataggattaatgaggtttttaaggataatgaggaattcgtgggttacggagtattttatttgttttagagatttagttttacgttgttttttttgttttttgtcgatagtatttatttttgttttggttttgatatggtggagttgtggataggaaggattgtagtttgggagttagtttaggatggcggtttggggtttgtggatagttagttgtggtttattgtgggggcggttttttttttttttttcgtaggtattttgtcggagattaagggtagggatagttttttggagttagagatttttatttttttaattttaggattaggtttatgggatttgtagattgtggtagtgtcggggatttttttttttataattttgattggttgtaggtatatattttgggtgattgttttgagttcgagatttaagggttagtttgagttttttagttttgaggtgtttttgagttttgggtttttgtttacgttagtttggggtagttttaatagtagtagtagagtttttgaggtttagttttcggtttttagtttggttgagacggggttttcgcggatttgttggttgttaggaatattagttggcgagcgggaagttggagtaaggtaagtgatgtgggttgttgggtgggcggcgagtttgtacgggattttggtgattgtttttttatttgaaaatgagtagagtgggatacgggcgttgtttgttttgttttttttggggcgggggtttttaggattaggggaaattgatagttgtggtaggtggaggttttatgaggtgagaggagtattgttttagtttagtttggttaatatggtaaaattttttttataaaaattagttaggcgtggtggtgggcgtttgtagttttatttatttaagaggttgagggaggagaatcgtttgaatttaggaggcggaggttgtagtgagtcgagatcgtgttattgtattttagtttgggtgatagagtaagattttgttttaaaaataaaaataaaataaaatatatttattaagtatttattcgtgttaagtattattttaggtataggatatagtgaaaaatgagatagataaattgagaaaaaagaaataggattatttattttttattttttaatattatagaattagtttaggtttattaatgaaataattgagggttacgaaaatgtagcgtgtatagattaacgtaggtacgtgacgagtatttattgaaatatatattttggcgttttattattaggttttgtcggtagtatttggtaatgaatacggttgttgtataggtttaaaagaagtaagagttagggttgggttagggtacgtttagttagttgtcgtcgtaatagttggagagatattatttttgggtaattttttggagaaattttaatttgttttttgaaagggtaagttaggttgaatatttttagtagagagttatttgtggaataatttatgattatttattcgcgttataggaaaagtagttttttgatagaggagaatttaggatagggaaattttgttagggatagggattttgagttttgaggattttttagtcgcggggatgatttgtagttgtgggtgaattatgatggttattgatgtttattgaatgtgtattgagttttttggttattatattatatagattaattttagaattattaaaatttattaggtaggtattttttgttttttgattggttgggtttttttttgttttttttttttttttttttttgagatggagtttt

SEQ ID NO: 1717 - DNA, 2364 bp, Artificial Sequence
  chemically treated genomic DNA (Homo sapiens)
aagttttttttgtaatcgttaagtgggttattaaggtaggggaattgtagtggagaaagagtttaatttatgtagaaatggttgaataggagattagagttgttttttgtttgtttgttttggttttttttttgagatgaaggtttgttttgtcgtttaggttggagtgtagtggcgtgatttcggtttattgtaattttttttttttaggtttaatttatttttttgttttaattttttaagtagttgggattataggtatgcgttattaggtttggttaatttttgtatttttagtagaaatggggttttattatgttggttaggttggttttgaatttttgattttaggtgatttttttgttttgattttttaaagtgttgggattataagtaggagttattgagattggagtttttttattatttaaattagttttttggagtatttaggggttagggttttttaaaggtagtttaagggaagggtggcgggggtggttaggtaatggggtttgttgttgattggttgggggtgtaatgataggggtgtgggaaatgattttgtatgttgagttatttttgggtgaggttataggagtagttggtaggtttaggtggaattataggtgttagatatataaaaagtttgaaaagatattttaaaaaagttcgggcgtgatggtttatatttgtaattttagtattttgggaagtcgaggtgggtggattatttgaggttaggagtttgagattagtttggttaatatggtgaaatttttgtttttattaaaaatataaaagttagttgggcgtggtgatgggtatttgtaattttagttatttaggaggttgaggtaggagaattgtttgaatttaggaggcggaggttgtagtgagtcgagatcgtgttattgaattttagtttgagcgacgagagagaaattttgttttaaaaaagaaaaaaaaaaagatattttaaaaggttaatttttacgaagggttaggggttttataggtgagtggagttttagtagtttttttagttttgcgtgtttatgtattggttttttttttggttttatatttagtgtttaaggggttgtagtgagacggggtttgggtcgcggagttgcgtttggttttgttgttttataagggtatcgtggttgttagtttgtttttgtaattgttgtagagttacgtagggttataggtggtggttggttgtgggatttattttttgtgtatgatatttttaggtattcggttgggtgcggttttggtagttagtagggtttttgtattagttggtttagtttgtgttagagggtatggtggttggtatttttttttatattatttttttggaaatttttttaggagttggcgatttttgagtaaaggatttttaaggttattttgtttttagaagggtgtgttttgtttattggtttgttttttatttatatttagggggttttgaaatagaggtcgttgttttttttttttgttttagtgtgtggggaaaaggaaggaatgggaagggaggttttgaggacgaaagttttttttaggagttaaggatggagtttttggtattatttgatttatgagagggaagtgggtaggtaagagagattggttttagttttaaggaacgagagacggttgagttattagagatatgattagggatattagtgttattagaaaggggtttcgatttagattttaagagagggtttttggtttttatataagaaataattcgaggtgggtttataaagtgaaagtaagtttattaagaaagtaaaggaaggttagacgcggtggtttatgtttgtaattttagtattttgggaggttaaggtgggtagattaaaaggttaggagattaagattagattggttgatacggtgaaattttgtttttattaaaaatataaaaattagttagttgtggtggcgtatatttgtaattttagttgtttgggaggttgaggtaggagaatcgtttgaattcgggaggcggaggttgtagtgagttaagattgtgttattgcgttttagtttgggtgatagagtgagatttcgttttaaaaaaaaaaaaaaaggaagtaaaagaattaaagaatattttatagatagagtagtagtatgggttgtttgattgagtatatttatagttattttttgattatgtaattgtttagcgggttttttttgtttattgtttagatagagtcgattgattaagacgggaattgtaatagagaaatagtaatttatatagagtttgttgtgtgggagattggagttttattattatttaaattagttttttcgagtattcggggatta

SEQ ID NO: 1718 - DNA, 2364 bp, Artificial Sequence
  chemically treated genomic DNA (Homo sapiens)
tgattttcgaatgttcggggagattgatttgagtaatgataaaattttagttttttatatagtaggttttgtgtgaattattgtttttttattgtaattttcgttttgattaatcggttttgtttaggtagtgggtaaggagaattcgttgggtagttatatgattaagaaataattgtaagtatatttagttaagtagtttatgttgttgttttgtttatggagtattttttaatttttttattttttttttttttttttttgagacggagttttattttgttatttaggttggagcgtagtggtataattttggtttattgtaattttcgtttttcgggtttaagcgatttttttgttttagttttttaagtagttgggattataggtatgcgttattatagttggttaatttttgtatttttagtagaggtagggttttatcgtgttagttagtttggttttgattttttgattttttgatttgtttattttggttttttaaagtgttgggattataggtatgagttatcgcgtttggtttttttttatttttttaataaatttgtttttattttatggatttatttcgaattattttttgtgtaagagttaagaatttttttttggggtttggatcgggatttttttttagtaatattaatgtttttgattatgtttttagtgatttagtcgtttttcgttttttggggttgagattagttttttttgtttgtttattttttttttatgggttagatagtgttaaaggttttatttttagtttttagagaaagttttcgtttttagaatttttttttttattttttttttttttttatatattggggtagggagggagaatagcggtttttattttaaagttttttagatatggatgaagagtaggttagtgagtagggtatatttttttaggagtagaatgattttgaggattttttgtttagaagtcgttagtttttggaaagatttttagaaaggtggtatagaggaaggtgttagttattatgttttttagtatagattgggttagttggtgtagaggttttgttgattgttagagtcgtatttagtcggatgtttagaagtgttatgtataagaagtggattttatagttagttattatttgtaattttacgtggttttgtagtagttgtagggataggttgatagttacggtgtttttgtggagtagtaaagttaggcgtagtttcgcggtttaagtttcgttttattgtaattttttgaatattgagtatagagttagggagaagattagtatatgggtacgtagagttgagggggttgttggggttttatttatttgtgggatttttggtttttcgtgaagattggttttttgaggtattttttttttttttttttttgagatagagtttttttttcgtcgtttaggttggagtttaatggtacgatttcggtttattgtaattttcgttttttgggtttaagtaatttttttgttttagttttttgagtagttgggattatagatgtttattattacgtttagttagtttttgtatttttagtagagataaaggttttattatgttggttaggttggttttaaatttttgattttaggtgatttatttatttcggttttttaaagtgttgggattataggtgtgagttattacgttcgggtttttttgaggtatttttttaggttttttgtatgtttgatatttatggttttatttggatttgttaattgtttttgtggttttatttagaagtgatttagtatataggattattttttatatttttattattgtatttttaattagttagtagtaggttttattgtttagttattttcgttattttttttttaaattatttttgaaaaattttagtttttaaatgttttaagagattaatttgaataataaaaaaattttagttttagtggtttttgtttgtaattttagtattttgggaggttaaggtagaaggattatttgaggttaggagtttaagattagtttggttaatatggtgaaattttatttttattaaaaatataaaaattagttagatttggtggcgtatgtttgtagttttagttatttaggaggttgagataggagaatgggttgaatttgggaggaggaggttgtagtgagtcgagattacgttattgtattttagtttgggcgatagagtaagtttttattttaaaagaaaaattaaaataaataaataaaaaataattttggttttttgtttagttatttttgtataaattaaattttttttttattgtaatttttttgttttgataatttatttggcggttataagaggagttt

SEQ ID NO: 1719 - DNA, 2467 bp, Artificial Sequence
  chemically treated genomic DNA (Homo sapiens)
gagaggttttggaagggtaggggcgtgtggtgatattgggtgtttttgggttttagtatttttttagttagttggaagaatataggtaagttaagtttttttttttttttgagtttttaattttttatcggtaaagtagggatgataaaaataaattattaaattgttgtgaggttttaatgagggtaaagtttgttgtttgaaatagagtaagtttttgtggcgttttagttatttgtattagttatttgtatttttttttgcggttttttttttaatttttattttttttttattttaaaaagattttttttgaaaatgttagtttgttttagtagtattaggagatattagggaaaggtttttttttttttaagttgaggttgagaaggaatgggaagaacgaagagaagtatttttgtggaggttttttttagttggttttgggtttaggaatattatatatttaatttttaaaggtttttaggggttggtttaaggttatatagtttgatagtgcggagtatttcgaagttagggcgtgtggtgtagaataggttgggtgtttgaatttaattagttttttttatttttttatttagagttttttaggttgtggggtgtttatttgtgtatttttaagtcgattatttttttggggttttcgttaatttaattttatggaaatattataaggggtagatagagatgagtcgtgttagtgtttgtattagtagagggtaggattattgagcgttcggaggggagacgagtgtttgggtgtttttgggaatttggtttgtttcgatttttttggggggttttttttggttttgatttttatttttttagatttatttttatttatgtttatttatttcgaggggttttttagtgtgtatttatatatttatatttaaatttattattttatttgttttttaattattaggaacgtggcgttgttttaggtttttttttttttgtattttttagtagttgtttttattgggtagggtaaattatatcgtggttcgattataaaagttattttttaaaaaaagaagttttaaggttttcgagagacgtagttgagttttttatttggtagtgtttgatttaggaggtgatgtttgggttatgagttatagagtttggtgtttttttaagtagggagtataaatttttattttttttttttgttttttttgacgttagttggaaggcgtgtgagtgagtgaggggttgaggtatcgttcgcgcgagtatatatagatatatatatatatatatatatatatatatatatatattttttagatttattttttgtttgttagttttacgagttagagagagatagagcgcggacgtcgtaggaggtagtgtttggattttagttgtttaggagaggtgaggggttagatggggtttgaggatattgtgttagaaattgtggttttggttaggtcgaaggagagaggtataacgtgaaggtgggggttggattagtttagtttagtttatagatagggtgttgggggtatagaggatattatttgttttttttttttttatttttttttcgtgatttttaaatgaggtgaggtcgtgtggttttcgtgggagtatgtttgtgtttgtgtttgtgtttgtgtttgggatttgcgtttggtttaggaggtagagagtagtagatatttgttaagtcgtagttttttgtttgggaagtagcgggagagaggatcgttttgattagagaaattttagtgtcgtttttagttgttgaaagtagagtgtagtagggatttttgttggttttttttttggaatgttgggttgggaagggatcggttgggaaaggtagatagttggatttggagtagttgttttattttgattttattttttttttagtgtgatggggataattgtgttagttggtttagagaggtggtttcgtgtggttattttttttttttaggtattattttatttcgagtttttgttttttgtttgtttgttggtttgttttgatttttatttttgttagggtatagttttcggagggtaggggtgataagttagggtttgttaggtttttattttgggatatagggatttagggtggttttggttggtgttaagtttatgaatggtttgattttggtataaggagtttaggcggagataaggggcgacgttggtatttataaggagatagtaggtttttgttaagttgttagtttgtaggttttttttagggagaggggagggggatatagagcgagaataataataaatatagagtgtgaattgttgtatttattggggttggggtaggagaggaggaagtatgtttagtggggggtgggtaatttttttgagagtttggtattatgttgtttggttgtgattcggtaggggtttttttttgggaaagggggtttttagttttttgggggat

SEQ ID NO: 1720 - DNA, 2467 bp, Artificial Sequence
  chemically treated genomic DNA (Homo sapiens)
attttttagaaagttggagatttttttttttagggagaggtttttgtcggattatagttaggtagtatgatgttaggtttttagagaggttgtttattttttattgggtatattttttttttttttattttagttttagtggatgtagtagtttatattttgtatttattattgttttcgttttgtgttttttttttttttttttgggaagagtttgtaggttggtagtttggtaggaatttgttgtttttttgtgggtgttagcgtcgttttttattttcgtttggattttttgtgttagggttaggttatttatgggtttggtattagttaaggttattttaagtttttgtattttaagatagaggtttggtaggttttgatttattatttttgtttttcgggggttgtgttttggtaagggtggaggttagagtagattagtaggtaggtaagaagtaagggttcggggtggggtggtatttgggggaagagaataattatacggagttatttttttaagttaattaatataattatttttattatattggggaaaaaatagagttaggataagatagttgttttaggtttaattgtttgttttttttagtcggtttttttttagtttaatattttaggggaaggattagtaagggtttttgttgtattttgtttttagtaattggaagcggtattggggtttttttggttaaggcggttttttttttcgttgttttttagataggaggttgcggtttggtaggtatttgttgttttttgttttttgagttagacgtaggttttagatatagatatagatatagatatagatatgtttttacgggagttatacggttttattttatttgggggttacggggagagaatgagggagggagagataggtggtattttttatatttttaatattttatttgtaagttgaattgggttgatttagtttttatttttacgttgtatttttttttttcggtttggttaaagttatagtttttggtatagtgtttttaggttttatttagttttttattttttttgggtagttggggtttaggtattgttttttgcggcgttcgcgttttgtttttttttggttcgtggagttggtaggtaggggatgggtttggaagatgtgtgtgtgtgtgtgtgtgtgtgtgtgtgtgtgtgtttgtgtgtgttcgcgcgggcggtattttagttttttatttatttatacgttttttagttgacgttagggagagtaggagggagggatgagaatttgtattttttgtttaaagggatattaggttttgtggtttatggtttagatattattttttgagttaggtattgttaggtgagaggtttagttgcgtttttcgggggttttaaagtttttttttttggaaagtggtttttatggtcgggttacggtataatttgttttgtttagtgagggtagttgttgaggaatgtaggggaggaagaatttgagatagcgttacgtttttggtaattagagagtaagtggggtggtgagtttgagtgtgagtgtgtgagtgtatattggggggtttttcggggtgggtgggtatgagtgggggtgagtttgggagaatggaggttagagttaagaggagttttttagaggggtcgagataagttaggtttttagggatatttagatattcgtttttttttcggacgtttagtggttttgttttttgttagtatagatattgatacggtttatttttgtttattttttgtaatatttttatggaattgaattgacgaggattttaaggaagtgatcggtttgaaggtgtataggtgaatattttatagtttgggaggttttgagtagagaagtagagagggttgattgaatttaggtatttagtttgttttatattatacgttttggtttcgaagtgtttcgtattgttaagttgtgtgattttgggttagtttttgagggtttttggaggttgagtgtgtgatgtttttaaatttagggttagttggaggaggtttttataaaggtgttttttttcgttttttttatttttttttagttttagtttggaaagaaggaagtttttttttggtgttttttggtattattgaggtaggttggtatttttaaaaggagtttttttaaaataaaaaggaggtgggagttaaaagggaaatcgtagagaaaaatataagtaattaatataaatagttaagacgttataagagtttgttttgttttaggtagtaagttttgtttttattgaaattttataataatttaataatttatttttattatttttattttatcggtgaggaattagaggtttagggaggaggaaggatttgatttgtttatatttttttaattggttagagaggtattggaatttaggagtatttagtgttattatacgtttttgtttttttagaatttttt

SEQ ID NO: 1721 - DNA, 2366 bp, Artificial Sequence
  chemically treated genomic DNA (Homo sapiens)
gatttatgtgttttagtgtttttttttgtaatatgggggtgatgattgtatttattttataaggaagtttttagtaaaatgaaagtttttaaaattatgtttgttttattattaatgattttataaatattagtaataatattagtattaagttttgttattttttattaattttttgtaaacgattttatttttttgtttttatatattttttatatttgtattttatttgatttagttattttttgtttaatttgttagaaagggtagatagttttttagttatttgttgttagggaaatttattattttagttcggatggtgaagattttagtttgagagattagttcgggtttgaagtgtttttttatttattgtgttgagatttttttttttcgaattttgttatgtttttgtatacgttgttttttttatttgttacgtttttattttttttttttttattgtaaatttttatgtagtcgttaaggttttatttttttttggaaagttttttcgatttttttggtaataattattattaatatttatttattgagtttattttgtgttaagtattgttttagatacgggtatgtaatcgcgattgagagagatagattacgtatagtttggattttattttaagagttattgggtgtcgttggtgggtttgagtgagtggggttaggaagtgatttattttttcgagggtttgtgggagttttagtttaggggcgggtagggggcgtggggaagtttgtagtcgagagtttaggtaggagttttttgcgtggtttcgggagaggaaggggtttggttcggggcggggtgtggaggtgggaggacggcggtgcgggatggagggtggaggttaggttgatagggtgttggtggtgggttgcgggggtcgattttaggttttggtttatgtagttgttattttggaggtgaatagtttgcggggaaattggtatggtttggggaaggcggggagagggggagaaatgaaagtattgagtttaagtggtttgtagaatttcgggggtttaggcggtacggcgggcgttggggtttcgggtagagttttttggaggtttgtggtagttttatttttacggtatttatttttttcgggttttgtcgtagagaggaggaagtttttgtcggttgagcgggtttggaggaagtgagtagcggggtttttgtttttcggtttggttttcgaagattttagaagaattcggaatttgtttttattcggaatttagggattattttttgtatttagtaggtttttgtttttttgcgtggaaagcggttgggtgagttttggtatcggggttattatatttgagtgttgggggttacggagggaggggtttagatattatttgggaaggattttagagtgtagttttagtttaggttattcggggaagggagtcggtaaagtgggattttgagtttttacggttttttcggttgtttttgtttagaggttgttcggcgttttttttttttgttttattgaggagttgtcgtttttgaattttagttaattttttcgtttttaggtgaagaaattgaggttttggggttaggaaggggtttgtttaggttgttgatttttttgggtagtatcgagtttaggttttttttgtaattatgtattaggattagagagggtagggggtttgtttaacgttatatagtttgagtgaggaggagttggtttgggatttaggttttttgacgtttaggttaggttttttcgttttttttggttatggtttttagtttggatattaaggggttgggagttagttgtgtttttattatttttatgttatagggtaggatggagtttggtatttttcgttttaggttggttgttggtgtgatatgggtggttttagtcgagtgaatgttttcgttttttatagtttagggggttttttgttttggttattaatttttgttatgtgatttttttattttaatgtttgattgagtttgaaaatattgagaagatttaggggttgaaaagggaggaagagggaggttagaaggcgttagtcgagttagcgaagtttttataggagaggaagtgggttaggggaataggaaggagggttgggttggtttttgggtttgtttttgtttcgggtatgtggtgagtttagttttttgtttgtaatgaggaggaggaagatgaatagtgtttttgttaattttggttttttcggtttatgggatgggagatgttattattttacgtatttattttagttagttttatataggtcgatcggggaggttttttttgagtttaatttgataagttttgaggagtgagttgtat

SEQ ID NO: 1722 - DNA, 2366 bp, Artificial Sequence
  chemically treated genomic DNA (Homo sapiens)
gtatagtttattttttagagtttgttaggttgagtttaagggaaattttttcggtcggtttgtgtggggttggttgaggtggatacgtggaatggtgatattttttattttataaatcggaagggttagggttgatagaggtattgtttattttttttttttttattataggtagaaggttgggtttattatatgttcgggataggggtagatttagaggttagtttagtttttttttttgtttttttggtttatttttttttttgtgaaggtttcgttggttcggttggcgttttttggtttttttttttttttttttttagtttttgggtttttttagtgtttttaaatttaattagatattgaggtaggggagttatatggtagaagttggtggttagagtagggagttttttgagttgtgggagacggaggtatttattcgattggagttatttatgttatattagtagttagtttggggcgggggatgttagattttattttgttttgtagtatggaggtggtggggatataattgatttttagttttttaatatttaagttgagggttatggttagagaaaacgaaagagtttggtttgggcgttaggaagtttgggttttaggttagtttttttttatttaggttgtgtgacgttgggtaaattttttgttttttttggttttgatgtatggttataaggagggtttggattcgatgttgtttaaagggattagtagtttgggtaagtttttttttggttttagggttttagtttttttatttggagacggaggggttggttgaagtttagaggcggtaattttttagtagaatagggagggaggacgtcgagtagtttttgagtaggggtagtcggaggggtcgtggggatttaaggttttattttatcgattttttttttcgggtggtttgggttgggattgtattttgggattttttttaggtggtgtttgggttttttttttcgtgatttttaatatttaagtatggtggtttcgatgttagaatttatttaatcgttttttacgtaggaaaataaaggtttattgagtgtaaagggtggtttttggatttcgaatggaagtaagtttcgggtttttttggggttttcggggattaggtcgggaggtaggagtttcgttgtttattttttttaggttcgtttagtcggtaggagtttttttttttttgcggtagggttcgaggggggtggatgtcgtgaaagtgaagttgttataaatttttagaaagttttgttcggagttttagcgttcgtcgtgtcgtttgggttttcggggttttgtaggttatttaaatttaatgtttttattttttttttttttttcgttttttttaaattatgttagttttttcgtaggttgtttatttttaaaatggtagttatataggttagagtttggggtcgattttcgtaatttattattagtattttgttagtttggtttttattttttatttcgtatcgtcgtttttttatttttatatttcgtttcgggttaggtttttttttttttcgggattacgtaggagatttttatttggattttcggttgtagatttttttacgttttttgttcgtttttgagttgaggtttttataagttttcggaggagtgagttattttttgattttatttatttaaatttattaacggtatttaatagtttttaaaataaaatttaggttgtgcgtggtttgttttttttaatcgcggttatatattcgtgtttagaataatgtttggtataaagtgggtttagtgaataaatattggtggtggttgttgttaaggggatcgggaaggttttttagaggagaatggggttttgacggttgtataggagtttgtagtggaagaagaaggggtgagaacgtggtaggtggagaaaatagcgtatgtaaaggtatagtagggttcgagaaggagagattttagtatagtagatagagaaatattttagattcgagttggttttttaagttggaatttttattattcgggttgaaatggtgagtttttttagtaataggtgattgggaagttatttattttttttgataggttaggtagaaagtggttaaattaggtgggatgtaggtgtaaggagtgtgtgagagtaggaaagtagggtcgtttataagaagttaataaaaaatgataaaatttagtattggtattgttgttaatatttatggagttattggtgatgaaataaatataattttaagggtttttattttattggaaatttttttgtgaggtaggtataattattatttttatattatagaggaagatattgaggtatatgagtt

SEQ ID NO: 1723 - DNA, 2333 bp, Artificial Sequence
  chemically treated genomic DNA (Homo sapiens)
tcgatatatacgtatatatatatagagtgtatatatatgtatatacgtgtagtcgtattttttggtgcgtttgttgtgagggtataggggtgggtaggttggtaggtacgtgaagttgttattagtttcgagggatcgtgagcgagttgggatttgggggagaaaaaaatgggggcggacgttagttttttgggcggtcgtcgttatcgttttcgttttttcgaggttttttttgtatttttgggtagcgaagtttttcgttaagacgggggttgatgttatttcgggttgtttagttaggggattcgggggttttggtggttgttttcggaagtgagttagtcgtttgtcggtcgataggtttggaatttttagttagaggatagaaaatttgtatgggttaggtgagcggggtttggtcgagggtagtcgggtagggggtagtagggtgcggtagtttgtttatcggaattttttagggtgtattttaggggggttgtttatttgaagggaagtgaggacgagggtgtttaaaggtcgttttttttatttttatttttatttttatttttcgtttttcgggatcgttacgttttggagtgagtgtagtcggtttgttttttaaagttttttgtttcggtcgattagttgggtgagttttggaattggaatttggattgtttagtgtgttgattttataatttcgttggggtggatttttagtttggtatttagttgttttttaattttgagcggtattcgtggatgtagtcggtttttggtttagggatgtttatttatttttggtttgtttgaagaaagttgttgtttttaatttttttttttttaagtaagtttaaaatttttatgagtaaaagagtttaaagaggtaagaggatattggcgttttaattgttttttttttttttaattttttttttttttttttttttggttggttttatggattatttgggagataaatttatagtggtttagatttatatgatttagtggatgggtatcgtgaggaggtttttttaggaagtttttaatttggtgattattacggtgggttacgaacggacgagtgtagagtcggttagtcggattttttttaagcgtatttttttttttcgatatttggtttttcggagtcgggaattttttcgtcgtttttttgttcgtagttaatagagattttttttattgaggaaaaggtatatagattcggaatcgttagatattgtaagtttattatgttttaaaaaatattaaaataatattgaaagttttttttttttagtttttttagggagggggttttagatattaaatcggggaagttattttttttagaatagttgttagttaaagtttaggtattttttgttttttgtatttgggaaagaggtacgtagtaataattttttttttttgaagttagttaggatatttttgttggagtcgacgtttgtgtggatagggttagtacgtgagttgggttgaatttgttagttgatttatgtttaagtgtgaatattttaattttcgatacgaaagtttatttttttttttatttttagggtggattagtggtatttgttttatttttttttatttttttaggaagtataagtggcggtgttatgtgtacgttgagttgtagtttttgtcgttttatcgagtttttattggattgttaaggaaagggttttaggagatcgaggtgtggtgggcgagtttgttcgttggtcgtgaattttgggtttggtgtgagtgggttagggagggaggttttgattttttatttaggtaggttcgggagggtttggattgggatagtagggtggaatgatagttaatgattaaaattttggtttgtgttttgttaggcgatagtgtagaaataatcgtaaggtttttttgatgatttggagaggtgggattgggtttagaaagcgaaagtgtttattgtgggggaagtatagtgagtgagtggtagagttaggtttcgaattttaggttttgatttttttatttacggttttttgtagtttagtttttagtagatgttttttttagatttttttaattaatttagggttgtttaggttattgattagatttgagtttaaagagagggtttgttatttttatataggagatttttgttatttgattgtgttggtttagtttatgggagtatttgaggataggcgaagggttaagttagtttttttttttgggttttttttagttaggagtgttatagttattaagggatttagtatttagggaggagttttgagttggttttttttatattcgag

SEQ ID NO: 1724 - DNA, 2333 bp, Artificial Sequence
  chemically treated genomic DNA (Homo sapiens)
ttcgagtgtagggagggttagtttagggtttttttttaaatgttgggttttttaatgattatagtatttttggttaggaggaatttagaaaaaggggttggtttagtttttcgtttgtttttaagtgtttttataaattgggttaatatagttaggtggtagaagttttttatgtgaaaatggtaggttttttttttaggtttaggtttggttagtgatttgggtagttttgaattaattgggagggtttggggagaatatttgttgggagttggattgtaaagagtcgtgaatggggaggttagagtttggggttcgggatttggttttgttatttatttattgtgttttttttatagtaggtattttcgttttttgggtttagttttatttttttaaattattagaaggattttacgattgtttttgtattgtcgtttagtaggatataggttaaggttttaattattagttgttattttattttgttgttttaatttaagttttttcgagtttgtttgagtaagaaattaaggtttttttttttggtttatttatattaaatttaaggtttacggttagcgggtaaattcgtttattatatttcggttttttaagattttttttttggtaatttaatgaaagttcggtggaacgataaaagttataatttagcgtgtatatgatatcgttatttgtgttttttaggagggtgagaggagatgaggtaggtgttattaatttattttaaaaatagggagaaggatgagttttcgtgtcgggggttggggtgtttatatttaaatataaattaattggtaaatttagtttaatttacgtgttggttttgtttatatagacgtcgattttagtaaaaatgttttgattgattttaggagagaggaattattgttacgtgttttttttttaggtataggggataggaagtgtttgggttttgattgataattattttggaagaagtaattttttcggtttgatgtttgggattttttttttgggaggattggaggggaggagtttttagtgttgttttaatattttttaaaatataataagtttataatatttggcggtttcgaatttgtatgttttttttttagtgaagaaaatttttgttggttgcgagtagagaagcggcggaaggattttcgatttcgggaagttaggtgtcggaaggaggaagtacgtttgaagggggttcggttggtcgattttgtattcgttcgttcgtggtttatcgtggtggttattaaattgagggttttttggaaggatttttttacggtgtttatttattgggttatgtgggtttgggttattgtgagtttattttttaggtaatttatggggttagttaggaggagagggaagaaggaagttagggagggagagagtaattaaaacgttagtgtttttttgtttttttggatttttttgtttatggaagttttgggtttgtttggaggaaaaaaaattaaaaatagtagttttttttaggtaaattaagggtaagtaaatatttttgagttaggagtcggttgtatttacgggtgtcgtttagaattaagaggtagttaagtgttaggttgggagtttattttagcggagttataaagttaatatattgggtagtttaggttttagttttagggtttatttagttgatcggtcgagataaggagttttgaggaataagtcggttgtatttattttagggcgtgacggtttcgaaaggcgggggatggggatgggggtgggggtggagggggcggtttttgggtattttcgtttttatttttttttaggtaggtagtttttttgaggtgtattttgggaggtttcggtgggtaagttgtcgtattttgttgttttttgttcggttgttttcggttagatttcgtttatttgatttatgtaggttttttgttttttggttggagattttaaatttgtcggtcggtaggcggttagtttattttcggaggtagttattagggttttcgggttttttggttgagtagttcgggatgatattagttttcgttttagcgaggggtttcgttgtttaggaatgtaggaggggtttcggggaggcggaggcggtggcggcggtcgtttagggagttgacgttcgtttttattttttttttttttaagttttaattcgtttacggtttttcggggttgatggtaattttacgtgtttgttagtttatttatttttgtgtttttatagtaagcgtattaggaaatgcggttgtacgtgtgtgtatgtgtgtgtattttgtgtgtgtgtgcgtgtatgtcgg

SEQ ID NO: 1725 - DNA, 2378 bp, Artificial Sequence
  chemically treated genomic DNA (Homo sapiens)
gttaaggttggaataatatagcgatttagtttttcgatttggttatatggagtggggttaggtttgttttttttgttttttattttttttttaattttatagttttttgagatttagatgttataagggtttaggtgtttatataggggtttaggagtttgttggtgttttgtatgagatttgtttgtttttggagttggttaaggagtacgcggtattttttcgagtagttgtttatagtcgttatgttcgttatgtttggaaataggagtgtaaggattagatttaaggtagagaagaggggtgttatttgatttggtgaggaaagttatagatgggagtttcggggagggggtttaagagggttttgaaaggtgttttttttattttagattttgtgtagtggagggcgggggttgggtattgtgtggtacggtgtgtgtttaggtgtgtttattaaggttattattatttttttagtaagttattgtttagggtttgatatagtaagtagtgggagggattgagatagtggttgcgatttattaagtaggtttttgagtaaaggttgtagtgtttggtcggattttagttttgtttatagtacggttttaatttcgggagttgattttttgtaaggtgggattggttttttgtaagattattgggttaaagatcggttattgttttaggatttgttttgttagttgttttggttatttaggtagatgggtttgagagggttttagggtaggtagttcgggagtagtttgtgtttttagttttgtttagaattaggagaggttgtttttttaattagaggtgtagtttggaatagatgtggaagattttttagtttatgtttttatttttttgataggtaaattaagttttaggagaaggttttatttaggttatataaggttagggtttttttttgattttttttgttttttttttttttttataagtggttttttttgttaggtttattagggatgttgtgagtttgttagaaggtgttgggggcgggtatagttatcgtttattattatttttaacggggtatcggtagttacgtggtcggaaggggtttatggcgtaatggttcggaaggtagtgatattatcgttttcgttttaagaattattcggttttttggggaagattggttgttggggagggttaaggggttaggtatttaggtttagcgattttacggtattttcgtcgtttttttaggtatttgttgtcgggttttggtaggggtttgtgtttgtggtagcgtacgtgggattggggtttttgtgtggttgtgtatttgggtttgtgtgcggcgtgagggagatttgtttcgtttattatggggattttggtttgtatgtgggggtttttgggttggtgagatttagggttgtagatgacgttatatggttgtgtgcgtatgtggttatgtgggtgtggttgtgtatgttgtgtgattgtgtgggttttggggtttttaggtttggttgattttttatttatttcgggtaagttggaggttttataatttttttatattttatattatttttttgtttagtttttgagttttttttttttgtttagtttttttgtttattttatttttttattttttggtttttagagttgtttttatattttgatattatttttttttggaagttttttagggatgttttttttttatttgtggagatgttaggtttttagtggattattttttttgtttgattttttggtttttttttttttttagtatttttttgtttggcgtttggtttttttagttttcggagggtagagggtgtttttgttttttatcggtattcgtgggtagatttagtaggcgggttttggcggggaggaaggaagtatttattgagtagcgttttttgtgtgagtagtatttttatgttgggtgttcgtgtttcggttcgcgttcgttgggggtgatatttttcggttgggagttttgtaggttggtagttattttatgttcgttggggcgattggttaatattttatgaggtgggtggggatggggaggggggagggtaggttttttgggaatatgattttaaaaattaaaatttttacgggcggttaatgggcgtagggcgcggtgtatgttcgtttttttttttgtttttttcgaattcgtttttcgaggttagttttacgtttaaggatgatgtaaaatcgtagttttagtttttttagggtgagtggggaggaaaagggtttatgttatttttagggaattgggttagggatgggtaggagggatttcgagttgggtttttggaggttttaggttagttttggtttaggagttattggttttataggat

SEQ ID NO: 1726 - DNA, 2378 bp, Artificial Sequence
  chemically treated genomic DNA (Homo sapiens)
gttttgtgaggttaatggtttttgggttaagattggtttggggtttttagaggtttagttcgaagttttttttgtttatttttggtttagttttttgaagatggtatggattttttttttttttatttattttaggaaggttgaggttgcggttttatattatttttgggcgtagggttgatttcgaagaacgaattcgaagaaaataggaggaggagcgggtatatatcgcgttttgcgtttattggtcgttcgtggaaattttggtttttggggttatgtttttagaaggtttgtttttttttttttttatttttatttattttatgaggtgttggttaatcgttttagcgggtataaagtggttgttagtttgtagggtttttagtcgagaggtgttatttttagcgggcgcgggtcggagtacgggtatttagtatgggggtattgtttatatagaggacgttgtttagtaagtatttttttttttttcgttagaattcgtttgttgggtttgtttacgggtgtcggtggggagtagaggtattttttgtttttcgggaattggggaggttaggcgttaggtagaaggatgttgagaaggggagagagttaggaggttaggtagagagagtggtttattgagaatttggtatttttataggtagagaaggggtatttttggaaggtttttagggggaggtgatgttaagatgtagaggtaattttgggaattagggggtgagagaataggatgggtaaagaggttgggtaggagagggaggtttagaagttgggtagggaagtggtgtgaggtgtggaggggttgtggggtttttagtttgttcgggatgaatagaaagttagttaggtttgggggttttagggtttatataattatatagtatgtatagttatatttatatggttatatgcgtatatagttatatgacgttatttatagttttggattttattagtttaggaatttttatatgtagattagagtttttatggtgaacggaataggttttttttacgtcgtatatagatttagatgtatagttatatagaaattttagttttacgtgcgttgttataggtataggtttttgttagagttcggtagtagatatttggggaggcggcgagggtgtcgtggggtcgttaagtttgggtgtttggttttttggttttttttaatagttagttttttttaaagggtcggatggtttttaggacgggaacgatggtgttattgtttttcgggttattgcgttataggtttttttcgattacgtggttgtcggtgtttcgttgggggtggtggtgagcggtaattgtattcgtttttaatattttttgataggtttatagtatttttggtgggtttgatagaaggagttatttatggagagaggagggaggtaagagaggttaggggagagttttggttttgtgtgatttgagtaggatttttttttgagatttggtttatttgttaggaaagtggggatatggattggaaggttttttatatttgttttaggttgtatttttggttgaaaaggtagttttttttggttttagatagagttgaggatataagttgttttcgggttgtttgttttgaagtttttttaggtttatttatttggatggttagagtagttgataaggtaggttttagggtagtggtcggtttttagtttagtggttttgtagggagttagttttattttgtagagagttagttttcgaggttagaatcgtgttgtaggtaggattgggattcggttaggtattgtagtttttgtttaaagatttatttggtaaatcgtagttattgttttagttttttttattgtttgttgtgttaggttttgggtagtgatttattggggagatgatggtggttttggtgggtatatttgggtatatatcgtgttatatagtgtttagttttcgttttttattatataaagtttgggatgaaggaggtattttttaaggtttttttgaatttttttttcgaggtttttatttgtggttttttttattaagttaggtgatattttttttttttgttttaggtttggtttttgtatttttgtttttaagtatggcgagtatggcggttataggtagttgttcgaaagagtatcgcgtgttttttggttagttttagaagtagatagattttatgtaggatattagtagatttttggatttttatgtaagtatttgggtttttgtggtatttgagttttagagaattatggggttaggaagggagtgagaagtagggaggataggtttagttttattttatatggttaggtcggggaattgagtcgttatgttattttagttttaat

SEQ ID NO: 1727 - DNA, 2269 bp, Artificial Sequence
  chemically treated genomic DNA (Homo sapiens)
agtttgttggtgttttgtatgagatttgtttgtttttggagttggttaaggagtacgcggtattttttcgagtagttgtttatagtcgttatgttcgttatgtttggaaataggagtgtaaggattagatttaaggtagagaagaggggtgttatttgatttggtgaggaaagttatagatgggagtttcggggagggggtttaagagggttttgaaaggtgttttttttattttagattttgtgtagtggagggcgggggttgggtattgtgtggtacggtgtgtgtttaggtgtgtttattaaggttattattatttttttagtaagttattgtttagggtttgatatagtaagtagtgggagggattgagatagtggttgcgatttattaagtaggtttttgagtaaaggttgtagtgtttggtcggattttagttttgtttatagtacggttttaatttcgggagttgattttttgtaaggtgggattggttttttgtaagattattgggttaaagatcggttattgttttaggatttgttttgttagttgttttggttatttaggtagatgggtttgagagggttttagggtaggtagttcgggagtagtttgtgtttttagttttgtttagaattaggagaggttgtttttttaattagaggtgtagtttggaatagatgtggaagattttttagtttatgtttttatttttttgataggtaaattaagttttaggagaaggttttatttaggttatataaggttagggtttttttttgattttttttgttttttttttttttttataagtggttttttttgttaggtttattagggatgttgtgagtttgttagaaggtgttgggggcgggtatagttatcgtttattattatttttaacggggtatcggtagttacgtggtcggaaggggtttatggcgtaatggttcggaaggtagtgatattatcgttttcgttttaagaattattcggttttttggggaagattggttgttggggagggttaaggggttaggtatttaggtttagcgattttacggtattttcgtcgtttttttaggtatttgttgtcgggttttggtaggggtttgtgtttgtggtagcgtacgtgggattggggtttttgtgtggttgtgtatttgggtttgtgtgcggcgtgagggagatttgtttcgtttattatggggattttggtttgtatgtgggggtttttgggttggtgagatttagggttgtagatgacgttatatggttgtgtgcgtatgtggttatgtgggtgtggttgtgtatgttgtgtgattgtgtgggttttggggtttttaggtttggttgattttttatttatttcgggtaagttggaggttttataatttttttatattttatattatttttttgtttagtttttgagttttttttttttgtttagtttttttgtttattttatttttttattttttggtttttagagttgtttttatattttgatattatttttttttggaagttttttagggatgttttttttttatttgtggagatgttaggtttttagtggattattttttttgtttgattttttggtttttttttttttttagtatttttttgtttggcgtttggtttttttagttttcggagggtagagggtgtttttgttttttatcggtattcgtgggtagatttagtaggcgggttttggcggggaggaaggaagtatttattgagtagcgttttttgtgtgagtagtatttttatgttgggtgttcgtgtttcggttcgcgttcgttgggggtgatatttttcggttgggagttttgtaggttggtagttattttatgttcgttggggcgattggttaatattttatgaggtgggtggggatggggaggggggagggtaggttttttgggaatatgattttaaaaattaaaatttttacgggcggttaatgggcgtagggcgcggtgtatgttcgtttttttttttgtttttttcgaattcgtttttcgaggttagttttacgtttaaggatgatgtaaaatcgtagttttagtttttttagggtgagtggggaggaaaagggtttatgttatttttagggaattgggttagggatgggtaggagggatttcgagttgggtttttggaggttttaggttagttttggtttaggagttattggttttataggatacggtggttgggggttgaggggagcgagatatttttttttttgagt

SEQ ID NO: 1728 - DNA, 2269 bp, Artificial Sequence
  chemically treated genomic DNA (Homo sapiens)
atttaagaaggaagatgtttcgttttttttagtttttaattatcgtgttttgtgaggttaatggtttttgggttaagattggtttggggtttttagaggtttagttcgaagttttttttgtttatttttggtttagttttttgaagatggtatggattttttttttttttatttattttaggaaggttgaggttgcggttttatattatttttgggcgtagggttgatttcgaagaacgaattcgaagaaaataggaggaggagcgggtatatatcgcgttttgcgtttattggtcgttcgtggaaattttggtttttggggttatgtttttagaaggtttgtttttttttttttttatttttatttattttatgaggtgttggttaatcgttttagcgggtataaagtggttgttagtttgtagggtttttagtcgagaggtgttatttttagcgggcgcgggtcggagtacgggtatttagtatgggggtattgtttatatagaggacgttgtttagtaagtatttttttttttttcgttagaattcgtttgttgggtttgtttacgggtgtcggtggggagtagaggtattttttgtttttcgggaattggggaggttaggcgttaggtagaaggatgttgagaaggggagagagttaggaggttaggtagagagagtggtttattgagaatttggtatttttataggtagagaaggggtatttttggaaggtttttagggggaggtgatgttaagatgtagaggtaattttgggaattagggggtgagagaataggatgggtaaagaggttgggtaggagagggaggtttagaagttgggtagggaagtggtgtgaggtgtggaggggttgtggggtttttagtttgttcgggatgaatagaaagttagttaggtttgggggttttagggtttatataattatatagtatgtatagttatatttatatggttatatgcgtatatagttatatgacgttatttatagttttggattttattagtttaggaatttttatatgtagattagagtttttatggtgaacggaataggttttttttacgtcgtatatagatttagatgtatagttatatagaaattttagttttacgtgcgttgttataggtataggtttttgttagagttcggtagtagatatttggggaggcggcgagggtgtcgtggggtcgttaagtttgggtgtttggttttttggttttttttaatagttagttttttttaaagggtcggatggtttttaggacgggaacgatggtgttattgtttttcgggttattgcgttataggtttttttcgattacgtggttgtcggtgtttcgttgggggtggtggtgagcggtaattgtattcgtttttaatattttttgataggtttatagtatttttggtgggtttgatagaaggagttatttatggagagaggagggaggtaagagaggttaggggagagttttggttttgtgtgatttgagtaggatttttttttgagatttggtttatttgttaggaaagtggggatatggattggaaggttttttatatttgttttaggttgtatttttggttgaaaaggtagttttttttggttttagatagagttgaggatataagttgttttcgggttgtttgttttgaagtttttttaggtttatttatttggatggttagagtagttgataaggtaggttttagggtagtggtcggtttttagtttagtggttttgtagggagttagttttattttgtagagagttagttttcgaggttagaatcgtgttgtaggtaggattgggattcggttaggtattgtagtttttgtttaaagatttatttggtaaatcgtagttattgttttagttttttttattgtttgttgtgttaggttttgggtagtgatttattggggagatgatggtggttttggtgggtatatttgggtatatatcgtgttatatagtgtttagttttcgttttttattatataaagtttgggatgaaggaggtattttttaaggtttttttgaatttttttttcgaggtttttatttgtggttttttttattaagttaggtgatattttttttttttgttttaggtttggtttttgtatttttgtttttaagtatggcgagtatggcggttataggtagttgttcgaaagagtatcgcgtgttttttggttagttttagaagtagatagattttatgtaggatattagtagatt

SEQ ID NO: 1729 - DNA, 2496 bp, Artificial Sequence
  chemically treated genomic DNA (Homo sapiens)
tttgtattttgttttttttaggtagtggataaagtattttttttgttgttgtttttttgagatagagttttttatcgtttaggttagagtgtagtggcgtgattttagtttattgtaattttcgttttttgggtttaagtaatttttttgttttagttttttaagtagttgggattatagataattattattttatttagttgatttttttttttttttttgagatggagtttttttttgttatttaggttggagtgtagtggcgcgatttcggtttattgtaagtttcgtttgtagttgggattataggcgtttattattacgttcggttaattttgtttttgtatttttagtagagacggggttttattgtgttagttaggatggttttaattttttgatttcgtgatatgtttatttcggttttttaaagtgtcgggattatagacgtgagttatcgtgttaggtttaaagtatttttttatagtttttagtttgttgttgtgtttgttttttttacggttcgtatagtttgggtttgaattttggttttttatggttttgggtaagttggttaattttttgtgttttaatttttttatttgtaaagtggggttggggaaaaattttattttatagggaatattaagtgagtttatgaaagttttcggtgtgtggtatgcgataattattatttaagtataaggtatgtttatatgtattggttgtttattacgacgtattagtatttatttaagttatttttttttagagtttgtttggaatgtagaatcggttagtttttttttttaaatagtttttgtaatttttggttatttgtgtgggtagaggcgggagtgtgggtgtgtggttttgttttgggatagggatgacgagagagtatgtgtttgtgtttagagttgtttttttttttgtttaggggttattaaatatgtttatggtttttgttgtttggttaacggttatttcgggttgtcgttttttggttagatttggagtttataagttaattttagaaatgattggtcgatttagttgttgttattatattggtttagaaggagggtggggggaggacgggtcggggaggggtagtaaggggaagggatgtgtgtcggtgtgtgtggagagggtgttttttcgtttttgttttttcggttcggtggggttttttcgcggttattcggggagacgttttagatagtcgtggtttttgtgatttgtgttttttttgtagaaggtattattgggttgggttttagacgggtattttgcgagcggatcggcgagttttaatttttcggaatgcgttgttgggggttgcggtggtaggttttcggttttttggtttattttaggtttttttggtgttgagagttttcgaggtttgatttttttgtttgttgttcgtgttgtttattttgaaaataagagtgtttcggtggaaggatttgagaataaaatgttggggtaaatggatattcgtaagaattattttttttaggttttagttgttcgttaataatttttaaaaatgtgtttagaattatgagttaatttttattgtgaatttttgttcgtagacgttagggtttatatttttttttaattattagtaatttttgttttattggtgtttagttatggtcggggaagagttaggttttttttttcgtgttaataacgttgttgagtcgaaatgttaattttaatgtttttttttaaattgtaaattaagtatgtatgagtgttgggggaagggtaatggaagtttatggttgaaggttttaattttatgttattttttttgagttttgtttgagggaaggtgttttatttggtatttcggatagtaggtatttttttgaatgaagaagatttataggttttagtggttttatagtggggtagaagggggttatgttttgatatggagtttttttttaggagaggagaagattttattagttataggtttttgggttgttgtttttttgtagtttttttatggaggaggttaggagtggggaggttcggaatggggagtttagtcggtttttagtcggttttaagttgtttagtttggttttaattcgtaagtgtggggatttgggtttttattttgtagggtttggaatacgacgaggttgttatttttattttgtggttgtttaaaaagatgttgttttatttagtgtattagtttatggaggttgagtgttttattagggtttttagattttaataaggataatggtggttttgggtgttgtatttattgttgatttaagttgtatttttttatgtttgggtattatgtttagtgtgtattttgggagtagaaaagagaggggtttatatatttttaggttatggatgagttttagaaaataatagtggagaggagagagagaaaagaaggaagaggaggaggagaaggagaagaagagaaggaggaggaggaaaaaagtagga

SEQ ID NO: 1730 - DNA, 2496 bp, Artificial Sequence
  chemically treated genomic DNA (Homo sapiens)
ttttgttttttttttttttttttttttttttttttttttttttttttttttttttttttttttttttttttttttttattattattttttagaatttatttatagtttaagagtatatagattttttttttttttgtttttaaggtatatattggatatggtatttaggtataggagaatataatttaggttagtaatggatatagtatttaaggttattattatttttgttggagtttagaagttttagtgggatatttagtttttatgagttggtgtattgaatgaggtagtatttttttggatagttataaagtgaaagtaatagtttcgtcgtattttaggttttataggatagaagtttagatttttatatttgcgggttgaggttagattggatagtttggagtcgattgggagtcgattgggttttttatttcgggtttttttatttttggttttttttatggaaaagttgtaggaaggtagtagtttagaggtttgtagttggtgaggttttttttttttttgggagagagttttatgttaaagtatagtttttttttgttttattatggggttattgggatttgtgaattttttttatttagagaaatgtttgttattcggggtgttagataagatatttttttttagatagagtttaaggaaggtggtatgaaattgaaatttttagttatgaatttttattgttttttttttaatatttatatatgtttaatttgtagtttaaaaaagaatattaaaattaatatttcgatttaatagcgttgttaatacgaaaggggaagtttggttttttttcgattataattgaatattagtgaagtagaaattattggtagttgaggaaaaatataaattttgacgtttgcgggtaaagatttatagtggagattaatttatgattttaaatatatttttaaaaattattagcgaatagttggggtttgaggagagtgatttttacgaatgtttatttgttttagtattttgtttttaaatttttttatcgaaatatttttgtttttaaagtgagtagtacgggtaataggtaaaggaattaggtttcggaagtttttaatattagaaaggtttaaaatagattaaaagatcggaggtttgttatcgtagtttttagtagcgtatttcggaaaattaaaattcgtcgattcgttcgtaaggtgttcgtttaaaatttagtttaatagtattttttgtaaagaggatatagattataggaattacgattgtttaagacgttttttcgggtggtcgcgaagggattttatcgagtcgggaaagtaggagcgaaggagtattttttttatatatatcgatatatattttttttttttattgttttttttcgattcgttttttttttattttttttttgggttaatgtgatagtagtagttgagtcgattagttatttttaaaattagtttgtgagttttaggtttggttaggagacggtagttcggggtggtcgttgattaggtagtagagattatggatatatttggtggtttttgagtagggaaggggatagttttggatataagtatatgttttttcgttatttttgttttagggtagggttatatatttatattttcgtttttgtttatatagataattagaggttgtaggaattgtttgaggaggagagttggtcggttttatattttaggtagattttggaagaaaataatttgaatgaatgttggtgcgtcgtggtaaataattagtgtatgtaaatatattttatgtttaggtagtggttatcgtatgttatatatcgagggtttttatgaatttatttaatgttttttatgaggtagggtttttttttagttttattttataagtggggaaattgagatataaaaagttaattaatttgtttaaggttatggagagttagaatttaaatttaggttgtgcgggtcgtagaggaaatagatataatagtaaattaggggttataaaaaagtgttttgggtttggtacggtggtttacgtttgtaatttcggtattttgggaagtcgaggtgggtatattacgaggttaggagattgagattattttggttaatatagtgaaatttcgtttttattaaaaatataaaaataaaattagtcgggcgtggtggtgggcgtttgtagttttagttataggcggagtttgtagtaagtcgagatcgcgttattgtattttagtttgggtgatagagagagattttattttaaaaaaaaaaaaaaaaattagttgggtggggtagtggttgtttgtgattttagttatttgggaggttgaggtaggagaattgtttgaatttaggaggcggaggttgtaatgagttaaggttacgttattgtattttagtttaggcgataagagattttattttaaaaaaataataataaaaaaagtgttttgtttattgtttaaaaggagtaaagtataga

SEQ ID NO: 1731 - DNA, 2285 bp, Artificial Sequence
  chemically treated genomic DNA (Homo sapiens)
ttagtatttgatttgtggtatgtgttaatttattattgttaattgtagggatttagtgattttttcgaatttttgttatttttgttacggtttttgttttgtggaggtttgtggaatgggaagtggggaggggaaggagaagggggcggagttagtcggagttttttggttaggtttggagttattttgttttgttatagtttttatgggtttagagtgggttttggggtagagggtttgtaaggataggggtgggtggttttgtcgagggcggtgttttgagtaggttttattttttagtttgtttagtttggttttattttagttttgttgttttgttattttgtttttttgtgtttattttttattttttgtcggggatattttaaggtttgttaaggttggagtaggggtgggatttagttatttaataaacgtttttttggttatgtagggttgggtattggggtggggggttgatttggattttttaagatattagattgtttaattgtttagtttttattggggtaagtgtttcgttgagggtgaagggggttgtgagtgtttattagggagtttggataggtttcgttttttatagttgttttattttttggagttgttttggtggtagatggtattgttttagaaaggtgaggttggagttgttttttttattaggggtggttaaggacgtttttagggttttttatgtaggtttttagggttattttgggcgtggttgagggtatgtagattacgttgtgtttttttttattttttatgttcgtcgtttgtttgatatgttttttagttgttttgtttcgtagaagttgtgtggttttttttgtgagtagagtcgggttttatgatttttcggagtagcgttagggattttttttaggtataattttaaagggggttttaggatttgttaggtttacggaagtggtttttgtaattttttttttggtggtagtttttggtgtatttcggtaggggtagtttttttttattatagggattttgtgtgttaggttttagttgcgttgtcgttgaattatggatttaatagtagagaagttttgtaggtcgtttgtgttggttcgggaaatcggggtttagtcggggtttgttacggttttggtgtcgttttgttttttgtcggcgttacggagtaagcggagagatttattttttcggttttaagaggtattaacggaggaggttgagaggtaggagttgaataattgatggttttttttggtttaggatttgttgaaaatgatacggtgtaaggtagaggggttgagagtgttgattataaaatgttgagaagttattttagggcggttacggttagaaggaggatttttatttaggacggggttataggtatttggggcgggtgttagaggtttttgttttgggttattttagggggttaggatatttagaagttgggtttagaggtttatagggttggtttatttttattttttttttatacgtttgttattatcggtgttttagtttagtaattttatggttcgttggtttcgtttatagtttttattgttttttgtgtgttgggcgtgggtttttgagttttatttttagtttttttagttttaggagaggagtggaggataggggtttaacgtggggtgtggtgcggagcggggagggttgtggcgtttttttagtttttttttttttaatagttttagttttttttttggagaattttttatttgttgggtatatttggtttttttttattattttgtttttagtcgggagatttttatttagtgaaatagtgaaataggaagggttttttggttatttcgcgtagggcgtagggtatgtagcgggggagtggttcgtttttttagtgttttatcgtttatatttttaggggagtatatagacgggtaggttgtggggttttgattttatggtagtgtttgggggtgaatgtttatagtttttgaaattttagtgggagtgcgttatcgggtggttttttagtttagcggtttgtaggtggttggtgagagtgagtttaattagatttttgttttataataaggatagaggaatttttgtattttagggttttttgttttggtgtattaaaaaattggattatacgtgggtttggagaatgagtgtaaggttttattgagtggaagtagtttttagtagatgggggagttagaggggagatggtttttttttggagttaggtaatattttcgggatgtttagtagtttgt

SEQ ID NO: 1732 - DNA, 2285 bp, Artificial Sequence
  chemically treated genomic DNA (Homo sapiens)
ataagttgttggatatttcgagaatgttgtttgattttaggggaaaattattttttttttggtttttttatttgttgagagttatttttatttaataaaattttgtatttattttttaagtttacgtgtgatttaattttttggtatattaaggtaagaaattttgggatatagaaatttttttgtttttgttataaggtaggggtttaattgagtttatttttattagttatttatagatcgttagattaaaagattattcggtaacgtatttttattggggttttaagagttgtaaatatttatttttagatattgttatggggttagagttttatagtttgttcgtttgtatgtttttttagaggtgtgagcggtggggtattgaagaagcgagttattttttcgttgtatgttttgcgttttgcgcggggtaattagggaattttttttgttttattgttttattgggtagagatttttcggttggagatagaatggtggggagaggttagatgtgtttagtaggtaggggattttttaggggggaggttgaggttgttaggaaaggaggggttgagggggcgttatagtttttttcgtttcgtattatattttacgttaaatttttgttttttattttttttttggggttaaggaggttgagagtagagtttagaggtttacgtttagtatataggaggtagtgggggttgtggacggggttaacgagttatggggttgttgggttgaagtatcggtgatggtaggcgtgtgagagggaagtgggggtgagttagttttgtgggtttttaggtttagtttttgggtattttggttttttggaatgatttagggtaggagtttttgatattcgttttaaatgtttgtgatttcgttttgagtgggggttttttttttggtcgtgatcgttttggagtggttttttagtattttgtggttagtatttttagtttttttgttttgtatcgtgttatttttagtagattttgagttagagaaggttattaattatttagtttttgttttttagtttttttcgttagtattttttaaagtcgggaagataaattttttcgtttgtttcgtggcgtcgataggaagtagggcggtattaggatcgtgataggtttcggttgggtttcggtttttcgagttagtataggcggtttgtaaggtttttttgttattaaatttataatttagcggtaacgtagttggggtttggtatatagggtttttgtgatgaggaggggttgtttttgtcggaatgtattagaggttgttattagggagagagttataaggattattttcgtggatttggtaggttttagggttttttttaaaattgtgtttggggagagtttttggcgttgtttcggaggattatggagttcgattttatttataggggagattatatagtttttgcggggtaagatagttgaggagtatgttaggtaagcgacgggtatggggggtgggggggagtatagcgtggtttgtatgtttttagttacgtttagggtgattttggaggtttgtatggaagattttggaagcgtttttggttatttttggtggaagagatagttttagttttatttttttaggatagtgttatttgttattaaggtagttttagagagtgggatagttgtgagaggcgggatttgtttaggttttttgatgggtatttatagttttttttatttttagcgaggtatttgttttaatgaaaattgagtagttggataatttgatgttttggagggtttaggttagttttttattttaatgtttagttttgtataattaaggaagcgtttgttgaatggttgagttttatttttgttttaattttggtaggttttggagtgttttcggtaggaagtggagggtgaatatagggggataaagtaatagggtagtagagttggggtggggttaggttgggtagattggggaatgagatttatttagaatatcgttttcggtagagttatttatttttatttttgtaaattttttgttttagggtttattttaaatttatgagagttgtggtaggatagggtgattttaggtttggttaggaggtttcggttgatttcgttttttttttttttttttttttattttttattttataggtttttatagggtaggggtcgtgataggggtgatagaagttcggagaggttattgagtttttgtaattagtagtaatgagttgatatatgttataggttaagtgttaa

SEQ ID NO: 1733 - DNA, 2448 bp, Artificial Sequence
  chemically treated genomic DNA (Homo sapiens)
tgtgatattcgttgttgaacgaaatgggggttcgtttttaattttcggtaggagttggtgggttttttttttgttgtagtttgggaacgttttggagaaggttatatttacggtaaggtgagtgtagttttgaacgttgtagggtgaagttagtttgtataggacgtttttattggtttttgttttatgttttattgtgtttgggttcgggttatgtggtttaggataggggtggttttttatgaaattttttaaatttagatggaggagaagttatcgttacgaaggtaagtgttttttaggaggttggtggtcgtagtttttagttaggttagtgttgatttattttcgggatattgtatgtggtttttatagttgtgttaggtagtgtttgatggggaggggttgtggggatgtgtacgattttatttaggttttgtttttagaggggtttggttgtttttatagatttttaaatattttatgtatttatttttcgtatagttaaaatttatataataaaattaattttgttgaagattgtattttgttggtatttagtgtagttattatgttgtataattttatagtagtcgagttttcgttttcgttattttataaaaagtttcgtgtttatgaagtaatttttttttttgtagttatttttttagtttcggaagtttttgtttttttagatttttagaagtaaaggttgtagaggtttttttagattgggtattcggacgtttatttgaggtttttttttttttgtttttagtagggaagttaaagtaattgttatagggtttagttggtatagattttaggtttagttagtattagtagttgtttagtatgttttattttttttaggttttaggttttgggtttttgattttagagggttttggttattgggacggttggtagatgtaagatgggaagtagttttgatttttattatttttttttgggatacgtttatgttttgtttttgttatttttttttagttgtttgagggttggttggtgtgagtttaggtttttgtagggtatgttaggagtaagttgtgatttggtttcgggttgtggagtttatgttattttttattgaggattttgggttgttttgtttcgcgtacgggtattcgggttttgatagttcgtcgggttttgggttattagaggttttgaattgcgttttggtgatagttagttttttgtatggggtacgtatagatttgggtttaggttggggtatcgagatttttatatttagtagtcgcggtgaggttggtttgtttgtttttcggggttatttttgtcgtgtcgtttttttttttttttttgttttttttgttggttgtttttttttcgttttttttgggtaggtacggtcgggtgggggtgaggttttggtaaagttttttttgttttttagtttagtggcgtttatatgtgacggtgcgggggtagtttcgtgaaaagtttttttgtgttttttttttaattaagaaatagtagtaggtttcgggggtttaggttttacgttttttttgaacgttggtcgtggttataggcggttggatgggtaggtttagtagtggattttaaggaagaattttttaggtttattaggtagttttgttgtttttcgggggttttttttatattgttaggttattcggtaggtttgggaggttttttttattttcgggttttaggagttgagatggtattcgtaggagtttacgtgggatttgggtgtttggatttggggttttagatttgatttttttttttgttttgtggggtttttttgaggtttagtttttttttttgtgaaatggggagaataaggcgttttgttttttagaatttatatttagagagttagaagtttttttaggtttggataaagaggtgttcgttttttttaaattaaggtagagggatatttgagagggtgttttgagtttatttttttttgttttatttgggatgttcgtttgtgtttttttcgtatagttgtttatgtttttaggaaaacgagggtttttgttttttttttagaattttagattttgaggtaaaggttcggaaagaatttatagtttttacggtattattgttattgagcgggttttattttttagtttgggaggcggatttttttagagtaggggtgtttagtagggagggttgatcgaggggagttttgagagatttttgacgagaatagggggtttgtagaggaaataggttttttaaggttacggttacgtttagtgagattttagtttagtttttcggagtgttgtgtttagggttacgttgggataggtaagcggtgttatttttttttttgaagatattttatatttatgtggaaaaggagaacggtattttttatttatttggaggagggatagaggtaagggttgtttt

SEQ ID NO: 1734 - DNA, 2448 bp, Artificial Sequence
  chemically treated genomic DNA (Homo sapiens)
ggggtagtttttgtttttgttttttttttaggtgagtgaaaagtatcgttttttttttttatatgggtgtaaagtgtttttaggaaaagaggtgatatcgtttgtttgttttagcgtgattttgggtatagtatttcggaaagttgggttggagttttattgggcgtgatcgtgattttaggggatttgttttttttgtaggttttttgttttcgttaggggttttttagggtttttttcggttagttttttttgttgagtatttttgttttgagagagttcgttttttaggttggagggtaagattcgtttagtgataataatgtcgtgagaattgtgggtttttttcgagtttttgttttagaatttggggttttggaaaagagataagagttttcgtttttttgagggtatgggtagttatgcggaggagatatagacggatattttaggtgggatagggggaggtggatttaggatatttttttagatgtttttttgttttggtttggggaggacgggtatttttttgtttaggtttggaaggatttttagttttttgaatgtggattttggggggtagagcgttttattttttttattttatagaggggagggttgagttttagggaggttttatagaataggagggagaattaggtttgaaattttaggtttagatatttagattttacgtgggtttttgcgggtattattttagtttttgggattcgagggtggagaaagttttttagatttatcgggtggtttgataatgtgagaggagttttcggaaagtagtagggttgtttggtgggtttgggggatttttttttgaagtttattgttaggtttgtttatttagtcgtttgtgattacggttagcgtttagagaggacgtggggtttgggttttcggagtttgttgttattttttaattagggaggagatataaaggggttttttacgaggttgttttcgtatcgttatatgtgagcgttattgggttggaaaatagagggggttttgttagaattttatttttattcggtcgtgtttgtttagagagggcgggggaggagtaattaatagagggggtaggggagagggaggagacggtacggtagaggtggtttcgggaagtaggtaggttagttttatcgcggttgttggatgtggggatttcggtgttttagtttaggtttaggtttgtgcgtgttttatgtaaggggttgattgttattaggacgtaatttaaggtttttggtggtttagggttcggcgggttattagaattcggatgttcgtacgcgggatagagtagtttaggatttttagtggagagtagtatgggttttatagttcggggttaggttatagtttgtttttggtatattttataggagtttgggtttatattagttagtttttaggtagttgaggaaggatagtagaggtagggtatgggcgtgttttaggaggaggtggtgggggttagggttgttttttattttgtatttgttagtcgttttagtggttaggattttttgaagttagggatttaggatttgggatttggggagaatggggtatgttgagtaattgttggtgttggttgggtttggagtttgtgttagttgggttttgtagtagttgttttggtttttttgttgggggtaggagagagaggattttaggtggacgttcgagtgtttagtttggaaaggtttttgtagtttttgtttttgaaggtttgggagagtaggagttttcggggttgggagaatggttgtagagggagggattgttttataggtacggggttttttgtggggtgacggaaacgagaattcggttattgtggggttgtatagtatggtggttgtattagatgttagtagaatgtaatttttaatagggttgattttgttatgtgaattttaattatgcgaaaaataaatatataagatgtttgaaagtttgtaagggtagttagatttttttgagagtaggatttggatggggtcgtgtatatttttatagtttttttttattaagtattgtttggtataattgtgagggttatatgtagtgtttcggaggtgggttagtattggtttggttgggggttgcggttattaattttttggaaggtatttgttttcgtggcggtggttttttttttatttaaatttgggggattttatgaagggttatttttgttttgagttatatgattcgagtttagatataatgggatatgaagtagaggttagtagagacgttttgtgtagattggttttattttgtaacgtttagagttgtatttattttgtcgtgggtatggttttttttaaggcgtttttaggttgtaatagggaaaaggtttattagtttttgtcgagagttgggggcgggtttttatttcgtttagtagcgaatgttata

SEQ ID NO: 1735 - DNA, 2374 bp, Artificial Sequence
  chemically treated genomic DNA (Homo sapiens)
gggttttggggatttattgtatgttgggtgttgggatgggggtagatattgttttttttttttattttttgtttgattttttttttttttattttgttttattattttagtggttttaagtttgtaaggagatttataggtagtaggagatatgggttgtagagtgggatgggggtgagtatgggtgcggtgtgtatatatataagttgttagaggtattatttgttataagtttttagatgagtattttagtttaagaggtaggatattagggtggtaatagttttagagttgttatttcgagtgtgatattatttttttatgttttttttttgggttttaatttttttatgtgtagagaggaagtagtgatttatacggtttttttagttttgttattgtgatgattttattatattggattttttaatgatttagggatgttattcgtgttttgttaaggttatagtttgtagttagagaaagttttaaatttatgttttagggttttttttgagttttagatttttattgagaaggaaaatatattagtttttgggtttggtttttttttttatcgttatatttttattttatttcgtttgtgttttttttagtttcgtgggttgaaagtgttttttaaatatttaggtagttttttaggtaggattttaggggtgttttttaggaaattgaggaatttttattttttgaatattacgagtttgtttatatagtgatatttagcgatgattttggttttgttttttttttttttattttttacgagtttttagtttagaatatttggttagatttaggtcgggggagttagatttcggggttaagtaattagaattgggggtttttgtttgaggattttagtttttttttttaggtgttcgtttgatggggagatggttgatgtttagaatattttattggatagtttagggagtgtgggggtcgtggtagtgtttgtggtttttgttttaatttttttgttgggtatagtgggtaatgggttggtgttggtagtgtttttgtagtttggttcgagtgtttggtaggagtttggtagtattacggatttgtttatttttaatttggcggtggttgatttttgttttattttgtgttgcgtgtttttttaggttattatttatacgttggatgtttggttttttggggttttcgtttgtaaggtcgtgtatttgtttatttattttattatgtacgttagtagttttacgttggttgttgttttcgtggataggtgcgttgtgtttggggtttggttgggtagggttgtgggggcgggggttgggggaggagttttgaatagatttttattggttttaggaaggagagagtgggggattagaaagggaggtgggtgggaggaaataaaagttttttgatttttcgtaagtagtttttgggtatttgtagggcgtgtttgaggggattgttttgtttttttttttttttattgtgaatttttagaggacgtttttgagttttaagtggtagtatagggtttggtatatagtaagtgttttgtaagcgcgaaatgaatcgtaaaagaagtttacgaatgcgtttattagtttttttgttttgttttgttttgttgttttttttttttggattttggtttattgtaatttttgttttttgggttttagcgatttttttgttatagttttttgagtagttgggattataggttattatatttggttaattttttgtatttttagtagaaacggggttttgttatgttggataggttggtttcgaatttttgattttaagtgattcgttcgtttcggttttttaagtgttgggattataggcgtgagttatcgcgtttagtttagttattttttaattgtttatatttggttaagttgtgtatatatttgtttttatagtttgaaatttggggttaaatttaggtttattttagttgatgattttgggtaagttatttttttttggattttatttgacgtatttataaaataattttagaaataataagttatcgggatcgggtttttgttaggtgtaagggtttaagtattttgcgcgtttatatttttaattttcgttacgttttttacggtttataggaggcgtattgggtcgtagggttcgggcgcgggacgtggcgcgggtttttgcgggagggtatttgttcgtttcgttgattaggcgtttttcgtaggtatttggtcgtgcggtattcgttgcgttcgcgcgttttgcgtacgtcgcgtaacgttcgcgtcgtagtggggttggtgtggttgttggcggcgtttttttcggcgttttattttagttattacggtatcgtgcgttacgg

SEQ ID NO: 1736 - DNA, 2374 bp, Artificial Sequence
  chemically treated genomic DNA (Homo sapiens)
tcgtagcgtacggtgtcgtagtagttgaggtagggcgtcgagaagagcgtcgttagtagttatattagttttattgcggcgcgggcgttacgcggcgtgcgtagggcgcgcgagcgtagcgggtgtcgtacggttaggtatttgcggagggcgtttggttagcggggcgggtaggtgttttttcgtaggggttcgcgttacgtttcgcgttcgggttttgcggtttagtgcgttttttgtgaatcgtgggggacgtggcggggattaagggtgtgaacgcgtaaggtgtttaggtttttgtatttagtaagggttcgatttcggtgatttgttatttttaggattattttatggatgcgttagatgaggtttagagagaagtgatttgtttagggttattagttggagtgagtttggatttgattttaagttttaagttgtggaagtagatgtgtgtatagtttggttaggtgtgggtagttagaaaatagttgggttgggcgcggtggtttacgtttgtaattttagtatttgggaggtcgaggcgggcggattatttgaggttaggggttcgagattagtttgtttaatatggtaaaatttcgtttttattaaaaatataaaaaattagttaggtgtggtggtttgtaattttagttatttaggaggttgtggtaggagaatcgttggaatttaggaggtagaggttgtagtgagttaagatttaaaaaaaaaaaataataaaataaaataaaataaaaaaattgatgaacgtattcgtgagttttttttgcgatttatttcgcgtttatagagtatttattatgtgttagattttgtgttgttatttgagatttagaggcgttttttggaagtttatagtggaggaggggaagggtaggatagtttttttaagtacgttttgtaggtgtttagaggttgtttgcgaggggttagggagtttttgtttttttttatttatttttttttttggttttttatttttttttttttaaggttagtgaggatttgtttaggattttttttttaattttcgtttttatagttttgtttagttaggttttaggtatagcgtatttgtttacggagatagtagttagcgtaaagttgttggcgtatatggtgaggtagatgagtaggtgtacggttttgtagacgagggttttaaagagttaggtatttagcgtgtagatggtggtttggaagggtacgtagtataggatgaagtagaggttagttatcgttaggttgaggatgaataggttcgtggtgttgttaggtttttgttaggtattcgggttaggttgtaggagtattgttagtattagtttattgtttattgtgtttagtaggaagattagggtaaagattataggtattgttacggtttttatattttttgggttgtttagtgaaatgttttgggtattagttatttttttattagacgggtatttgggaagagaagttggaatttttaggtaagagtttttagttttggttgtttgatttcgggatttaattttttcgatttgggtttggttaggtgttttgggttggaagttcgtgggagatggaggaggggagagtagagttaaagttatcgttgagtgttattgtgtgagtaagttcgtggtgtttaaggggtgagagttttttagttttttaaggaatatttttggagttttgtttggaggattatttaggtatttgagggatatttttaatttacgaggttggggaaggtataagcgaagtaggatgaagatatggcgatggggggaggggttaaatttagaaattggtatgtttttttttttaatggggatttgaagtttaggggagattttgggatatgggtttagggttttttttggttataagttgtagttttagtaaaatacgggtaatatttttgagttattggagggtttagtatagtgagattattataatggtaaaattgggaagatcgtgtaggttattgttttttttttgtatatagggaaattgaggtttagagaggggatatgggaggataatattatattcgaaatggtagttttggggttgttgttattttggtattttgttttttaagttagagtgtttatttgagagtttgtaataggtggtgtttttgataatttgtgtgtgtgtatatcgtatttatgtttatttttattttattttatagtttatgttttttattgtttgtggatttttttgtaggtttgagattattggggtggtgggataaagtaggggaaaggggggttaggtagggagtagggaagaaaggtaatgtttgtttttattttagtatttagtatgtagtaggtttttaaagttt

SEQ ID NO: 1737 - DNA, 2500 bp, Artificial Sequence
  chemically treated genomic DNA (Homo sapiens)
tcgttgaattaggaggtttatttagttcggttattttatttaggattaagtttattgtttaaggcggaggtgggtgttgtttattttgggttttggggatttattgtatgttgggtgttgggatgggggtagatattgttttttttttttattttttgtttgattttttttttttttattttgttttattattttagtggttttaagtttgtaaggagatttataggtagtaggagatatgggttgtagagtgggatgggggtgagtatgggtgcggtgtgtatatatataagttgttagaggtattatttgttataagtttttagatgagtattttagtttaagaggtaggatattagggtggtaatagttttagagttgttatttcgagtgtgatattatttttttatgttttttttttgggttttaatttttttatgtgtagagaggaagtagtgatttatacggtttttttagttttgttattgtgatgattttattatattggattttttaatgatttagggatgttattcgtgttttgttaaggttatagtttgtagttagagaaagttttaaatttatgttttagggttttttttgagttttagatttttattgagaaggaaaatatattagtttttgggtttggtttttttttttatcgttatatttttattttatttcgtttgtgttttttttagtttcgtgggttgaaagtgttttttaaatatttaggtagttttttaggtaggattttaggggtgttttttaggaaattgaggaatttttattttttgaatattacgagtttgtttatatagtgatatttagcgatgattttggttttgttttttttttttttattttttacgagtttttagtttagaatatttggttagatttaggtcgggggagttagatttcggggttaagtaattagaattgggggtttttgtttgaggattttagtttttttttttaggtgttcgtttgatggggagatggttgatgtttagaatattttattggatagtttagggagtgtgggggtcgtggtagtgtttgtggtttttgttttaatttttttgttgggtatagtgggtaatgggttggtgttggtagtgtttttgtagtttggttcgagtgtttggtaggagtttggtagtattacggatttgtttatttttaatttggcggtggttgatttttgttttattttgtgttgcgtgtttttttaggttattatttatacgttggatgtttggttttttggggttttcgtttgtaaggtcgtgtatttgtttatttattttattatgtacgttagtagttttacgttggttgttgttttcgtggataggtgcgttgtgtttggggtttggttgggtagggttgtgggggcgggggttgggggaggagttttgaatagatttttattggttttaggaaggagagagtgggggattagaaagggaggtgggtgggaggaaataaaagttttttgatttttcgtaagtagtttttgggtatttgtagggcgtgtttgaggggattgttttgtttttttttttttttattgtgaatttttagaggacgtttttgagttttaagtggtagtatagggtttggtatatagtaagtgttttgtaagcgcgaaatgaatcgtaaaagaagtttacgaatgcgtttattagtttttttgttttgttttgttttgttgttttttttttttggattttggtttattgtaatttttgttttttgggttttagcgatttttttgttatagttttttgagtagttgggattataggttattatatttggttaattttttgtatttttagtagaaacggggttttgttatgttggataggttggtttcgaatttttgattttaagtgattcgttcgtttcggttttttaagtgttgggattataggcgtgagttatcgcgtttagtttagttattttttaattgtttatatttggttaagttgtgtatatatttgtttttatagtttgaaatttggggttaaatttaggtttattttagttgatgattttgggtaagttatttttttttggattttatttgacgtatttataaaataattttagaaataataagttatcgggatcgggtttttgttaggtgtaagggtttaagtattttgcgcgtttatatttttaattttcgttacgttttttacggtttataggaggcgtattgggtcgtagggttcgggcgcgggacgtggcgcgggtttttgcgggagggtatttgttcgtttcgttgattaggcgtttttcgtaggtatttggtcgtgcggtattcgttgcgttcgcgcgttttgcgtacgtcgcgtaacgttcgcgtcgtagtggggttggtgtggttgttggcggcgtttttttcggcgttttattttagttattacggtatcgtgcgttacggcgcgttggagttttgcgtgttcgtttgggaggacgcgcg

SEQ ID NO: 1738 - DNA, 2500 bp, Artificial Sequence
  chemically treated genomic DNA (Homo sapiens)
cgcgcgtttttttaggcgggtacgtagagttttagcgcgtcgtagcgtacggtgtcgtagtagttgaggtagggcgtcgagaagagcgtcgttagtagttatattagttttattgcggcgcgggcgttacgcggcgtgcgtagggcgcgcgagcgtagcgggtgtcgtacggttaggtatttgcggagggcgtttggttagcggggcgggtaggtgttttttcgtaggggttcgcgttacgtttcgcgttcgggttttgcggtttagtgcgttttttgtgaatcgtgggggacgtggcggggattaagggtgtgaacgcgtaaggtgtttaggtttttgtatttagtaagggttcgatttcggtgatttgttatttttaggattattttatggatgcgttagatgaggtttagagagaagtgatttgtttagggttattagttggagtgagtttggatttgattttaagttttaagttgtggaagtagatgtgtgtatagtttggttaggtgtgggtagttagaaaatagttgggttgggcgcggtggtttacgtttgtaattttagtatttgggaggtcgaggcgggcggattatttgaggttaggggttcgagattagtttgtttaatatggtaaaatttcgtttttattaaaaatataaaaaattagttaggtgtggtggtttgtaattttagttatttaggaggttgtggtaggagaatcgttggaatttaggaggtagaggttgtagtgagttaagatttaaaaaaaaaaaataataaaataaaataaaataaaaaaattgatgaacgtattcgtgagttttttttgcgatttatttcgcgtttatagagtatttattatgtgttagattttgtgttgttatttgagatttagaggcgttttttggaagtttatagtggaggaggggaagggtaggatagtttttttaagtacgttttgtaggtgtttagaggttgtttgcgaggggttagggagtttttgtttttttttatttatttttttttttggttttttatttttttttttttaaggttagtgaggatttgtttaggattttttttttaattttcgtttttatagttttgtttagttaggttttaggtatagcgtatttgtttacggagatagtagttagcgtaaagttgttggcgtatatggtgaggtagatgagtaggtgtacggttttgtagacgagggttttaaagagttaggtatttagcgtgtagatggtggtttggaagggtacgtagtataggatgaagtagaggttagttatcgttaggttgaggatgaataggttcgtggtgttgttaggtttttgttaggtattcgggttaggttgtaggagtattgttagtattagtttattgtttattgtgtttagtaggaagattagggtaaagattataggtattgttacggtttttatattttttgggttgtttagtgaaatgttttgggtattagttatttttttattagacgggtatttgggaagagaagttggaatttttaggtaagagtttttagttttggttgtttgatttcgggatttaattttttcgatttgggtttggttaggtgttttgggttggaagttcgtgggagatggaggaggggagagtagagttaaagttatcgttgagtgttattgtgtgagtaagttcgtggtgtttaaggggtgagagttttttagttttttaaggaatatttttggagttttgtttggaggattatttaggtatttgagggatatttttaatttacgaggttggggaaggtataagcgaagtaggatgaagatatggcgatggggggaggggttaaatttagaaattggtatgtttttttttttaatggggatttgaagtttaggggagattttgggatatgggtttagggttttttttggttataagttgtagttttagtaaaatacgggtaatatttttgagttattggagggtttagtatagtgagattattataatggtaaaattgggaagatcgtgtaggttattgttttttttttgtatatagggaaattgaggtttagagaggggatatgggaggataatattatattcgaaatggtagttttggggttgttgttattttggtattttgttttttaagttagagtgtttatttgagagtttgtaataggtggtgtttttgataatttgtgtgtgtgtatatcgtatttatgtttatttttattttattttatagtttatgttttttattgtttgtggatttttttgtaggtttgagattattggggtggtgggataaagtaggggaaaggggggttaggtagggagtagggaagaaaggtaatgtttgtttttattttagtatttagtatgtagtaggtttttaaagtttaggatgggtaatatttattttcgttttgggtagtgggtttgattttgggtggaatggtcgggttgggtgggttttttgatttagcgg

SEQ ID NO: 1739 - DNA, 2419 bp, Artificial Sequence
  chemically treated genomic DNA (Homo sapiens)
agcgttcgggggtagtttagtttttagttttttttatagttttatgaggaggttttagtatgttttttttttgttaaatgaggagattaagaaacgggttaattttttatttaggcgagaagggtatagagttgggatttgaatttggttaggtgtagttcggggtttttgttgttattaggggtatatggtggttggggtagggtggtaaagtaggagttcgggagtttatggtttatttaatttgatttttgaatttaatggggtttatgttttttcgttttttttggttatttttatttgttatttttttgtttttatatatagtgtttgttttttgttatttaattttaggggtttttttagttgggtgcgggattttggttgtgggggaaggaaggggatttttggggatagtttagttttttattttatttttttttttcgaggtgttataaatatagttaagagtgggaggtttcggtttttaggagaggagagagtatgagttttaggtagttttaaagatagggttttatttttaatgttcggagatgtttttgatttgtttagttatgtagttaagggagggataaatttagatttaaatttagggttttgtttttagtttggggtttttagaggtttcgtagtaattttattttatagatggttttttaaggggatttttttgtttttatttattttataagttttttgatgagtacgtaatatagggttgtttttttcggtatatgggttttattttatagaggttaggagggggttttcgtttgttttattttatatttcgtatttttttcgggtatttaggttatttatttattttttttttattttttcgggttgggggtttagtatatagagtttagggaagttttttattttatagtagtttttagttttttttgaatgggttgggaaggagagttgatttgggattggggatcgtttttttttttagttaggagttatgagagttgggtttaatttttttttaggggaattttaagataaagttgggggatgggagtttaggtagaaattgttgggggaattgagttagagttgaaagttttttttgtgatttttatttttagttttttggttggtttataggggtcgggagggaggtagggggatattatttggttgagatatggggcggtggtagcgcgcgttttttagtttttttcggtgttgggatcgtggttatttttttagggttttgttgagttttggttgttggggtcgtaaagattaaaagtttagagttagtttattttttgtgtagaggatagaggggtaaggtttggggtggagaggcggggagacgaggtttatgagaaagtttgaaattttttaagtatttagggttagataaagatttgttttttacgttgggggcggtatatatatatatatatatatatatatatatatatatatatatagatatatattgttaaataggggtttagttgtatataggagttaagggaacgtaggttttttttttttttttttttatattatttttacgttaatttatataggttatttaatatttttgacgtttttattcggttatatatatatttattaatacgtaggttttatataagtaggtttttttaggtgattttagcgttttattttttttttagtttgtaatatattattttttcgagatttttattttatttagttttttaggaagttttttatttcgtttagtatttagagatgattgttttttttagtttttaattttgtgggtatgtggtaggtgtttatatttatgaggtatatgagttattttgatataggtatataatgtataataattatattagggtaaatggggtatttattattttaagtatttattttttttttgtgttaaaatttaagtatatttttttagttatttttaaatgtataataaattattgttgattaaagttattttgttatgttattaaatattagattttatttattcgatttaattttgttttcgtatttaataataatttttatttttttaatttttattgttttttttatttttattattgttttttttatttttatgaatttaattgttttaatttttagtttttataaataagtgagaatatgtgagttttgtttttttgtgtttggtttgttttatttaatataatgatttttagttttaaatatgtggttgtaaagataggattttatttttttttatggttgaatagtattttattgtatatatgtattatattttttttatttatttatttgttgatgggtatttaggttgtttttaaattttgggtattgtgaatagtgttgtaataaatgtgggaatgtagatgttttttttatatattgattttttttt

SEQ ID NO: 1740 - DNA, 2419 bp, Artificial Sequence
  chemically treated genomic DNA (Homo sapiens)
gaaaggaaattagtatatggaagagatatttgtatttttatatttgttgtagtattgtttataatatttaggatttggaagtaatttaagtgtttattaatagatgaatgaataaagaaaatgtggtatatatatgtaatggagtattatttagttatgaaaaagaatgagattttgtttttgtaattatatgtttgaaattggaggttattatgttaagtgaaataggttaggtataaaaagataaagtttatatgtttttatttatttgtgggagttaaaaattaaaataattgaatttatggaaatgggaagggtagtgatggagatgggaagggtagtgggggttggaggggtggggattgttgttgggtacgaaaatagaattagatcgaatgaataagatttagtatttgatagtataatagggtgattttagttaataataatttattgtatatttaaaaataattaaaagagtatatttggattttaatataaagaaaggataaatatttgaggtgatggatattttatttattttgatgtgattattatatattgtatgtttgtattaaaatagtttatgtgttttatgaatatagatatttattatatgtttataaaattaaaaattaaaaaaaatagttatttttgaatgttaaacggagtaaggggttttttggaaggttgggtgaaatgggagtttcggaaagatggtgtgttgtaggttgggaggagggtgagacgttggggttatttagagggatttgtttgtgtgaagtttacgtattagtgggtatgtgtgtgatcggatggaggcgttagaggtgttgggtagtttgtgtgagttggcgtgggggtgatgtaggaggggagagagggagggtttgcgtttttttggtttttgtgtgtagttaggtttttatttgataatgtgtgtttgtgtgtgtgtgtgtgtgtgtgtgtgtgtgtgtgtgtgtgtgtgtcgtttttagcgtaggaggtagatttttatttggttttgggtgtttgaggagttttaggtttttttataagtttcgttttttcgtttttttattttaggttttgtttttttattttttgtataggaagtgggttggttttgggtttttagtttttgcggttttagtagttagagtttagtagggttttggagagatggttacggttttagtatcggggaggattggagagcgcgcgttgttatcgttttatgttttagttaggtgatgtttttttgtttttttttcggtttttgtggattagttagagggttgggagtgaaagttatagagaagatttttagttttgatttagtttttttagtagtttttgtttgaatttttattttttaattttgttttagaatttttttagggaggggttgggtttagtttttatggtttttggttggaggaaaaagcggtttttagttttaggttagtttttttttttaatttatttaggggaggttagggattgttgtgggatgaggggtttttttgggttttgtgtgttgggtttttaattcggagaggtggagaagggatgggtggatagtttgggtgttcggagagggtacgggatatggggtgggataggcgggagtttttttttgatttttgtggagtggggtttatatatcgggggaggtagttttgtgttgcgtgtttattaggaggtttgtggagtaagtggggatagaagggtttttttggagagttatttatgaagtgaagttgttgcgaggtttttgggagttttaggttggaggtagagttttgggtttgagtttgggtttgttttttttttggttgtatgattggataggttagaagtattttcggatattggggatgggattttatttttggggttgtttggagtttatgttttttttttttttgggggtcgaagttttttatttttaattgtgtttgtagtatttcgggggagggaggtggagtgaggagttgagttatttttaagggttttttttttttttttatagttagggtttcgtatttagttggagaagtttttgaagttaaatagtaagagataagtattgtgtatgggagtaggggggtggtaggtggaggtggttagagaggacgaggggatataggttttattgagtttagaggttaagttggatgaattatgggttttcgagtttttgttttattattttgttttagttattatatatttttgatggtagtaggggtttcgaattgtatttgattaggtttaaattttagttttatgtttttttcgtttgggtgagaggttgattcgttttttagtttttttatttggtaaaaaggaggtatattagagtttttttatggggttgtagggagggttaaaagttgaattattttcgagcgtt

SEQ ID NO: 1741 - DNA, 2483 bp, Artificial Sequence
  chemically treated genomic DNA (Homo sapiens)
gtggacggaattgggtggtaggttgtggttttaggatatgtggttagattggttgagggtaggagggtgtagtattgattgtaattgtgaaagcgtagaattttttcgtggaaagtggtttggaatatggtttaatcgaatattattattttataattgaggaatgtgaagtttgagtttttaagtttttaaattcgtttgaaatgagaatatagatatatatatagatatgtatatatatatatatatagattatagatatatatatagatatgtatatatatatatatagattatagatatatatatagatatgtatatatatatatagattatagatatatatagagatatataagatgtatatagatatgtatatatgtatatatatagatatatagatgtaatatagatagatacgtatagatatatatagatatatatatagatatgtaaagatatatatagatatatatagatatgtaaaaatataaagatatataggtttatatagatatagatatatatagatgtatatagatatagatatgtaaaaacgtataaatatatatagatatagatagatttatgtatatattgatacgtagatatatatattgatatatagttttagggaggttgagtcgggtgttgggttagtttatagatttgtttttattatggtttttgatatatgggggtggttatgaggatgggggaggtcgtggggatagaagtatagtcggtttgatttaggcgggttagagtttatcgggttttggtttttcgtttttaggtgggcggttttagtttttttattttttcgggtttgggtaggttttgttttatcgggtattgttttggtttttttggtatttaggtaatttttaggtaggtttggttgggtattggtgtggggtttggtttatatcggggggtgggaagaagggttttgtttcgtttttttgtatgtgggttttgttttttgtagaataattttaggtttgtaatggtgttggtatttgttagagtaaagtagaatttttttttttttagattttagtggttgagttgggtcgttagggtagggatggtgagggtttaaatgttagggtagagtaggttacggtatttcgtttatttataaatgttttcgtagattttggtgatggttgtattgggggtgtagtttttagaattattcgaagtttacgtagattgtttttttaagtacgggggtgggggaggttggttttttgagtagggttcggtttttgtattagtgtagttttattttttttttagtttaggtttaggttgttgggggtgtagagagggcgagttgtaagtggaggtgagaagggagttcgtgggacgtaggtttagagagaagttttcgaggaatttttttgttttttttacgagcggagttttggggtagtttcgtgtttttgttatagttattttaggagatgatggttgtgggttgtgtttgtgggtgtgtgtatttgtgtatttgtgtgtgtgtgaagagggagagagatagaggggagtgagatagagatttggagaggggatgggagagagagattggaaggggaaggaggaggagagaggtaggaaagtagagagggatagggagagtgcggagggataggattattagggaaatagggagagggagggagaagagagggagagaggaggtgtgagaaatagtaggagagagagggagggcgcgggagagagagggattttaagaagggggaatttttttatagtttttttttattgttttttagagatatttttggggtcgtttttgtagagggggttgttgcgagttgttggagggagtgagggtgatgcgtttttcggtgttttaaaatgaggttttcgtttgtattttagtaatttagatttagggaaaatattattaggattttttaatagtaagggaggttttgttagataggtttaagtttttaggaagttgggttttgtttttgagttgggggtttttaggtttttgttagagttatttttttttaagatatttataagtcggtttttagtaaattttaaacgttacggttgtttttatggcgttgtttttttatttttttatttttaaattgtaggatttttaattttatttaaaatagcggatgtttttttgttttttggggtattaggatgtgttgtgagtgttgagggtagacgtgggattcggaaggtttagttgggaatttacgttttgtaatgagttgttttgagtttttggacgaggtggaaaattattttagttttagttttttgtaaagatagattagtagttatatttttttacgggttttttgtgatgttattgaggcggtgaaaggagtatttgtttttaatggtatttattattaagtcggattttagtaattatttgcgtggtaggagttattatattggagtttcgtagtagttaaggagag

SEQ ID NO: 1742 - DNA, 2483 bp, Artificial Sequence
  chemically treated genomic DNA (Homo sapiens)
ttttttttggttattgcgaggttttagtgtgatagtttttgttacgtagatggttgttgagattcgatttaatggtgggtgttattagaggtaggtgttttttttatcgttttagtgatattataaagaattcgtggaggggtgtaattgttgatttgtttttataggaaattgagattggagtaattttttatttcgtttaaggatttagggtagtttattgtagagcgtgggtttttagttgggtttttcggattttacgtttgtttttagtatttataatatattttggtgttttagaaaatagagaaatattcgttgttttgaatagaattaggaattttatagtttagaggtagagaagtgagagagtaacgttatgggaataatcgtggcgtttagaatttattggggatcggtttgtaggtgttttaagaggaagtggttttggtaggggtttgaagatttttagtttaggggtagggtttagttttttggaggtttgggtttgtttgatagagttttttttgttgttgaggggttttggtggtgttttttttgggtttgggttgttggagtgtaggcggaggttttattttggggtatcgggagacgtattatttttattttttttagtagttcgtagtaattttttttgtagaggcggttttagggatgtttttgagagatagtgggagaaagttgtagggaggttttttttttttggaatttttttttttttcgcgtttttttttttttttttgttgttttttatatttttttttttttttttttttttttttttttttttgtttttttaatggttttgttttttcgtattttttttgtttttttttgtttttttgtttttttttttttttttttttttttaattttttttttttattttttttttaggtttttgttttatttttttttgtttttttttttttttatatatatataggtgtataaatgtatatatttataaatatagtttatagttattattttttgagataattgtggtagaaatacggagttgttttaaggtttcgttcgtgaagggaatagagaggtttttcggaggtttttttttgagtttgcgttttacgagttttttttttatttttatttgtagttcgttttttttgtatttttagtagtttggatttgggttgggagggaggtggggttgtattggtgtagaggtcgggttttgtttagggggttagttttttttattttcgtgtttgggggagtagtttacgtgagtttcgagtggttttgggggttgtatttttagtatagttattattagggtttgcggagatatttgtgggtggacgggatgtcgtggtttgttttgttttggtatttgaatttttattatttttgttttgacggtttagtttagttattggagtttgggaggagggaggttttgttttgttttgatagatgttaatattattgtaggtttgaggttgttttgtagaagatagagtttatatgtagggagacggggtaggatttttttttttatttttcggtatgagttaggttttatattagtgtttagttaggtttgtttaggggttgtttgggtgttaggggggttaaggtagtgttcggtgggatagagtttgtttagattcgaggggatggaggggttggagtcgtttatttgggaacgaaggattagagttcggtgagttttggttcgtttgggttaggtcggttgtgtttttgtttttacggttttttttatttttatggttatttttatgtgttagaagttatggtggaagtaagtttgtgagttaatttagtattcggtttagtttttttgagattgtgtgttagtgtgtgtgtttgcgtgttagtgtgtgtatgggtttgtttgtgtttgtgtgtgtttgtgcgtttttgtatgtttgtgtttgtgtgtatttgtatgtgtttgtgtttgtgtgagtttgtgtgtttttgtgtttttatatgtttgtgtgtatttgtgtgtgtttttgtatgtttgtgtgtgtgtttgtatgtgtttgtgcgtgtttgtttatattgtatttgtgtgtttgtgtgtgtgtatgtgtgtatgtttgtgtgtattttgtgtgtttttgtgtgtgtttgtggtttgtgtgtgtgtgtgtatgtttgtgtgtgtgtttgtggtttgtgtgtgtgtgtgtgtatgtttatgtgtgtgtttgtggtttgtgtgtgtgtgtgtgtgtatgtttgtgtgtgtgtttgtgtttttattttagacgggtttgggagtttagaaatttagattttatattttttagttgtaggatgatgatgttcgattggattatgttttaagttattttttacgagaaaattttacgtttttataattgtagttaatattgtatttttttatttttagttaatttggttatatgttttaaaattatagtttgttatttagtttcgtttat

SEQ ID NO: 1743 - DNA, 2439 bp, Artificial Sequence
  chemically treated genomic DNA (Homo sapiens)
tagttgggattgtaggtacgtattattatgtttagttaatttttgtatttttagtagagacggggttttattatgttggttaggttggttttaaatttttgattttgtgatttattcgttttagatttttaaagcgttaggattataagcgtgagttattgtgtttagtttcgagtaaagttttaaaagtggaatgggtttttcgtttttaacgtaggttttttatatggtagttttattaaacggagtagattttatttttatgtatatgaaataatagtattaagttatttttttttttgtttataatattttagttaagttggttttttttttatttttaagatattgtaaatttttttttatattggagttttttatgttgttttttcggttgagatgtttgtttttgttttttttatcggttaggtttcgtttttgtaagttttagtgtaaatgtttttgttaaagttgtttattttgatttttttttaatttaaattaggtttttttgataattttttattatttttgtttatttgttttttttttagaatttattatattttatttattatttttcgagatggagttttgttttttttgtttaggtggagagtaatgatttgtttttattttattaaaatttttgtttttcgggttcgggattattttgtcgtaggtttttaagtagttgagattataggagtttgttattacgtttggttaatttttttgtatttttagtagagacggggttttattatgttggttaggttggtttcgaatttttgattttaggtgattcgattgttttagttttttaaaatgttgagattataggcgcgagttatcgcgttaggtttatgttttgtaattatataacgtgttttgttatttttgtaatttgtgttgtttttttttacgaaggtataggtatatttgtttagtttttggttacgtgggtatttggcgttgagtatttatttgttcgtgttgattgatgtttttttttagtttttattttttttttagaagttttttttttttgtttcgagaggggttgagttagtcgtggtttttttttatttcgattttagtggagataagtcggggaagtttttgggagttgcgcgggtgagtagagttgagattcggtatggttgtattggtcgggttattgtagggtgattggcggttcggtttgataatacgtttatttgagttatttttggtaaaggttattaggttttaggatggaatacgtatgggggaaatgtttttttcgtgatacgtttatttcgttttaaagtgagacgagggagggagggcgcggttgttaggtaatgaagtttagagtttattagagttgagggattgatgtgttgcgtatgggttgggttttatttttaggaagtttaggataaaattttgtttatgttagagggttttggttaaattttgttttgtgtgtttgggtgaagttttgtttttataagtggttttagtttttttagagtaagaattatttgtattttatttatttatattatttatttatttatttatttgagatggagttttattttgtttattaggttggagtatagtggtgtaatttcggtttattgcgaattttatttttcgggtttaattgatttttttagtttagttttttaagtagttgagattataggtatgtgttattatatttagttaatttttgtatttttagtagagatagggttttgtcgtgttggttaggttggtttcgaatatttgattttaggtgatttgttcgttttggtttattaaagtgttgggattataggcgtgagttatcgcgttcggtttgttttttaaaatttttatttgatagatgaggaaatggaggtttaggtttcgttgtattaagaagagggttttggattttgatttaggtttgggtgaagtttaggttttttgatttagggtggaggtataaatagggtaaataggtaaaaataagcgaaataaataaaaaaaaagtataattattaatgttattgaaaagaattatttaagattttgaggttaggtgcggtggtttacgtttgtaattttagtattttgggaggtcgaggtaggcggattatgaggttaggagatcgagattattttggttaatatattgaaattttgtttttattaaaaatatataaaaaattagttggtgtggtggtatacgtttgtagttttagttatttgggaggttgaagtaggaggattatttgaatttaggaggtggaggttatagtgagtcgagattgtgttattgtattttagtttgggcgagagagtaagagtttattttaaaaaaaagaaaaaaaaagattttgaaatgtaaagttgtaaaattttgtatttttttttatagttttaggtttgttgataggtaga

SEQ ID NO: 1744 - DNA, 2439 bp, Artificial Sequence
  chemically treated genomic DNA (Homo sapiens)
tttgtttgttagtaagtttggggttgtagagaagggtataggattttatagttttatattttaaaattttttttttttttttttttgagatggatttttgttttttcgtttaggttggagtgtagtggtataatttcggtttattgtaatttttattttttgggtttaagtgatttttttgttttagttttttaagtagttgggattataggcgtgtgttattatattagttaattttttgtgtgtttttagtagagatagggttttaatgtgttagttaggatggtttcgattttttgattttatgattcgtttgtttcggttttttaaagtgttgagattataggcgtgagttatcgtatttggttttaaagttttaagtaattttttttaatggtattagtgattatgttttttttttgtttgtttcgtttgtttttatttgtttattttgtttatatttttattttaagttaagaggtttgagttttatttagatttgggttaggatttagagttttttttttagtgtagcgaggtttgggtttttatttttttatttgttaaatagaaattttaaaaaataggtcgggcgcggtggtttacgtttgtaattttagtattttggtaggttaaggcgggtagattatttgaggttaggtgttcgagattagtttggttaatacggtaaaattttgtttttattaaaaatataaaaattagttggatgtggtggtatatgtttgtgattttagttatttgggaggttgagttaggagaattagttgaattcgggaggtggagttcgtagtgagtcgagattgtattattgtattttagtttggtagatagagtgagattttattttaaatgaataaataaataaataatataaataaataaaatataaataatttttattttgaaggaattaaaattatttgtgaagataggattttatttaaatatataggatagaatttggttaaagttttttaatatgaatagggttttgttttgagttttttggaaatgagatttagtttatacgtaatatattaattttttaattttagtaaattttagattttattatttggtagtcgcgttttttttttttcgttttattttagagcgaggtgggcgtgttacggaagaggtattttttttatgcgtgttttattttggagtttggtaatttttgttaaagatgatttaggtaaacgtgttattaagtcgagtcgttagttattttgtagtgattcggttagtatagttatgtcgggttttagttttgtttattcgcgtagtttttagaaattttttcggtttgtttttattggaatcgggatggaagggagttacggttggtttagtttttttcggagtagaaagaggaaatttttgaaaagaagatgggggttgggggaggatattaattagtacggataagtaagtatttagcgttaggtgtttacgtggttaggaattaaatagatgtgtttgtgttttcgtaaaggagggtaatataggttataaaaataataagatacgttatgtgattataaagtataggtttggcgcggtggttcgcgtttgtaattttagtattttgggaggttgaggtagtcggattatttgaggttaggagttcgagattagtttggttaatatggtgaaatttcgtttttattaaaaatataaaaaaattagttaggcgtggtggtaggtttttgtaattttagttatttgggagtttgcggtaggataatttcgaattcgggaggtagaggttttggtgaggtgagggtaggttattgttttttatttgggtaaaaagagtaaaattttatttcgaaaaataataaataaagtatggtaagttttagaaagaaaataaatgagtaggaatgataaaaggttattaagaggatttgatttaaattggggaggggttaagatggataattttaataggagtatttatattgagatttgtaggagcgggatttggtcggtgaagagggtaaggataagtattttagtcgaaggaatagtatagaggattttaatgtgggaaagagtttgtagtgttttagaaatggaaaaggggttaatttagttaaaatattgtgagtaagggggagagtggtttgatgttattattttatatatataaagataaaatttatttcgtttaataaagttgttatgtggggagtttacgttgggaacgggaaatttattttatttttaaaattttgttcgaggttgggtatagtggtttacgtttgtaattttagcgttttgggagtttgaggcgggtggattataaggttaggagtttgagattagtttggttaatatggtgaaatttcgtttttattagaaatataaaaattagttgggtatgatggtgcgtgtttgtaattttagtta

SEQ ID NO: 1745 - DNA, 2450 bp, Artificial Sequence
  chemically treated genomic DNA (Homo sapiens)
gattttggtttattgtaatttttattttttaggtttaagcgatttttttgttttagttttatcgggtagttgggattgtaggtacgtattattatgtttagttaatttttgtatttttagtagagacggggttttattatgttggttaggttggttttaaatttttgattttgtgatttattcgttttagatttttaaagcgttaggattataagcgtgagttattgtgtttagtttcgagtaaagttttaaaagtggaatgggtttttcgtttttaacgtaggttttttatatggtagttttattaaacggagtagattttatttttatgtatatgaaataatagtattaagttatttttttttttgtttataatattttagttaagttggttttttttttatttttaagatattgtaaatttttttttatattggagttttttatgttgttttttcggttgagatgtttgtttttgttttttttatcggttaggtttcgtttttgtaagttttagtgtaaatgtttttgttaaagttgtttattttgatttttttttaatttaaattaggtttttttgataattttttattatttttgtttatttgttttttttttagaatttattatattttatttattatttttcgagatggagttttgttttttttgtttaggtggagagtaatgatttgtttttattttattaaaatttttgtttttcgggttcgggattattttgtcgtaggtttttaagtagttgagattataggagtttgttattacgtttggttaatttttttgtatttttagtagagacggggttttattatgttggttaggttggtttcgaatttttgattttaggtgattcgattgttttagttttttaaaatgttgagattataggcgcgagttatcgcgttaggtttatgttttgtaattatataacgtgttttgttatttttgtaatttgtgttgtttttttttacgaaggtataggtatatttgtttagtttttggttacgtgggtatttggcgttgagtatttatttgttcgtgttgattgatgtttttttttagtttttattttttttttagaagttttttttttttgtttcgagaggggttgagttagtcgtggtttttttttatttcgattttagtggagataagtcggggaagtttttgggagttgcgcgggtgagtagagttgagattcggtatggttgtattggtcgggttattgtagggtgattggcggttcggtttgataatacgtttatttgagttatttttggtaaaggttattaggttttaggatggaatacgtatgggggaaatgtttttttcgtgatacgtttatttcgttttaaagtgagacgagggagggagggcgcggttgttaggtaatgaagtttagagtttattagagttgagggattgatgtgttgcgtatgggttgggttttatttttaggaagtttaggataaaattttgtttatgttagagggttttggttaaattttgttttgtgtgtttgggtgaagttttgtttttataagtggttttagtttttttagagtaagaattatttgtattttatttatttatattatttatttatttatttatttgagatggagttttattttgtttattaggttggagtatagtggtgtaatttcggtttattgcgaattttatttttcgggtttaattgatttttttagtttagttttttaagtagttgagattataggtatgtgttattatatttagttaatttttgtatttttagtagagatagggttttgtcgtgttggttaggttggtttcgaatatttgattttaggtgatttgttcgttttggtttattaaagtgttgggattataggcgtgagttatcgcgttcggtttgttttttaaaatttttatttgatagatgaggaaatggaggtttaggtttcgttgtattaagaagagggttttggattttgatttaggtttgggtgaagtttaggttttttgatttagggtggaggtataaatagggtaaataggtaaaaataagcgaaataaataaaaaaaaagtataattattaatgttattgaaaagaattatttaagattttgaggttaggtgcggtggtttacgtttgtaattttagtattttgggaggtcgaggtaggcggattatgaggttaggagatcgagattattttggttaatatattgaaattttgtttttattaaaaatatataaaaaattagttggtgtggtggtatacgtttgtagttttagttatttgggaggttgaagtaggaggattatttgaatttaggaggtggaggttatagtgagtcgagattgtgttattgtattttagtttgggcgagagagtaagagtttattttaaaaaaaagaaaaaaaaagattttgaaatgt

SEQ ID NO: 1746 - DNA, 2450 bp, Artificial Sequence
  chemically treated genomic DNA (Homo sapiens)
atattttaaaattttttttttttttttttttgagatggatttttgttttttcgtttaggttggagtgtagtggtataatttcggtttattgtaatttttattttttgggtttaagtgatttttttgttttagttttttaagtagttgggattataggcgtgtgttattatattagttaattttttgtgtgtttttagtagagatagggttttaatgtgttagttaggatggtttcgattttttgattttatgattcgtttgtttcggttttttaaagtgttgagattataggcgtgagttatcgtatttggttttaaagttttaagtaattttttttaatggtattagtgattatgttttttttttgtttgtttcgtttgtttttatttgtttattttgtttatatttttattttaagttaagaggtttgagttttatttagatttgggttaggatttagagttttttttttagtgtagcgaggtttgggtttttatttttttatttgttaaatagaaattttaaaaaataggtcgggcgcggtggtttacgtttgtaattttagtattttggtaggttaaggcgggtagattatttgaggttaggtgttcgagattagtttggttaatacggtaaaattttgtttttattaaaaatataaaaattagttggatgtggtggtatatgtttgtgattttagttatttgggaggttgagttaggagaattagttgaattcgggaggtggagttcgtagtgagtcgagattgtattattgtattttagtttggtagatagagtgagattttattttaaatgaataaataaataaataatataaataaataaaatataaataatttttattttgaaggaattaaaattatttgtgaagataggattttatttaaatatataggatagaatttggttaaagttttttaatatgaatagggttttgttttgagttttttggaaatgagatttagtttatacgtaatatattaattttttaattttagtaaattttagattttattatttggtagtcgcgttttttttttttcgttttattttagagcgaggtgggcgtgttacggaagaggtattttttttatgcgtgttttattttggagtttggtaatttttgttaaagatgatttaggtaaacgtgttattaagtcgagtcgttagttattttgtagtgattcggttagtatagttatgtcgggttttagttttgtttattcgcgtagtttttagaaattttttcggtttgtttttattggaatcgggatggaagggagttacggttggtttagtttttttcggagtagaaagaggaaatttttgaaaagaagatgggggttgggggaggatattaattagtacggataagtaagtatttagcgttaggtgtttacgtggttaggaattaaatagatgtgtttgtgttttcgtaaaggagggtaatataggttataaaaataataagatacgttatgtgattataaagtataggtttggcgcggtggttcgcgtttgtaattttagtattttgggaggttgaggtagtcggattatttgaggttaggagttcgagattagtttggttaatatggtgaaatttcgtttttattaaaaatataaaaaaattagttaggcgtggtggtaggtttttgtaattttagttatttgggagtttgcggtaggataatttcgaattcgggaggtagaggttttggtgaggtgagggtaggttattgttttttatttgggtaaaaagagtaaaattttatttcgaaaaataataaataaagtatggtaagttttagaaagaaaataaatgagtaggaatgataaaaggttattaagaggatttgatttaaattggggaggggttaagatggataattttaataggagtatttatattgagatttgtaggagcgggatttggtcggtgaagagggtaaggataagtattttagtcgaaggaatagtatagaggattttaatgtgggaaagagtttgtagtgttttagaaatggaaaaggggttaatttagttaaaatattgtgagtaagggggagagtggtttgatgttattattttatatatataaagataaaatttatttcgtttaataaagttgttatgtggggagtttacgttgggaacgggaaatttattttatttttaaaattttgttcgaggttgggtatagtggtttacgtttgtaattttagcgttttgggagtttgaggcgggtggattataaggttaggagtttgagattagtttggttaatatggtgaaatttcgtttttattagaaatataaaaattagttgggtatgatggtgcgtgtttgtaattttagttattcggtggggttgaagtaggagaatcgtttgaatttgggaggtggaggttgtagtgaattaagatt

SEQ ID NO: 1747 - DNA, 2481 bp, Artificial Sequence
  chemically treated genomic DNA (Homo sapiens)
ggtataaagatattaggttgaataggttttttatttggggggtttgtggttttcgaaatgtattttagatattttgtataggtgtgcgtttttattttggttgttgtgtgagttgaggataaaattttggttgttgtgggagttgagtttgtgggtaggttgagttaggggtgggagtgagagggaggggtgagaggggtttgagtatttatttagcgtatgttttatagaattagtttgttttaggaagtttcggtgtttagtgttataatgtatattttagttttgtgtttgtatattagatttcgggttcgttttatatgggtgttttgagttgattttttttgttggagttgttgaagggttttgtaggttttaatttatagttagtttttaattttgttattagtaggggttttagtttatagtaacgtagttgtttttattgtaggttaattttgttatagcgttgttaatttgaaatatttagtttagagtgagtttttggggaggcgggaggttgtttaagtattttatttgttgtgtgggtaagaagcggtttgtattttattagagtttggggatttaggatttagatttgttgtttcgtagttgtgtgattttgggaaggttaggttttattttgggtgtgttttttttttttgaagatttaattcggtttgtgtgttaggagtggagggtttgttggagtttgaggaagatggtagttgggtcggtagtagggtgagtagggtttgagtggggttaggttttttatattggataatgatgtttattgtaaagtttatgttttggatttttgataaatattttagtaatcgatttgatattttattatgtttaagttgatttgtttttatgttggatatgtgtttattaggacgtgtttttggttgttattggtagggtttggaatgaggatatttgttgtgtattttgttttggagttttagataggtaaaaaaatatttatgtggttttatttaggttatttttttgtttgtatgaattttaggttatttttagaaagggttttatagtttcggtgttttattttttgatttttgttaagtcgtttttagtagtagttggaattttttgaagtggttgttatagatgttggtaaagttcggtttgggatgtttttattttgtattaggtacggggttgtttttgttgtatatttatttggaaattatttatatgttaagtatcgtagaggtaaggggagtttgttattggattgcgtttaatacggttgtagggatatagataagtatattttttggtagaggtacgggttcggttggttggagttgtagtagttgtgtgtggttatagagtttttaaatgagggagatggatggtttcgttttatagtgtgtttagagtatgtttacggtgtttgggaagattagggatttattatgttcggttttggttttttttatagtgaagtttttttgttggtaggatttatggttaagtatgggggtaggggttgggggagttttgttagtgatttttcgtaggtagtaaggtttttgggagttggttaggaaaatagaaattttattttggagtaggtgcgtaaattaatagtttagaaattaataaggtttttattaaggattatgagttatttgtgttgttttgtttgttttggtatttgcgtaggatacggggtggggggcgggggaagtatatgttaatagggagttggtggtcgttttgagagttagttttttttttataatttgtttgaaatttttttttttgtagaagatggaatttagtatatttcgagagtttattgtataggttaggtgtatttatgtttattgtttttattagtaaaagagtaaaattaaaattaaataaacgaagattttggtaagattgtttgattttgttttgaggtgagtatatagtagtatcgggaaagtgcgtaatttataaagatggtgtagtttgtaggttaggaggggttggggtttgtcgagggtagttggggttttgtagtttgatttataatattgtatttagagcggggaggtgttgtttttaggtttatttgtgatttttgaggtataggtagagggtcgggcgtgtatgatattgtataggagtttttttcgtagtgtggaatttatttacgtcgtttgtttttttagtttttaaatgtatttggggtttgagattagaaatagtagaagttttggtggttagtggaatagttatttaagtggatttttattttttgggtattttttgagtatttttttgttaggtattgttttaggggttggtgacgggaagtttattttgtttatgaggttttttcggtatagaggtggatattgagggatcgttggtttatacgtatgttgaaatatgtgtttagttgatgtttttttaagtgagtttttttgtaggataggattatatagtgtttttaaa

SEQ ID NO: 1748 - DNA, 2481 bp, Artificial Sequence
  chemically treated genomic DNA (Homo sapiens)
tttgaggatattgtgtggttttgttttgtaggagggtttatttgggaagatattagttgagtatatattttaatatgcgtgtgagttagcggttttttagtgtttatttttgtgtcgaaagagttttatgggtaaggtgggtttttcgttattagtttttgaaatagtgtttagtagggaggtgtttaaagaatgtttaggagatgagggtttatttaggtaattattttattaattattagagtttttgttgtttttgattttagattttagatgtatttggggattgagggagtaggcgacgtgggtgggttttatattgcggagaggatttttatgtagtgttatatacgttcgattttttgtttgtattttaggagttataggtgggtttggagatagtattttttcgttttgagtgtagtgttgtggattaggttgtaaagttttagttgttttcgatagattttagttttttttgatttgtaggttgtattatttttatgagttacgtattttttcgatgttgttgtgtgtttattttaaggtaggattaagtaattttgttagagttttcgtttgtttgattttggttttgtttttttgttgatagaaatagtaaatataaatgtatttgatttgtgtagtgggttttcgagatgtgttgggttttattttttgtaaagagaaggattttaagtaagttatgagaaaggagttggtttttagagcggttattagttttttgttgatatgtgtttttttcgttttttatttcgtgttttgcgtaagtattagaataaataggatagtataggtggtttatggtttttggtgggaattttgttaatttttgagttgttggtttgcgtatttgttttaggatggagtttttgtttttttggttagtttttagaggttttgttgtttgcgagaagttattgatagagtttttttagtttttgtttttatgtttggttatggattttattagtaaggaggttttattgtgagggaaattagagtcgggtatggtgagtttttggtttttttaggtatcgtggatatgttttgggtatattgtgaagcgaggttatttattttttttatttggaagttttgtgattatatatagttgttgtagttttagttagtcgggttcgtgtttttgttagggaatgtgtttgtttgtatttttgtagtcgtgttgaacgtagtttaatggtagattttttttgtttttgcggtgtttggtatgtggatgatttttaggtgaatatgtagtagaggtagtttcgtgtttggtgtagggtggaggtattttaggtcgggttttgttaatatttgtggtagttattttaaagagttttagttgttgttgaagacgatttggtaaaggttagagagtgagatatcggggttatgagattttttttaagggtggtttgaggtttatataagtaaagagatgatttgggtgaagttatatggatatttttttgtttgtttggggttttaaagtaaggtgtataataagtgtttttattttaggttttgttagtggtagttaagagtacgttttggtagatatatgtttagtatggaaataaattaatttggatatagtggagtgttaggtcgattgttaagatgtttgttaaaaatttaggatatgggttttatagtggatattattgtttagtgtgggaagtttggttttatttagattttgtttattttgttatcgatttagttgttattttttttagattttagtaggttttttatttttagtatataggtcggattgaatttttaggaaagaagagtatatttagggtgggatttgatttttttaaggttatataattgcggagtagtagatttgggttttggatttttaaattttgatgagatgtaggtcgttttttgtttatatagtaggtaagatgtttggatagtttttcgtttttttaaaaatttattttgggttggatgttttaggttggtaacgttgtggtagagttagtttgtagtgaaaatagttgcgttgttgtaagttggggtttttgttgatgatagggttgggggttgattgtagattgaggtttgtagaattttttagtaattttagtagagggaattagtttaaggtatttatgtggagcgggttcggggtttggtgtgtaggtatagggttggagtgtgtattgtggtattgggtatcggaattttttggagtaggttagttttgtgaagtatgcgttgagtaggtgtttaggttttttttattttttttttttatttttatttttggtttagtttgtttataggtttagtttttatagtagttaggattttgtttttagtttatatagtagttaggatagagacgtatatttgtgtaaagtgtttaagatgtatttcggggattataggttttttagatgaaggatttgtttagtttgatgtttttgtgtt

SEQ ID NO: 1749 - DNA, 2223 bp, Artificial Sequence
  chemically treated genomic DNA (Homo sapiens)
gtttttatatcggtcgtgattttttttatgttttttttatttatttatttatttatttatttgtttatttattttatatttgtatattttttatgtttttagtattttattatatattagaatataaaaggtaattttgtttttatggggtttggagagtaatggggaaatagatgaataattttgtatgtgttttgaagttatagggaatttatatttaatttatatttgtttttttatagtaaagttttttgtagaaaggatttgaattaatttgttagaaaaggtataaggaataatatgatatattttaattaaagaagataattaaaattaaaggagaaagtgtttattgagtatttattatgttttaagtattttcgatatatttttttattttatggtttttatattttcgagttagtgttattttttttttagagataagtaaagcgaggttgattagttttagttgagagttaaatagttgagttaggttttaaagtttatatgatattatagaatagttgtcgatgagttttggatttgacgatgagttttttagtagtttgggggagaaggaaagtggaatatattattcgattgtttattagataagaaaaagttagatatttttttgaagggaagtaaagttttttttagtagtgaatttatttgtttttttttaagtgggagttggaagagagtttgtggggtggaatatagggggttttgttaggattgtttaagttgggcgtttttatggtatatatgtgaggaggttgttacgtgaatgtttatggttttttggaaaatgttcgtttttagtgaatatcgttttcggtgtttgtgtatgtgtacgtgtgtatgtgtatatgtgtttgtgtgtttttttttgttttattgttttttttttttttatttggttttttttttattttatttgtttgtttgtttgtttgtttgtttgtttttatttttgtttttttttggtaaaagtttttgttgtttaaaattttgttagtttttaggaagtgttgttttgttaaaagtttgtatacgagattttcgtgggttaggattgattttttttttatatagggttgggcggggtaagtaggaaggagtttgttatagttaaggtgacgtatttttgtcgggttagttcgaatagtagttgggtcggtaagcgataggagtacgggttattttttttttagaggcgtcggaatggatttgtgttatttaggtaagtaattgtcgttaatttttttgggttttagggtgtttttttttagaatgggatagtagtttttgttttatagggttttagataaaggaatatagcgtaggtgggaaatgtagttgtaagaagtaaatatttgtgggtttagtttgtgtgtttagttgcgttttaggggttggatatatagtagtagtaaagtagacgttgtttttttttttataggtttgtgttttagatgaggagatcggtagtgattttaatgtgattttatatgttagttgatggtaggtaggatgaagaatagtaaagtagggtaaggaagataggaatgtatggtggaaaaggttttaagaggagatgttgtttgatgagggatttgaggaagatgttagttaaggggttttttaaggaataaatattttagttagaaggaatagttagtttaaaggtttagaggtggatttagaaaagtgatttgcgattaagatgatgatgggatgttggtgatggcgatgtttgtttgggtgatataagggttttgaggtttttttttggttttcgggggttggggtggtttttggggaggttgaggacgttgtttagagttaggggagggttaggagtgagtaatagaggttttggttgaaattttttttagttattaagataatgtgtttggggagaaagaggagaaaggaggttgtaaagatggtgaggaaaagaatattagggtcgtgttttgggaggtaaattgaaggttcggtagaggggttaagtttttgtattttggatgttagtatgttttagagttgtaatagttttggtgaatacggttgttggaattttagaatttaagggttcgtgggagttgtttgttttttaggtttagatgattttagttttgtttaggagtatttttgttttaaacgtatttaatgtggagtagtttggtttcgtttattgggtatttttttttt

SEQ ID NO: 1750 - DNA, 2223 bp, Artificial Sequence
  chemically treated genomic DNA (Homo sapiens)
ggaagggggatgtttagtgggcggggttaggttgttttatattaggtgcgtttgaagtaagggtgtttttggataaggttgaggttatttggatttggggagtagatagtttttacgagtttttaggttttggaattttagtagtcgtgtttattagaattgttgtagttttggagtatgttgatatttagggtgtagaaatttggtttttttatcgggtttttaatttgttttttaaaatacgattttgatgtttttttttttattatttttgtagtttttttttttttttttttttttagatatattgttttagtagttggggagggttttaattagagtttttgttgtttatttttggtttttttttggttttaggtagcgtttttagtttttttaaagattattttaattttcgggggttaaaaaggggttttaaggtttttgtattatttagataagtatcgttattattaatattttattattattttaatcgtaagttatttttttgagtttatttttgagtttttggattggttgttttttttggttggaatgtttgttttttagaaagttttttagttgatattttttttaggttttttattagatagtatttttttttggggttttttttattatgtatttttgttttttttattttgttttattgttttttattttatttgttattaattgatatatggaattatattagagttattgtcggtttttttatttagagtataagtttatgaagggggaaatagcgtttgttttgttattgttgtgtgtttagtttttagaacgtaattggatatataggttgagtttataaatgtttgttttttgtagttgtattttttatttgcgttgtatttttttatttaggattttgtgaggtaggggttgttgttttattttaaaagagagtattttgaggtttagagaggttgacggtagttgtttatttgggtggtataggtttatttcgacgtttttggggaaaagatgattcgtgtttttgtcgtttgtcgatttagttgttgttcgggttggttcggtaaggatgcgttattttgattgtaataggtttttttttgtttgtttcgtttagttttgtgtggggaggaagttagttttggtttacgggggtttcgtgtgtaggtttttgataaaatagtattttttaaaaattggtagagttttgagtagtagggatttttgttagggagggatagaggtggaaataaataaataaataaataaataaatagatgaagtgaggggagggttagataaaaaagagaaagatagtgagatagaaagaaatatatagatatatatgtatatatatacgtatatatgtatagatatcgagggcgatgtttattgaggacgaatattttttaggggattatgggtatttacgtggtagtttttttatatatatgttataggagcgtttaatttggatagttttagtagggttttttgtgttttattttataagtttttttttaatttttatttgagaagagataaatgaatttattgttaggaagggttttgtttttttttaaagaaatatttggtttttttttgtttagtgaataatcgggtaatatgttttatttttttttttttttaggttgttgggaaatttatcgttaaatttaaagtttatcgatagttattttatgatgttatgtgaattttggggtttgatttagttgtttgatttttagttagggttagttagtttcgttttgtttatttttgaaaggggaataatattaattcggggatatggaaattatggagtgagaggatgtgtcggagatgtttgggatatagtaggtgtttaataaatatttttttttttgattttaattattttttttggttaaaatgtattatgttattttttgtgttttttttggtaggttggtttaaattttttttgtaaaaagttttgttgtaaagaaataggtataaattaaatgtgaattttttataattttaggatatatgtagagttatttatttgtttttttattattttttaggttttatgagggtaaggttattttttgtgttttggtgtgtggtaaaatgttggggatatagagggtgtgtaagtgtggaatgaatgaataaatgaatgaatgaatgaatgaatgaagggaatatggaagagattacggtcgatgtgaaagt

SEQ ID NO: 1751 - DNA, 2495 bp, Artificial Sequence
  chemically treated genomic DNA (Homo sapiens)
ttttcgatggatattggagttattatttttaatataatggaggatcgttttcgagtgttggagatttagaggtatagggagatgtttcgtttttcgggggatgttttttttttttattattattattttagtttttatggggattttttttttaaggttttttatggtattttattgttaagtttaagtttttttataggatttggttttatttttttttgtttttttcgtatttttttttttgtattttttttttggattttgggttttttaggatttagttttggtttttttttttttggttattttttataagattttgattattttcgtggttttttgggttatttgtgttattgttagttatttttaagttttcgattaaagtttaggtttttttttttgtggtttttgttttttagttagtttttttgtgtattttatagaattttatgtttaagtgtttttaattgaattttttattttttttttagttggttttttgttttcgatttttttatgttatttagcgagttttattgggtgttttggaggagtttaggtcggtggtttttttttttttatttgtttttagtggtttgggtttagttgtttattttttatttttttttgtttattttttttttttttttagttattttttgggtttttattattagtgttattgttggaaataggggttttttatgtttgttttgttgtatggatcgaagttcgtcggtcgtttcgggggttttttttattgggatattattttattttttttttattagggtatatttggtatatatttttattggggatttattatatttttttttttttttttttattagggtatacgtggtttttttttattgtagggtttttgtttgggttgatttagagacgtaaggatatagtgtttagggatttttttttgggggtttgtttattttttttttgtaaaatgggaagttgcgtgtcggtgattgtttcgtttataggtttttttttttttgggattggttagattttttttagatggttttatttttgttatggttgattggtttaggttggatacgtgatttaagtgaaatttaatgggatttttttttgtgattttgaattcggggaggagatttggagtttggaggtggtagcgatttgggagtcgcgtgggtttgtttgttttatatattgtttttttgtttttttttttaatttatggtttttttagaggataatttttttttttaaatttttcggacgaggtttttgtggtagtcgagagagttacgtagcgggggtgtttttttcgtttgtgggggagttttaggcggttcgtatagtttcgtggtggtcgggtttggttacgtgtgtttttcggtttttatgtggttttagtagggcgttcgttttttttttagggtttttttttttaggagggatagtaggaaggtaggtaaggataggatttgagtttatatttcgttcgcggttatttgtttgattaggaggaaggggaggggataggagtgattttacggaggttatttgggagttggggttgggcgattttagggttggatgattttagggttgggtgattttagggttgggtgattttagggttgggtgattttaaggttgggtgattttagggttggatgattttagggttgggtgattttagggttgattattggcggagtatttggggtgggtgttatgggtatttgagagggaattttgatttgagcggaggttagaatttttttttgaggaagtgttttattttattgagtttttagaggttggtggtaggttgaataggggattatgttagtagagggattgttttttagagattttggattattattacgatgggttgattttataaatttagttattgttatcggaggtttggttgaattttagagttttttttttagcgtcggttttttggtttgtaatggggagggttggatttttttgtattgatatttttatggtatggttgcgggaggggcgtttattttgttggtttggtggttgtggagcggtcggaggtggcgtgtgttaaagttgttgttggtgttttttttggttgttttggggtgatgataggagttgacggtttggtagtagtttttagggaggtagtagtcgggttggcggcgggtggtggcggtggtgggagggggtttttggagagaataaagtattgaggatgttgggttttaggggcgatagaggagtgggggatgggggtagggttttggagtgtgtggtttatagggaggttatggtacgggtgtgtgtgcgggtgtaggatttggaatttatttcgtggttgtgtgagtttaggtaggttatttagtttttttgggttttagtttttatagttgtgtaattggaataatattattattatattattgtatttttagtgttgagagtagtgagtggtatagagtaggtattta

SEQ ID NO: 1752 - DNA, 2495 bp, Artificial Sequence
  chemically treated genomic DNA (Homo sapiens)
tgaatgtttattttgtgttatttattatttttagtattggggatataataatgtaatgatggtattgttttaattgtataattgtggaaattgaggtttagagaggttaagtgatttgtttgggtttatataattacgaggtgggttttaaattttatattcgtatatatattcgtgttatggtttttttgtgggttatatattttagaattttgtttttattttttatttttttgtcgtttttggagtttagtatttttagtgttttgttttttttagaagtttttttttattatcgttattattcgtcgttagttcggttgttgtttttttgggagttgttgttaagtcgttagtttttgttattattttaaggtagttagagggagtattagtagtagttttggtatacgttattttcggtcgttttatagttattaggttagtaggatgggcgtttttttcgtagttatgttatgggagtattagtgtagggggatttagttttttttattataaattaagaaatcgacgttggagaagaaattttgaagtttagttaggttttcggtgatagtggttaaatttgtaaaattaatttatcgtggtgatgatttaaagtttttggaaggtagtttttttgttggtatagttttttgtttaatttgttattagtttttgggagtttagtggggtggggtatttttttagaggagggttttgattttcgtttaggttaaagtttttttttaggtgtttatggtatttattttaggtgtttcgttaatagttagttttggggttatttagttttgaggttatttagttttgaggttatttagttttgaagttatttagttttgagattatttagttttgaggttatttagttttgaggttatttagttttggggtcgtttagttttagtttttaggtgattttcgtggaattatttttgttttttttttttttttttggttaggtaggtgatcgcggacgaggtgtggatttaggttttgtttttgtttgtttttttgttattttttttgggggaggaagttttgggagggaggcgggcgttttgttggggttatatggggatcgaggagtatacgtggttaggttcgattattacgagattgtgcgggtcgtttggggtttttttataggcggggaaggtattttcgttgcgtgattttttcggttgttataggaatttcgttcgaggagtttaaggaaaaaggttgttttttgagggggttataggttgaaggaaggggtaagaaggtagtgtgtggaatagataggtttacgcggtttttaagtcgttgttatttttaggttttaggtttttttttcgggtttagaattataggagagaattttattgggttttatttgggttacgtgtttagtttggattaattagttatggtaggggtggggttatttggagggagtttggttagttttagagaagaaagagtttgtgggcgaggtagttatcgatacgtagttttttattttataggagggaggtggataggtttttaaggaaagatttttgggtattgtgtttttgcgtttttggattaatttagataaaggttttgtagtgggagggagttacgtgtgttttggtgaagaggaggaagaagaggtgtggtaggtttttagtggaggtgtgtattaggtgtgttttggtggagaggaagtagggtaatgttttaatggagaggattttcgaggcggtcgacggatttcggtttatgtagtaagatagatatgagagatttttgtttttaataatgatattggtaataggagtttaggagatgattgggaggagggagggagtggatagggagagatagagggtgagtagttgaatttaggttattgaggataggtagagggagaggagttatcggtttgggtttttttaggatatttagtggggttcgttgggtgatatggggggatcgagggtaggaagttagttagggggaggatgaagagtttagttggaaatatttgagtatgaggttttgtggggtatataagagagttggttagagggtaggggttataaggagagaggtttgagttttgatcggggatttaggggtgattggtagtgatataggtggtttaggaggttacgggagtagttaggattttataggaaatggttagaagagagggggttaggattgggttttgaggaatttaaaatttaggagaagggtgtagaggaaggagtgcggggagagtagggaggggtgagattagattttgtaggagaatttggatttagtaatgggatgttataggggattttgaggagagggtttttatgggggttaggatgatggtgataagaaggggagatatttttcgaaaaacgaggtatttttttatgtttttgagtttttagtattcgggagcgattttttattatgttgagaataatgattttagtgtttatcggggg

SEQ ID NO: 1753 - DNA, 2390 bp, Artificial Sequence
  chemically treated genomic DNA (Homo sapiens)
atagattagatttattgatagttaagtagaggtaggaagtgtttttaggagaggaaagtgaggtatttgtttttatgtaggagattgtataggtttatgtagatgttttatgttggttaatagggagttttgtatatataattttgaatattttttgtttaaagtgggtgggattatttttttttaagttatgagaaatagattttatagttattttagtttaatttgatttttattatttatttatttttttaatttatttatttatttaataaatattttcgtaggtttgttggggattatgttttgggttgggttttggttgtagtaatttttaggtttgtttgtaatttttttgttagtttgttattttattgttgggtttttttttatttaagttttttttttttagatagttcgaagggtttgtgtttattttaggttattaagtttttttattgaaatataggagatttttttagtttattaggtgattttgagtaagttttttttttaaattatatttagtgaatattggagagaagaaagttgatagaagtcgggttgggttaggtttggttgtggggatatttgagggtagttaggtgtttgtagaagaggaggggttggtgttgaggtttgagatgggaaaagattgtagtggttggagtttgagtgtttggttttgggttgggaagaatagagtttgggattggtagtaggagtggagagggtggtattaagatttgaaaatggggtaagggtgggggtcggggtaagttttgagttggtagggagttaggaaggttataggattagggtaagaatttagttgtttttgaggttttggagagggtgtagatttttgaattatttgttttattttaaggtaggtgtgttaatgtttttttttggagtaaagggttgattaggtttacggtagaaaggtgaaggtagatagatagttttttttttgttgttagttgggatttgggttaggtagatgggtatatttttttttttttattttatggttgttttagttttagtagttagtttgaaggatttttagggggtagttattttgtttcggttttttttaggttgggaagtgggagtttgtgtttttaaatttttagtaggttgaaatggttgatgatattattggttttcgggagcggtagagttggagtcggagttaagggagtttaggttgtcgggggttgtagatatggagggttagagtagtaggggtagtaggaggttagggattcgggttggtttgggttttttgtttatgttttagggtgttgtttaaattggggtattttttaaggtaagatttttgagatttagtgtttttcgtttttttgatttttggttttatatattttttttatatatattgtaggttttttggtgtttttgattgaggggttggtatttttttttgtttagcgagtaggggttaggtgaagagagtattttgggggttgaggggtagtgataggatgttcggagatagatgaagttagttatttttaggagtttttgggagagttttggattgggtattagaggatttagttgtgttttatttttgttgtgtgattttggttaagttgttttttttttttgagttaatgtaaaatgagggggtttgtcgttgaagattaaaattgtgatatttgggatggttaagttgttagtattggaggcggtgtgatagttggggggaagtcggtatatagtgtgatatttggagttaaggagggtgtttaaaatgttattttaaagaattgagtttgagaagggaggtggagatggagttttaggtattttgaattgagaaggatacgggatagaaatagaagtgcgtttttagaggtagggtttttttgcgttttgttattttatttagggttattttggggtaagtatagatatttttttgttttttttggtgaaggatattttattttgttttttggagataggggatattagagagaatagatggggaaggaggataggtttttataggatttcgtgattttttattttttttatttgtcggatataaatgggatatttgtttgtttgtttttttaggtaggggagaaagtggaggatgtaagagggtataatttgggtatagagagatgtgatattaggattaatttagaattttggatttgttttgaatgttagatttatatttggtgaggatggattatttaacggggttagatggaattttagtaaatgttgggtttataaatgtagataatgggagatgaagattttttagaatataatgtggttaggaattttagattttatttttttattttatagatagagaaattgaggcgttgggtagagaggta

SEQ ID NO: 1754 - DNA, 2390 bp, Artificial Sequence
  chemically treated genomic DNA (Homo sapiens)
tatttttttgtttagcgttttagtttttttgtttgtaaaatgaagggatggggtttagggtttttggttatattatattttggggaatttttattttttattgtttgtatttatgagtttaatatttgttagaattttatttagtttcgttgaatagtttatttttattaagtgtgaatttagtatttagagtaagtttaggattttaagttgattttggtgttatatttttttgtgtttaggttgtgtttttttatattttttatttttttttttatttgaaaggataggtaagtaggtattttatttatgttcggtaggtgggaggggtggggagttacggagttttgtagagatttattttttttttttatttattttttttgatgttttttgtttttagaagataggataaagtgttttttattaaggagggtagaagaatgtttatatttgttttaggatggttttaggtagggtaatagggcgtagggaggttttgtttttggagacgtatttttgtttttgtttcgtattttttttagtttagagtatttaaaattttatttttatttttttttttaaatttagttttttgaggtggtattttaggtattttttttggttttaagtgttatattgtgtgtcggtttttttttaattattatatcgtttttagtattaataatttagttattttagatgttatagttttagtttttagcgataagtttttttattttgtattggtttagagaggaaaagtaatttggttaaggttatatagtaaaggtggagtatagttgggttttttgatatttagtttaggatttttttaagggtttttggagatggttaattttatttgttttcgggtattttgttattgttttttagtttttagggtgttttttttatttagtttttgttcgttgagtagaggaaagtattagttttttagttaggagtattagggagtttgtagtgtatgtggggggggtgtgtggaattagggattaggaaagcggggggtattgggttttaggggttttattttggagggtgttttagtttgggtaatattttggggtatgggtagggaatttaggttagttcgggtttttggttttttgttgtttttgttgttttggttttttatgtttgtagttttcggtagtttggatttttttggtttcggttttagttttatcgttttcgggaattagtgatgttattagttattttaatttgttgagaatttaaaggtataggtttttattttttagtttggaagaggtcgaagtaaggtggttattttttgggaattttttaaattggttgttgaggttggaatagttatggagtggggaggggagagtgtatttatttgtttggtttaggttttaattggtagtaggaaggaggttgtttgtttatttttatttttttgtcgtaggtttggttagttttttgttttagggaggggtattaatatatttgttttaaggtaggataggtggtttagaggtttgtattttttttagggttttagagataattgagtttttgttttgattttgtgatttttttggttttttgttagtttagagtttgtttcggtttttatttttgttttatttttaggttttggtgttattttttttatttttattgttagttttaggttttattttttttaatttagaattagatatttaggttttagttattgtagtttttttttattttaggttttagtattagtttttttttttttgtagatatttagttgtttttagatgtttttatagttaggtttaatttagttcggtttttgttagtttttttttttttagtatttattgggtgtggtttgggaggggaatttgtttaaggttatttggtgaattgagaaggttttttgtgttttagtgagaaaatttagtgatttaggatgagtataagtttttcgagttatttgggggaagggaatttgggtggagaagggtttagtagtggggtaatagattgataagagagttataaataggtttgagaattgttatagttaggatttagtttaggatatggtttttaataggtttacgggagtgtttgttgaatgaataaatgaattagaagagtgaatgggtgatgagggttagattgggttgggatggttgtgggatttgttttttatggtttagagaggagtgattttatttattttaggtagaaagtgtttagagttgtgtgtgtagagttttttgttaattaatatggagtatttgtatgggtttgtgtagttttttatatgaaggtagatgttttattttttttttttgaaggtattttttatttttgtttgattgttagtaggtttagtttgt

SEQ ID NO: 1755 - DNA, 2497 bp, Artificial Sequence
  chemically treated genomic DNA (Homo sapiens)
aatttttacggttaagtgttgagataagagttttggggtttaaggttttttaggtagggtgcggtgagggttcgtcggaggaagggtttttttttgtttattttggttgggcgttgtgcgggattgtaggagtttgagttggggtaaaaggaattttaggggagatagttagatttaaggttaattgtttagtttagtttaggattttagttttttgtaataagatgggttaggtttttcgttggagtttgtttagtaaggggtttgtgggtttttgggtaagtattagtcgggttttatttttagtttggggtttttttttagttttttttttggcgtagtttagttagagtttgtttattttttgggggttttcgttttttttttttttggttttgtattgcgtgagggcgtattttttagaattagttttttagagtttgttgagattaggagatttggaggttattttagggatattttgtttttgtgttttagataggtgttttttttattatgggtgatgaatgtcgaggagttgttattataattagtgtggaatgtgtcgttttttttagggaggaaaattttattttggaaatatattttagatgtaagttgaattttatttacggggttataaaattatttttttaattatttggtgttgttgggggttggtattattaattttggagatgttatttagagttaagatattatttggggaaaaaaattaggttcgtattttatgaggaatttttttttatgttttgtagaggttttaggagatggacgagattgttcgggtattaggtagggaggggtagggacgtagttatttttatagttatttttacggtttaggagttatgttttattttattagtttttgttagattttttttattagagatggttttatcggtataagggaagattgaggttagagaggaatggaggaattggagggttggaatagttggtgggttggacggtttagttttatttgttttgtttgtttttagtagatattgtttttttttttatttttaaagtttttattcggtttagatttttttttgagattagtattatttaatagttttttataaaaaattgtttttttgattatcgagggtaataatgaaaatacgtaattgaatttttaagaaattattatttttataatttgcgtttagttttcgagataaattaaacgttttttttgtatggtgagtcgtttattgcgtattagagaggggttgatattgttttttattatcgatgcgggatttattaagaagaatgttttatattgtttttcgggaggtttttggtatttttagtttatggttttgagcgggtagagttggttagttggaggcgtcgggcgggtggttaggtgggtttttttttgattatttttggttttgttattggttagttgcgtggtggtgtgggtggtaagtgggagggttagttagaattttagtttagatttttaagaaaattaggtttgtgcgtagtcgggtagcgatagttttttgagaagtgtaattttggagttagagtggggaaaaggtagggaagtcgggtaggaggaaggaagtggagatggtagagagggaggatttatttatttgttttttatttgttggttaaagttgattttatttaattgcgttagtgtttagaggatttaagatattataaggttaggtagtagagcggttttgggggaggcgaggtttcgttgaggtaaggtatcgtttggtatagggttcgggagtaggtgggggtagtagggtggttatatttatttaaggagttgttgggttggttagtagaggggcggggaggtggggttagttatcgggatgggttgtttatttgtgagtagttggtagtgggttttttgttggtagttgttagtggttggatttttatggttttttggttggttggaggtcgtttgggttgtggggaagtagaagtttttagtttgtggattgagttttttgaaaatgtttgtaggttgtatttagtagagttaattttaagtaaaggattcgagtgatattatttacgtgtaaattatcgttttttttagcgtggttgtttgtttgagggtttagagttattttttggggaatattgtttagttagaaatttggtagtggtggttgtatagcgaggaggggtgttgttaggggatagaggatttgttttttgggaacgggagaattgaggtttaaagagtggttttttatttgatttaggtaaatttagggttaagggtaataggttgaggttattaggagtttaaaggttggttttgaaggtgagatttttttttgaggaagtaagtggttttaagtagtattttttggtagtcggtttagaggattggagtggggtgggtcgggaggaatatcgttcgggacggggtgggtgtttatatttataattgtgtttttgtttttttttttttttt

SEQ ID NO: 1756 - DNA, 2497 bp, Artificial Sequence
  chemically treated genomic DNA (Homo sapiens)
agggagggagagaaggtaggagtatagttgtgggtgtaggtatttatttcgtttcgaacgatgtttttttcggtttattttattttagttttttgggtcggttgttagagggtgttgtttgaggttatttgtttttttagaagaaggttttatttttagagttagtttttgagtttttggtgattttagtttgttgtttttgattttgagtttgtttagattaagtgggaggttattttttgggttttagttttttcgtttttagggagtaggttttttgttttttgatagtattttttttcgttgtgtagttattattgttaggtttttgattaggtagtgttttttagggggtggttttgggtttttaggtaaatagttacgttgggaggggcggtggtttgtacgtgaatagtgttattcgggttttttgtttgaagttggttttgttgagtgtagtttgtagatatttttaggaaatttagtttataggttggaggtttttgtttttttataatttaaacggtttttagttagttagagagttatgagaatttagttattagtaattgttagtaggaaatttattattagttgtttatagatggatagtttatttcggtagttggttttattttttcgtttttttgttgattaatttagtagttttttgggtgggtgtggttattttgttgtttttatttgttttcggattttgtgttaggcggtgttttgttttagcggggtttcgttttttttagagtcgttttgttgtttgattttgtgatattttgggttttttgggtattggcgtaattgggtggggttagttttggttagtaagtggggggtaggtgggtaaattttttttttttgttatttttatttttttttttttattcggtttttttgttttttttttattttggttttagggttgtattttttagaaagttgtcgttgttcggttgcgtataggtttgatttttttgggagtttgggttaagattttgattggtttttttatttattatttatattattacgtagttagttagtaatagggttaggagtgattaggagggggtttatttgattattcgttcggcgtttttagttggttaattttgttcgtttagggttatgagttggaggtgttaggagtttttcgggaggtagtgtgaggtattttttttagtaagtttcgtatcgatgataaagggtagtattagtttttttttgatgcgtagtgagcggtttattatataggggaggcgtttaatttatttcgggaattgggcgtaagttataaaaatggtaattttttggagatttaattacgtgtttttattgttattttcggtaattaaggaaataattttttataaaaggttgttggatgatattgattttaggagaggatttgggtcgggtgggggttttgggaatgaagaggagggtagtgtttgttgggggtaggtagggtaagtggagttgagtcgtttagtttattagttgttttagttttttaatttttttatttttttttggttttagtttttttttatgtcgatggggttatttttggtagggagggtttggtaggagttgatgaagtgaggtatggtttttgggtcgtgagggtggttgtgagggtagttgcgtttttgtttttttttgtttggtgttcgagtagtttcgtttattttttgaggtttttgtagggtatagagaggggttttttatggagtgcggatttgatttttttttttaagtgatgttttggttttaaataatatttttaggattaatggtgttagtttttaatagtattaggtgattgaaaaaatggttttatggtttcgtgggtgaaatttaatttgtatttgaggtgtatttttaagatgggatttttttttttgggagaggcggtatattttatattaattataatggtagtttttcgatatttattatttatagtgggggggatatttgtttggggtataggggtagggtgtttttggggtaatttttaggttttttaattttagtagattttggggggttggttttaggagatgcgtttttacgtagtgtagggttaggggagggggaggcgggagtttttaggaaatgaataaattttagttgggttgcgttagggaggaggttggaaggaggttttaggttgagggtaggattcggttagtgtttgtttagggatttataggttttttgttgagtagattttagcgaggggtttggtttattttgttgtaagaggttggagttttgggttgagttgggtagttgattttggatttgattgttttttttgaaattttttttattttaatttaggtttttgtagtttcgtatagcgtttagttaggatgggtaggaggaagtttttttttcgacgggtttttatcgtattttgtttgaggggttttgagttttagggtttttgttttagtatttggtcgtggagatt

SEQ ID NO: 1757 - DNA, 2349 bp, Artificial Sequence
  chemically treated genomic DNA (Homo sapiens)
ttggtttttattttagttttgatataaacgttatgagggtttttagattagttatttttttttttgtgggatttttagagttttaaagttggaaaagagaagttaagttgtagtttttgttgggtaattttaaatgttaggtagtttatttataaatatatggaaaggttttttttaggggaattggagtttgtttttagagtttttaagtttacgttttaaataaaattttaaaattatgaatgtgtgtatgatggaatggtaaataggtagggtgtaattttttttattggtataaggaggtgtcgttaggatgttaatttattttgatttaggtgttaagtttttttttaattttgtatataaacgtatagatatttgtattgatagtgtaagaaatttatttatgtttattattatttaaaaaatagtattttttattaagtattttttatatgtttggtattttttatatttaggtttatagttagttttgaaagggaggtattatttttattttataggtgaggaaataagtttagagaggggaagtgatttgtttagtttgtatgtgttgagttgggatttgaatttaggtttttcgttttagtatttattttattgggtatttcgtgtttataaagtttttttttgggtaatggttttttggtttagttgattttggatttttttttagtttgtttagtttttcggatggtatttaatgaggatttttaggtttgaataagattttttttaatcgtgattttatttaagtattttatgatgagattcgtgattgtttttattttatagataaggaaattgaggtttattatggttaagttatttttttagggatatatagtttaggagagtaagggttggggttgaagaaattttgttttttcgatcggattttttagtttatatattttttatggtttatttagtttcgaggagtttttagtagaatttttaattttatattatagtgtgttaggtatggtttatttttttttttttcgttggtgttttttattagggattttattttgttttgttgttcgtttttttttggtttttgttggattttttttaagcgttcggtatgttttttattgattttgaagagtggttagtgttttttgtagttcgggttcgggggtgtggatgaaggagttttaggtagttttatgagtatagagagtatcgtaggttgcggtgagtttcggtttatttttttagttatatgattgtagttttttatgcgtattttagcgggtatggattagggttagtttttgagtatttttggttaggaagtttaggtattttagtgggttgttagggacggttttggttaagtggtaggaggttttgtattagcggagggtaggggagttttttagggttatttttaggaagtttagtattttaaatagttttgtttgaatttttattttgtattggtttagtttagttagataaagtttttgggatgtttgtttttggtggttttattaggcggtagttgagtagtggaacggaagcggagtttagtaggttcggtgcggcgggattaatgaatggagttgcgggaggaggaggaaagaggttggagtatggggtgattttgggtttgtaatcgaatttattagtcgggtaggacgttgattggttgaggagtgtatttgttagggtttacgtttttattttgtttgtttttttagtattatttagttatttgttgttagttttgtttagattgggattatgggagttaaagttttaagttgtgggatggggattaggttggggtttttatatttttttgaagggaaggaaaagggtttaggagtttggaggagttttttagaatttattttttttatttttattatagcggtggttgttatatttatttttattaggttggtagggggttatgggtttttgttagggttgggtgaaggaagggttggggttttgaagttattattttgggagtttttaaggtttttgggaaagggagtgttatttggggtgtttttttgttaagttttggtttttagaaaggttttcggtatatttaggggatagagttttagggtttttcgttttttaggattttaagtatgggtttggttttgtagtaatttttttggtttgataattgggggagacgtagcgggaataggttttgagagttatatagggtagggttgatgttttggatttgaaagaattatggtttttagagtggtagagagtggtttagggtgtatgtttgtggttatttttatttttggttatttggggggatatagtaggtattatgtgtgtttt

SEQ ID NO: 1758 - DNA, 2349 bp, Artificial Sequence
  chemically treated genomic DNA (Homo sapiens)
gaggtatatatgatgtttgttgtgtttttttaggtggttagggatggaggtggttatagatatatattttgggttattttttgttattttagggattatagtttttttaaatttagagtattagttttgttttgtgtggtttttaaggtttgttttcgttgcgttttttttagttattagattaggagggttgttgtaaggttaggtttatgtttggagttttaggaagcggggagttttggggttttgttttttgagtatgtcgagagtttttttaagaattaggatttggtaggggagtattttaggtggtatttttttttttagaagttttgggaatttttagggtggtagttttagagttttagttttttttttatttagttttggtagaggtttatggttttttgttagtttgatggaggtggatgtggtagttatcgttgtggtaagggtgagaagggtgggttttaagggatttttttaagtttttgaatttttttttttttttttaaggagatgtgaaagttttagtttggtttttattttatagtttagggttttggtttttatagttttaatttaggtagggttggtagtaggtgattggatggtgttgagaaggtaggtagaatgggggcgtgggttttggtaagtgtattttttagttaattagcgttttgttcggttggtggattcggttataagtttaagattattttatattttagttttttttttttttttttcgtagttttatttattggtttcgtcgtatcgggtttgttgggtttcgttttcgttttattgtttagttgtcgtttggtggggttattaagggtaggtattttaggggttttgtttgattggattgggttagtgtagaatgggggtttaggtagggttgtttgggatgttgggttttttgggggtggttttggggggtttttttgtttttcgttggtataggattttttgttatttgattaaggtcgtttttggtaatttattggggtatttgagttttttggttaaggatgtttagggattggttttgatttatgttcgttgggatgcgtataggaggttgtagttatgtagttgggaggatgagtcggagtttatcgtagtttacggtgttttttgtgtttatgagattgtttggggtttttttatttatattttcggattcgagttgtagagagtattggttattttttagagttagtgggaggtatgtcgagcgtttgaggagagtttagtaggggttaggaagaagcgagtagtagggtagagtggagtttttggtggagggtattagcgagagaagagaggatggattatgtttggtatattgtggtgtggagttggagattttgttgggaatttttcggagttgggtgagttatgaggggtgtgtgggttggggggttcgatcggggaagtaaggtttttttagttttagtttttatttttttaggttgtgtgtttttgggggagtgatttgattatggtgaattttaatttttttatttgtaaagtgggggtaattacgaattttattatggggtgtttaaatgaggttacggttggggaaagttttatttaaatttgggagtttttattaaatgttattcgagggattgggtaggttgggggaggatttagggttaattgagttaaaaagttattatttaggaggaggttttgtgggtacggggtgtttagtggaatggatgttgagacgaaaggtttgggtttaaattttaatttagtatatataagttgagtaagttattttttttttttggatttatttttttatttgtaaaatgaaggtgatattttttttttagggttggttgtgaatttggatgtgggaagtgttaggtatgtgggaaatgtttagtaaagagtgttattttttagatggtaataaatatagatgaattttttgtattattagtatagatgtttgtgcgtttgtgtgtagggttgggggagggtttggtatttgagttagagtaggttggtattttggcgatatttttttgtgttagtgagaaaggttgtattttgtttgtttgttattttattatatatatatttataattttggagttttatttggggcgtgggtttgggaattttggaggtagattttaatttttttgaggaagatttttttatgtatttatgggtgggttatttggtatttagagttgtttaatagaggttgtagtttggttttttttttttagttttgaaattttgagagttttatagaagggagagtgattggtttgaggatttttatggcgtttgtgttagggttggggtgagaattag

SEQ ID NO: 1759 - DNA, 2355 bp, Artificial Sequence
  chemically treated genomic DNA (Homo sapiens)
atgtttttttggtaggaagagggtagagatttggtttttattttagttttgatataaacgttatgagggtttttagattagttatttttttttttgtgggatttttagagttttaaagttggaaaagagaagttaagttgtagtttttgttgggtaattttaaatgttaggtagtttatttataaatatatggaaaggttttttttaggggaattggagtttgtttttagagtttttaagtttacgttttaaataaaattttaaaattatgaatgtgtgtatgatggaatggtaaataggtagggtgtaattttttttattggtataaggaggtgtcgttaggatgttaatttattttgatttaggtgttaagtttttttttaattttgtatataaacgtatagatatttgtattgatagtgtaagaaatttatttatgtttattattatttaaaaaatagtattttttattaagtattttttatatgtttggtattttttatatttaggtttatagttagttttgaaagggaggtattatttttattttataggtgaggaaataagtttagagaggggaagtgatttgtttagtttgtatgtgttgagttgggatttgaatttaggtttttcgttttagtatttattttattgggtatttcgtgtttataaagtttttttttgggtaatggttttttggtttagttgattttggatttttttttagtttgtttagtttttcggatggtatttaatgaggatttttaggtttgaataagattttttttaatcgtgattttatttaagtattttatgatgagattcgtgattgtttttattttatagataaggaaattgaggtttattatggttaagttatttttttagggatatatagtttaggagagtaagggttggggttgaagaaattttgttttttcgatcggattttttagtttatatattttttatggtttatttagtttcgaggagtttttagtagaatttttaattttatattatagtgtgttaggtatggtttatttttttttttttcgttggtgttttttattagggattttattttgttttgttgttcgtttttttttggtttttgttggattttttttaagcgttcggtatgttttttattgattttgaagagtggttagtgttttttgtagttcgggttcgggggtgtggatgaaggagttttaggtagttttatgagtatagagagtatcgtaggttgcggtgagtttcggtttatttttttagttatatgattgtagttttttatgcgtattttagcgggtatggattagggttagtttttgagtatttttggttaggaagtttaggtattttagtgggttgttagggacggttttggttaagtggtaggaggttttgtattagcggagggtaggggagttttttagggttatttttaggaagtttagtattttaaatagttttgtttgaatttttattttgtattggtttagtttagttagataaagtttttgggatgtttgtttttggtggttttattaggcggtagttgagtagtggaacggaagcggagtttagtaggttcggtgcggcgggattaatgaatggagttgcgggaggaggaggaaagaggttggagtatggggtgattttgggtttgtaatcgaatttattagtcgggtaggacgttgattggttgaggagtgtatttgttagggtttacgtttttattttgtttgtttttttagtattatttagttatttgttgttagttttgtttagattgggattatgggagttaaagttttaagttgtgggatggggattaggttggggtttttatatttttttgaagggaaggaaaagggtttaggagtttggaggagttttttagaatttattttttttatttttattatagcggtggttgttatatttatttttattaggttggtagggggttatgggtttttgttagggttgggtgaaggaagggttggggttttgaagttattattttgggagtttttaaggtttttgggaaagggagtgttatttggggtgtttttttgttaagttttggtttttagaaaggttttcggtatatttaggggatagagttttagggtttttcgttttttaggattttaagtatgggtttggttttgtagtaatttttttggtttgataattgggggagacgtagcgggaataggttttgagagttatatagggtagggttgatgttttggatttgaaagaattatggtttttagagtggtagagagtggtttagggtgtatgtttgtggttatttttatttttggttatttgggggga

SEQ ID NO: 1760 - DNA, 2355 bp, Artificial Sequence
  chemically treated genomic DNA (Homo sapiens)
tttttttaggtggttagggatggaggtggttatagatatatattttgggttattttttgttattttagggattatagtttttttaaatttagagtattagttttgttttgtgtggtttttaaggtttgttttcgttgcgttttttttagttattagattaggagggttgttgtaaggttaggtttatgtttggagttttaggaagcggggagttttggggttttgttttttgagtatgtcgagagtttttttaagaattaggatttggtaggggagtattttaggtggtatttttttttttagaagttttgggaatttttagggtggtagttttagagttttagttttttttttatttagttttggtagaggtttatggttttttgttagtttgatggaggtggatgtggtagttatcgttgtggtaagggtgagaagggtgggttttaagggatttttttaagtttttgaatttttttttttttttttaaggagatgtgaaagttttagtttggtttttattttatagtttagggttttggtttttatagttttaatttaggtagggttggtagtaggtgattggatggtgttgagaaggtaggtagaatgggggcgtgggttttggtaagtgtattttttagttaattagcgttttgttcggttggtggattcggttataagtttaagattattttatattttagttttttttttttttttttcgtagttttatttattggtttcgtcgtatcgggtttgttgggtttcgttttcgttttattgtttagttgtcgtttggtggggttattaagggtaggtattttaggggttttgtttgattggattgggttagtgtagaatgggggtttaggtagggttgtttgggatgttgggttttttgggggtggttttggggggtttttttgtttttcgttggtataggattttttgttatttgattaaggtcgtttttggtaatttattggggtatttgagttttttggttaaggatgtttagggattggttttgatttatgttcgttgggatgcgtataggaggttgtagttatgtagttgggaggatgagtcggagtttatcgtagtttacggtgttttttgtgtttatgagattgtttggggtttttttatttatattttcggattcgagttgtagagagtattggttattttttagagttagtgggaggtatgtcgagcgtttgaggagagtttagtaggggttaggaagaagcgagtagtagggtagagtggagtttttggtggagggtattagcgagagaagagaggatggattatgtttggtatattgtggtgtggagttggagattttgttgggaatttttcggagttgggtgagttatgaggggtgtgtgggttggggggttcgatcggggaagtaaggtttttttagttttagtttttatttttttaggttgtgtgtttttgggggagtgatttgattatggtgaattttaatttttttatttgtaaagtgggggtaattacgaattttattatggggtgtttaaatgaggttacggttggggaaagttttatttaaatttgggagtttttattaaatgttattcgagggattgggtaggttgggggaggatttagggttaattgagttaaaaagttattatttaggaggaggttttgtgggtacggggtgtttagtggaatggatgttgagacgaaaggtttgggtttaaattttaatttagtatatataagttgagtaagttattttttttttttggatttatttttttatttgtaaaatgaaggtgatattttttttttagggttggttgtgaatttggatgtgggaagtgttaggtatgtgggaaatgtttagtaaagagtgttattttttagatggtaataaatatagatgaattttttgtattattagtatagatgtttgtgcgtttgtgtgtagggttgggggagggtttggtatttgagttagagtaggttggtattttggcgatatttttttgtgttagtgagaaaggttgtattttgtttgtttgttattttattatatatatatttataattttggagttttatttggggcgtgggtttgggaattttggaggtagattttaatttttttgaggaagatttttttatgtatttatgggtgggttatttggtatttagagttgtttaatagaggttgtagtttggttttttttttttagttttgaaattttgagagttttatagaagggagagtgattggtttgaggatttttatggcgtttgtgttagggttggggtgagaattaggtttttgttttttttttattaggggggtat

SEQ ID NO: 1761 - DNA, 2475 bp, Artificial Sequence
  chemically treated genomic DNA (Homo sapiens)
ttaggatattggtttttaaaattatataattatagttttattgttgtatttaagaaaatgaattttttataagtttttatttattttttgaattgttttgtggaagattttataagttttttaatttaggatattataagggtttttgtgttatatttggttttatgtttttttaatttttttaagtttagaattatttatgatgttgagttgtattaagggttagttattttgtagtagaagaattattgttattgttattatttgttttgtgattattatttaaattcgttaatagagttttcgaatttatttaattgggtataagtaggtagtggtatatggttattttcgtggagtttcgggatgttgtggggttttttgtacgttgagttatataaatagggagttttatgttagttgtagttgttagtattaatatacgtgtttaatttttttttaaattttaggtttatttttttgtttgaggttttaatggagttattgagttgtatttggttattaaagtttatttaggatttttgttatttttatattaagtatgaggtttttagtttttaattttgaatgtgttgttattttatttagaattatgttttttttttaattattagtgttaggaggataagttattaggataattatgttttatgaggtaaattttgattttggggtttggaaatttagaagttattgattagttaatagtaatttaaataatgtatttataaagttagggaatgtaaatgtggttggggtttttaggagggtattggtggttatgagaatagggtggtatttgttttgagtaggatcgggatagtaggtgtggttttagtttgttgggttttgtagtttttatttttgtttttgttttgttttagtagttaggtatggtttcgtttttgtggggtttttttttttttagggaagtcggttatttaggttttgattttttttaattttgtttttaggtttattattttttatttattttttttagagatatttaagatattaatagtaggattgggatgtgtttacgaaaagaatttaaattttagtttaagttataggtataaagtatagtttaatagatagggaaggggtagggtaagggagtgtgattttggcggtagttggagaaggtattgttggagtatgtttaggaggagttcgttagtgttagggtaatgggataggaagggtaagttaagttcgagtttagggaatgtaaaggaaatagtagttatgttttttttacgtcgttttggtatttttaagtagtttcgtataaaatttttgcgtatatatatatatgtatgtttattttttttttttttttttttttttttttatttgtttgatagttttttttaggtttggattttacgtttgatttttgttttggtaagtttgtttttttttttagtttgttaggggtatattttgtatgtttatttttatattttaaggtttttaattttaaaaggaggcgggggataatttagaaagttggttaaagtgagatgtaatagagggttttagagatagttatcgtttaatgtagggtttgatttgtaggttgtattggttttatgatcgtagttttttttgtaattggggtttatttattttttgtatagtatttttacgggttaggtagtattgggtaagagggaggaggggaggtttcgaattagggtgattttgtttagttttaaatatttttatatattagaagggtttatttttgaatgttattttttagcgattttttaaggagcggtttcggttagtgataatatattgatagttaatttataatttgtagggtatagagatagagatagagattttagcggtaggagggatgtaattattaatgattgtgtgttttttgttttttgagatagagtttcgttttgttattaggatggagtgtagtggtgcgatttcggtttattgtaatttgattttttggtttaagtaatttttttgttttagtttttcgagtaggtgggattataggtataggttattacgtttagttaatttttgtatttttttttttttttttagtagagacggggttttattatattggttaggatggtttcgattttttgattttatgatttattcgtttcggttttttaaagtgttgggattgttttttaatagttatattgatttttataatattgagtttttaatatgagatatttatgttagaatgtattaaaatttaaaataagaaagtttatagggtaggaaaagttttattttagggaatttttgttaagattgtttttatgagttaaatcggtaaagtttttataatttaagtaagaataattttatttttggtagatatgaaattttatgaatataattcggtgattatgttaaaattataggatagggtattttataggggagatttttatggta

SEQ ID NO: 1762 - DNA, 2475 bp, Artificial Sequence
  chemically treated genomic DNA (Homo sapiens)
tgttatgaaaattttttttgtggagtgttttgttttatggttttagtatagttatcgagttgtatttatggggttttatgtttattaagaataagattgtttttgtttaaattgtgaaagttttatcggtttagtttatagaaatagttttggtaagagttttttgagataaaattttttttgttttgtgaatttttttgttttgaattttaatgtattttaatatgagtgttttatgttagaagtttagtgttgtggaggttagtatagttattaaaaaataattttagtattttgggaagtcgaggcgggtgggttatgaggttaggagatcgagattattttggttaatatggtgaaatttcgtttttattaaaaaaaaaaaaaaaaatataaaaattagttgggcgtggtggtttgtgtttgtaattttatttattcgggaggttgaggtaggagaattgtttgaattaggaagttaagttgtagtgagtcgagatcgtattattgtattttattttggtgatagagcgagattttgttttaaaaaataaaaaatatatagttattgatggttgtattttttttgtcgttgagatttttgtttttgtttttgtgttttgtaggttgtgggttggttattagtatgttattattggtcggaatcgttttttggaaggtcgttgggaggtggtatttaaaggtgagtttttttggtgtgtgggagtgtttgaagttgggtagagttattttgattcggggttttttttttttttttttatttagtgttgtttggttcgtaggggtgttgtgtagggagtgggtgagttttagttgtagggagggttgcggttatggggttagtgtagtttgtagattaggttttgtattgggcggtggttgtttttggaattttttgttgtattttattttggttagttttttagattgtttttcgtttttttttgaagttaaagattttggagtataaaaatgagtatgtagagtgtgtttttggtaggttggaggggaggataagtttgttaggataaaggttagacgtagaatttagatttgaaggaaattattaggtagatagagagagagagagagagagagagagagtgagtatgtatgtgtgtgtgtgcgtaaagattttatgcggagttgtttggaaatattaagacgacgtaaaggaaatatggttgttgttttttttatattttttgggttcggatttggtttgttttttttgttttattgttttggtattggcgagttttttttggatatattttagtagtgttttttttagttgtcgttagggttatatttttttgttttgttttttttttgtttgttgggttgtattttgtgtttgtggtttgagttaggatttgggtttttttcgtaaatatattttagttttgttgttgatgttttaagtatttttaagaaggataaatgaggagtgatgggtttggggatagggttgaaaagggttaaggtttgggtggtcggtttttttggagaaaagagggttttatagaggcggggttatgtttggttgttgggatagggtaggagtagaggtgggggttgtagagtttagtagattggggttatatttgttgtttcgattttgtttaggatagatgttattttgtttttatgattattagtgtttttttgagagttttagttatatttgtattttttggttttatgagtgtattgtttagattgttattgattaattaatggtttttgggtttttaggttttagagttaaagtttgttttatagagtataattattttggtagtttgtttttttgatattggtggttgaagagaagatatgattttgagtgggatgatagtatatttagagttggggattgggggttttatgtttggtgtgagaatggtaagggttttgggtgggttttaatggttaagtgtagtttagtgattttattggagttttaggtaggagagtgaatttaaaatttagaaaaagattgaatacgtatgttggtgttggtagttgtagttggtatagagttttttatttgtgtggtttaacgtgtaaggggttttatagtatttcggagttttacggaggtgattatgtgttattgtttgtttgtgtttagttaaatggattcgggaattttgttagcggatttaaatagtggttataaaataaatagtaataataataataatttttttgttgtaggataattggtttttgatgtagtttagtattatgagtggttttgggtttaaagagattaaagaaatataaaattaaatgtggtataagaatttttatggtgttttaggttgggaggtttataaaattttttataggataatttaagaaatgagtggggatttgtggaagatttatttttttaggtgtagtaataggattgtggttgtgtggttttaggagttagtattttgg

SEQ ID NO: 1763 - DNA, 2223 bp, Artificial Sequence
  chemically treated genomic DNA (Homo sapiens)
aattaggtttaaaaagattgttttaaaagagtgaattttggtaatttattataaaataattgtaatgtagattgtgtatggaaatgattggagatattttaaggttatagtgtttttataaattgagttgaaagggaattgttaggatgattttgtttaattttttttttttatataggaagaattattttaaattcgagaggttaagtgatttggttaaagttatatagttattattagttaattcgtatatattgatttttttgtggggttgggtagatgaggaattttttgtttttttttttgtttgtagagattttttttgaggttatttttcgagttttggtaagtatttttgtttttggtagttttgtgtttcgatttaattttattttttttattttattttatttttgagatagggttttattttgttatttaagttggagtgtagtggtgtaattttggtttattgtagtttttattttttgggtttaagcgatttttttgttttagttttttaagtagttgggattatagacgtttgttattacgttaggttaatttatggttttttgtatgtgttttttgtgtttttgtagagatagtgtttttttatgttgtttaggttggtttttaatttttgagtttaagtgatttgttcgttttagttttttaaagtgttaggattataggtgtgagttatcgtgttcggatttaattttattttttaatttgttttgttttgttttttttaggaggtttttagttttttcggattggttgagaaaagtggtttggttggtttggggttagcggtatttattttttttttaattgtttaattttttttttttatcgaattgtttaattttttttttttaattgtttaatttttttatttttataattttttttcgttataattgagggaggcggtgttgaaaaatagttgattttagtaatgttgtttacgtgattattgtagttgtagttttcgttttattttttgttttgggttaggtgggtattattaggggtttttttggtaaggagtatcgggtaggtattcggttttgttaatttattattggaatagttggggggatagtagataggtacggtcggatagatttgatagattaggtattaggttttttgcgttggtttcgggttttttaagtaggaacgtgaatggttttaagatgttttatatggttttattagttttttttttttttttgttttttatttttaggagggttgttttgttttttttttttttgttttttggttttatgtttttcgttattatagattttttttcgttttatttttttgtagatttagtcgtgtattgtaggtatggaggattaattagtgataggaagttgcgtttttcggagcggtgattagttgtggttaggagagttttagtagggttagttttaggagtttttttcgatttttgtttattgtttatttatttgttgttgttatgaggtattttggggttttttttttttttttgggggttttgggggtttttattgagatgtgtggtgagtaattcgtttttattttgtgtttttttttttttgggtttttagtggggtggttagggtataggatgagggaatttatttgtttttttaagtttttatagtagtttgggtttagttggattttagtatttaatatattttattgtgattgattatatgtttgattttttattagataagattttcgttaatttagttattcgtttatatatttatttagcgtatattgagttttttttgtgttaggtttagtgttagtttttggggaacgtgtaaagtatgagataagtttaatttttgttattttagagtttatgttttagggaagggggatagataaaagaaatggttaggtgtttttatttgaaattttagtattttggaaggttgaggcgggaggggaggatcgtttgagtttaatagtttaaggttagtttgggtaatatagggagattttatttttataaaaaataaaaaaaattaaaaaatagttgggtatggggaagattttttgaagattaagaggatatatgggagttgaaattcgaaggaagaaaaggagttggtaggaaaggagtgggggatatatattttaggtagtaggaagtgagttttcggaggttttgtttgttttagttttgtgttttaaggggttttt

SEQ ID NO: 1764 - DNA, 2223 bp, Artificial Sequence
  chemically treated genomic DNA (Homo sapiens)
agagattttttggggtatagagttggagtaggtaggattttcgaaggtttattttttgttgtttagaatgtgtgttttttattttttttttgttagtttttttttttttttcgagttttagtttttatgtgtttttttggtttttagaaagttttttttatgtttagttattttttaattttttttattttttgtagagatggggtttttttatgttgtttaggttgattttgaattgttgagtttaagcgatttttttttttcgttttagttttttaaaatgttgagattttaggtgggagtatttaattattttttttgtttgttttttttttttagaatataagttttaggatggtagggattagatttgttttatgttttgtacgttttttaaaggttaatattgggtttgatatagaaaaggtttagtatgcgttgaatgaatgtgtgaacgaatgattgaattaacggagattttgtttggtgaggagttaaatatataattaattataataggatgtgttaaatgttgaggtttagttaagtttaaattgttatgggagtttagaagggtaggtaagtttttttattttatgttttagttattttattaaggatttaggaggaaagaggtataggatagaggcgagttatttattatatattttagtgagggtttttaggatttttagaaggaagaggaaggttttaaggtgttttatggtagtagtaggtgggtgagtagtgagtaagaatcgggaaagatttttggggttggttttgttgaggtttttttgattatagttggttatcgtttcgagagacgtagttttttgttattgattaattttttatgtttgtaatgtacggttaagtttgtagaggggtggggcgggggaaggtttgtggtggcggggaatataaggttaaagaatagaggaaggaagggtagagtagtttttttggaggtagggaataaagggaggaggagggttagtgggattatgtgagatattttgaggttatttacgtttttgtttaaagagttcgggattagcgtagagggtttgatgtttgatttgttaagtttgttcgatcgtgtttgtttgttgtttttttagttgttttagtggtggattggtaggatcgggtgtttattcggtattttttattaaaggagtttttggtagtgtttatttagtttaggataaggagtggaacgggagttgtagttgtagtggttacgtgagtagtattgttggagttagttgttttttagtatcgttttttttagttgtggcgggaggggattgtgggggtgggggagttgggtagttggggagggggagttgggtagttcggtggggggggggagttgggtaattgaggggagggtgggtgtcgttggttttagattagttaggttattttttttaattaattcgaaagggttgggagttttttggagaggataaaataaaataagttaaagaatgggattaagttcgggtacggtggtttatatttgtaattttagtattttgaaaggttgaggcgggtagattatttgagtttaggagttggagattagtttgggtaatatggggaaatattgtttttataaaaatataaaaaatatatataaaaaattataaattagtttggcgtggtggtagacgtttgtaattttagttatttggggggttgaggtaggaggatcgtttgaatttaagaggtggaggttatagtgagttaagattatattattgtattttagtttgggtgataaagtgagattttgttttaaaaataaaataaaataaaaagaatgagattgaatcgagatataaagttattagaagtaggggtatttgttagaattcggaaagtaattttaaaaaaaatttttgtaaatagggaagagaataaaagattttttatttgtttagttttataggagaattaatgtatacgagttaattagtggtggttgtgtgattttggttaggttatttaatttttcgagtttaaaatagttttttttgtgtgagaagagagggttaggtaagattattttaatagtttttttttagtttaatttgtgaagatattatgattttaaaatatttttaattatttttatgtataatttgtattgtaattattttatggtaaattgttaaggtttatttttttaagataatttttttgagtttgatt

SEQ ID NO: 1765 - DNA, 2448 bp, Artificial Sequence
  chemically treated genomic DNA (Homo sapiens)
ggtgtttatagggtatttaagtagatataggttgaggaggtagaatatatgtgaatttggagttaagaagagaggtaagggttggaaatagggatttaagatttttggatagttgtgagtgtgtataatgagggttagatgtagagaaaattaggagattatagagagtagaatttagggtggggatttgggagttagtagttgggtatgggtttggtagaaagggaagttaaggaggaggagagggggtagttttagatattaaggaggggagagtgattagaaagaaaatttttttgtagagatataggggatggggaagaattgtagattgaattggggtaaaggattgttggttttaattagagagatttgagggagagatgaggttgagagttaggggattttgttatgttttagtataaaaatagtatttgatatagatgggtgtttgggagttgttgtcggatgaatgagtggatagatgtatggatggacggatggatggaaggatgatagattgatggataaatagatgaatagatgaatagttggatggataattggatggatgggtagatagaatgattttagagattagaaaaagttttatgtattaagtgggattgaatcgcgtttttatgggtagaaagtagaggaatttttatttgagttaggaatgatttagtgtttttaatttagggagaaagttagtttggttttattggggatatttgtgtgggggatttagaggttttttaaatgaggttagacgaggttggataggtttaagttaatttagtatttttttgttatattgtataggaggggatgtgttatttagggagttgttgggatttatgggttttagtgttgttattagtatcgatagttttagagaggaaagatatatattggggtaattttaaggttgtgtgtggtatttgttttggatagtagataggtatagggatatttttagggggttggttatttttttgttttatgtttaggttttagtttcgtttattgtaattttgtgttcgttatgtttagtaggtttttgttttagtttagtttttagagagtagattttaggtgttggtttcgggggttttggtttgagttttagttattgtgttatgttttcggaattgggattaaggttatcgttttaggtaagtggtttttaattttttttagtttgttttattttttgttgtttttggaaaatttgttttttttttttggggtttttttttttttgtttttttagttttaagtattgatttttatttttttttatggggtttggaggaggtgtattagttttcgggtaatcggtaggaagggtttttatagtgggagtagtcggatgtagtttggtttcggggtttgagttgggattgggtagggttagggtttttttttttttttagggtagatgtttgagtgagggatagaggttggttttgatgaggggttttgtagtgtttttagggatattgtttagtgatttttggggttaaggatagaggttgttggggtgggtttgggagttgttgagttttatagtttaggggagtagttttaagaatagttgagggtttaggttgaggattggatgttaatttagtttgggagggttatacggtttggtgatatagaggttattttaaggggagattaatggagggtatagagagggttttgggtttaggttgtagttttgtggtttgtgttgggttatgaggatatggggatatagagggacgggtgagattgggtgaggtgttagaatttaatttttttaggatagttattagaaaggagatagttttttagggtagagatgtgtttgtttttggagtttcgttatttttggggtttagtgtttttttgtttacggatcggttttttgttttttttaaagggtatgttagatttaggaaatgattagaggggagtgaatgaggggtgtagagaattttatggttattaggtgaagtttggggttattataggttgttggggtgggtttgggggttgttgagttttatagtttgtgggagtagttttaggaatagttgaggtgaagggttttgtggtcgggtttgtggagataggaaatattttagagttttagaggagttttgaggtttgtttaggtggagtttattttttgttaggagagttaagtgggttgggttggggtagagttcggtgtttgtgagggataggaagttttagtttaaagtaggtttgggtttttttatatattgtttgttaggatagttttataggatgagtaggggatttatagtttacggaggaggttttaggttttggaagaataaagtgggtgatggaggggggtatagggatggaaatgagggatttaggggttaaggttagattttaaatttagattttagagattagagaaga

SEQ ID NO: 1766 - DNA, 2448 bp, Artificial Sequence
  chemically treated genomic DNA (Homo sapiens)
ttttttttgatttttggagtttgagtttagaatttggttttgatttttggattttttatttttatttttatatttttttttattatttattttatttttttaggatttagagtttttttcgtgaattgtgggttttttgtttattttgtaggattgttttggtaggtagtgtgtggggagatttaagtttgttttgaattggagttttttattttttataggtatcgggttttgttttagtttagtttatttggtttttttggtaaggagtgggttttatttagataagttttagggtttttttgaggttttgagatgttttttgtttttataagttcgattatagaattttttattttagttgtttttggggttgtttttatagattatgagatttagtagtttttaggtttattttagtagtttgtgatgattttaaattttatttggtagttatggagttttttgtattttttatttatttttttttggttattttttgagtttaatatgttttttgaggaaggtaggaggtcgattcgtgaatagagagatattgggttttagaggtgacggggttttagggatagatatatttttgttttaagagattgttttttttttggtgattgttttgggagggttggattttggtattttatttagttttattcgtttttttgtgtttttatgtttttatgatttagtataggttatagagttgtagtttagatttagagttttttttgtgttttttattggtttttttttggggtgatttttgtgttattaggtcgtgtggtttttttaggttggattggtatttagtttttagtttagatttttagttgtttttggggttgtttttttagattatgagatttagtagtttttaggtttattttagtagtttttgtttttgattttaggagttattgggtaatgtttttaaggatattgtagggttttttattagaattagtttttgttttttatttagatatttgttttggaagagaggaggagttttgattttgtttaattttagtttaggtttcgggattaggttgtattcggttgtttttattgtggaggttttttttgtcggttattcggagattaatgtattttttttaggttttatggagaaaggtaagggttagtgtttaaggttgggaggatagaggggaggaagttttagagagagaaaatagattttttagggatagtagagggtgagataggttgggaaaggttgagagttatttatttaggacggtgattttggttttagtttcgaagatataatatagtgattgaggtttagattaaaattttcggggttagtatttggggtttgttttttgggggttgggttggagtaggagtttgttgggtatgacgggtatagggttgtagtgggcggggttgggatttagatatgaggtaggggggtggttagttttttagaggtgtttttgtgtttgtttgttgtttaaggtaagtgttatatatagttttggagttattttagtgtgtgttttttttttttgaggttgtcggtgttgatgataatattgggatttataggttttagtaattttttgagtgatatatttttttttgtgtagtgtggtagaggagtgttgagttggtttggatttgtttaatttcgtttggttttatttaaagggtttttgagttttttatataagtgtttttagtgaagttaggttggttttttttttggattgagagtattgggttatttttgatttaagtggagatttttttgttttttatttatggagacgcggtttagttttatttagtgtatgaagttttttttgatttttgagattattttgtttatttatttatttagttgtttatttagttatttatttgtttatttgtttgtttattaatttattatttttttatttattcgtttatttatgtatttgtttatttatttattcgataatagtttttaagtatttatttgtgttaggtattgtttttatgttgggatatggtaggattttttggtttttagttttattttttttttaaatttttttggttaaggttaatagttttttgttttagtttagtttgtagtttttttttattttttatgtttttgtaagaaggttttttttttagttatttttttttttttggtgtttgagattgttttttttttttttttttggtttttttttttattaggtttatgtttaattgttgatttttagatttttattttgggttttgttttttgtagttttttaattttttttgtatttgatttttattgtgtatatttataattgtttaggggttttagatttttatttttagtttttatttttttttttggttttagatttatatatattttgtttttttaatttatgtttgtttggatgttttgtagatatt

SEQ ID NO: 1767 - DNA, 2383 bp, Artificial Sequence
  chemically treated genomic DNA (Homo sapiens)
agagagtcgggtatatgggtaggcgtttattaaggaagaaagtagagtgttgaggttgtttttttaagttataggtaagaagaaattgttgagttagttttagtatttattaatagttatcgatttttcgggaaggttcgagggagatgaataagtagtagttgcgattttattaagtttaatttaaaattttggtggaggaaggtatggaaattagtgttgttggttttaggagaatgttggagttgaatatttttgtatttagatgcgggttttatttaggagtaagaaagtttgtgtaattagatttaatgataaagaggttttatattttttttagtttcggggtatcgggttgtagtcgatagttttaattagatatttcgtagtttttaaggttagtattttagagaagggatgtagggattttttttagagtagaaggtttttagggattttagtatatgtgttttaagtagatatttttttagtttcgaggggtagggtcgtggataagtagttggaagtttattcggttagttttgatttagaagatgatttttgggtgatttttggtgaaggtcggtattagtggttgtagagacgagggggttttttttatattttaagagttaatttaattagatggtcggttattaggtagagacggggttgtttaaggagatttatagtatattttataagatatatattcggttttggttttgtgtttttttgtttgtttttttagttatttattgttcgttgtttattattaggtttttagagtaggtttagttggcgttaagggtttagttgtcggggatgttgagatagagcgagggttaagttttttttggtttttagaaggttttggttaggatgtataggtggtcgtaggcgttagttttggaggtggtcgtaggtagtgggggtgtaggcggtagattttcggtatgaatttaaattattttagttttttagttagttagaaaatagttttaattttattttgttggtttagaagtaggacgaggggagagataaagttaaatttttgattagttttttttgttttggttaggaagttagagtgtgagagtgtgcggggttcggtattcggttttattcggttattcgtgttgaataggatgttttgaaggacgataaggttgtttcggattttgatgttacgtttgttttaaatttttgacggggagaaacgcggggcgttacgcggtatttttaggttatcggtttttattttgggatttaggtgagaagttagggtttcggggttttttgtgattttttggtttttgtttatggagggtagtcgtttgattaaaataggattttttttttttaaggtatatttttaagtcgttttttatttgtttaagatattttttattttaaatggaacgtagttaagaagtaatgtacggttattatgtacgtggttgttttttttttttgggtttgggtattttgggggtgttttaggaagaggtttttatattatggaggtgagcgaggggttttggtcggttcgagggggttgggatggcgaggatggttagattgggcggttgtcgggtttcggggttcggtgggttttttttcggtggtttgattcgtttgtttttgagtaatgattcggtgggtagtagagttttattcgtaattagtttgtatagcgtagttttataggaatttgtttaggtaaaggttttaattattaagatatttttattttaagtagagtttaatattttaagtttattttgtgtttacgttttagaaaaaaaattttttagtaagaacgtaataaataagattgagagttttattaggagtttgtgagttttatattattagacgcgttgtagtttttcgtgatgatcgtttttttttcgagtttcgtatacggcgcgggttatatggaaaaggtatcgtagtttttcgtgacgttttttttttttcggagtttcgtatacggcgcgggttatatggaaaaggtattgtagttttttatgacgatcgttttttttttgagtatcgtatacggtacgggttatatggaaaaggtattgagtgcggtttataggagaggcggggatggaattaggattttaatgtataggttgggggacgtattttggttatttttcgtggcgggatggtttttttaatcggagattttagtagggtttatgttggcggttttgtttgtttttggtacggattattttttatttgtggatgatatttttattttaggtttgtttgtaggatttaggtttttttttaggtgtttttttggtatttagggattttttagtagtatatggagttggggttgtatggaggtgtgtggggg

SEQ ID NO: 1768 - DNA, 2383 bp, Artificial Sequence
  chemically treated genomic DNA (Homo sapiens)
tttttatatatttttatgtaattttagttttatgtgttgttggaaagtttttgagtattaggggggtatttggggaggggtttgagttttgtagatagatttgggatgggggtgttatttataggtgaggagtggttcgtgttagggataggtagagtcgttagtatgggttttgttgggattttcgattgggaaaattatttcgttacgggaggtggttaaggtgcgttttttagtttatgtattggggttttggttttattttcgttttttttgtgggtcgtatttagtgttttttttatgtaattcgtgtcgtgtgcggtgtttagaggaggagcgatcgttatggggagttgtagtgttttttttatgtaattcgcgtcgtgtgcggggtttcgaggaggagaggacgttacggggagttgcggtgttttttttatgtaattcgcgtcgtgtgcggggttcggaggaggagcggttattacggggagttgtagcgcgtttggtgatgtggggtttataggtttttaatgaggtttttagttttgtttattgcgtttttgttggaagattttttttttgaaacgtaggtatagaatgaatttgaaatattgagttttgtttgaaataaaaatgttttgataattagaatttttgtttgaatagatttttgtggggttgcgttgtgtaggttggttacgggtggggttttgttgtttatcgagttattgtttaaaggtaaacgggttaagttatcgaggagggatttatcgggtttcgagattcggtagtcgtttaatttggttattttcgttattttagttttttcgggtcggttagagtttttcgtttatttttatggtgtgggggtttttttttggggtatttttagggtgtttaggtttaggagagaggagtagttacgtgtatggtggtcgtatattgttttttgattgcgttttatttaaagtaaaaagtattttgaataagtgagaaacggtttggaaatgtgttttgggagagaaaggttttgttttagttaaacgattgttttttatgggtaaaggttaagaggttataggggatttcgagattttggttttttatttgaattttagagtgggaatcggtgatttggaggtgtcgcgtggcgtttcgcgttttttttcgttaaggatttgaaataagcgtggtattaggattcgaggtagttttgtcgttttttagggtattttgtttagtacggatggtcgagtggggtcggatgtcgagtttcgtatatttttatattttggttttttgattagggtagggggagttggttaagggtttggttttgttttttttttcgttttatttttgggttagtaggatgggattggaattgttttttggttggttgaagggttgaaatgatttaaatttatatcgaggatttgtcgtttgtatttttattgtttgcggttatttttaagattgacgtttgcggttatttgtatattttggttagggttttttgagaattagagggaatttgattttcgttttattttagtattttcgatagttgggtttttagcgttagttgagtttgttttggaggtttggtggtgggtagcgggtagtgggtggttagaggggtagataggagggtatagggttagggtcgagtgtgtgttttatgggatgtgttgtggatttttttgggtagtttcgtttttgtttggtggtcgattatttggttgaattgatttttggggtgtgagaagggttttttcgtttttgtagttattgatgtcggtttttattaggggttatttaggggttattttttggattaaggttggtcgggtgggtttttagttgtttgtttacggttttgtttttcgggattagggagatgtttgtttggagtatatgtgttgagatttttgaagattttttgttttgaagaagatttttatattttttttttggggtgttggttttgggaattgcgaggtgtttggttggagttgtcggttgtagttcggtgtttcgggattgagggaggtgtggagtttttttgttattaggtttaattatataggtttttttatttttaggtaaagttcgtatttgaatgtagagatatttaattttagtatttttttgggattagtagtattggtttttatgtttttttttattaggattttaaattaagtttgatggaatcgtagttgttgtttatttatttttttcgggttttttcgggaaatcggtggttgttaatgaatgttgaagttgatttagtaatttttttttatttgtggtttaaaaaaatagttttaatattttgtttttttttttgataagcgtttgtttatatgttcgatttttt

SEQ ID NO: 1769 - DNA, 2293 bp, Artificial Sequence
  chemically treated genomic DNA (Homo sapiens)
ttttttgtattattttatggtgttattaaaagttgaattatgggttggtttaattttgtagagaagagattatttaatttatttgtggaaatttattttttagcgatattgatgttttttaagaaatttaattttgggtttgagtgatggttggtgtaaaaaataaatttaagattttagtgttttttagaagtttggatttttagggattttgttgtgagttataggacgttatcggtttttttttttttgtgggttgagtgtgggggttatgtggatttttttatgagtagatgttattagggttattggttttagtttttttttttatagttgtagtgggggttggggttggggtattttagggagggtttttgtatgagtttgtgttatagtgtgtggtattcggcggagggattaagttgatcgttttaggtgagttttttttttttttttttttttcgtttttgggataatttttgttgtttttgtttgtttttgtattttgttttaatttgtggttagtttttttttttgtattttaggtttgagtaaggatttttgttttttttgtttagatttttgtttgttttagtaggttattataattattttatttttgattataggggtaggggattagatagaatgatttattgagtttcgtttgtttgtttgtttgtttgtttttttgtttgtttttttgtttttttgtttgtttttttgattgtttgataggcgtaggttgggtttttaagttttgttttgttttggtttttttagtttgggtttttgtcggaatagttttgtttttgggttatttgggttttattttttggggaattgggaataaggggtttgagggaggtattttttgggagattttagaaggatttagtgttttcggggttgatgttcgggaattatagagttgggatttagagttaggatttagatttagaatgaggtaggaggtggaggggttgttttgggcgtttgggggttgttagggattgagttttgagttagtttgagatttaggaaatttcgttaggagggagaagggagaagtagattttggatattagaaagttaggggaagggttataaaaggagtggatgtgacggaagggcgggtttttgggtttttttagaatatattttttgtgtttagggggattagaggggtagagtttattgcgtgaaagttttattgttatgattaggtagtcgggacgtggggtggatgttagaaaagattttacggaataagagagagtttaggatagtaggtaggtttttcgatttttttaggtttttgttttatatacgggttttagaatatatatttggttggaatagtttgagggattaaaaggttttagtattttatagagttgaggagttaggttagaaaagtaattttagagttcgttgtgtaggggagatatagagttttttttatttgttaggatggtaggaggggatagggttagggcgttgagggttagatgtcggtgttgggggttaaggtttcgagagattttaggataggtggttaggtgtttaaggtaaaatagtttttcgtgtagattagggtatagtggaaaatattttgatttttttgtttggtatagatttttagatatagagtttttgaataagggtattttaatattttattatatattgaggttaggggttttttaggtggatattaggattttgattttttgttttttatttatttcgtaggttagtttaaggttgttttttcggttattttgttttcgtttttttttgaggagttttaagttaataaggttatattggtgtgttttataagtgatttttattcgggagtcgtgatagtggtttggaaggtagatagtagtttcgttaaggcgggagtggagattattatattttttaaataaagtaataataagtacgcggttagtagttatttgagtttgacgtttgagtagtggaagttttatagaagttatagttgttaggttacgtatgaagggagtatcgtggagaagatagtggtttttatagaatgtttataggtttttaatttttattttttattacgggagattagagttgtaggattttaggggaggggtttttttttttattttaaggtattaagtttttttttttgtatttaataaatttttaataaatatttttattgttaattagaaattttgttttattttattttttttttttttatatataatttttagttttttttgggtttttaatttgtggtggaaag

SEQ ID NO: 1770 - DNA, 2293 bp, Artificial Sequence
  chemically treated genomic DNA (Homo sapiens)
ttttttattataaattgagaatttaggaaaggttaggaattatatgtgagaaaagaaaaaatgagataaaataagatttttgattgataatgagaatatttattgagggtttattgagtgtagggagaagggtttgatgttttggggtgggaggagagattttttttttgggattttgtagttttagtttttcgtggtggggggtgagggttgagaatttatgaatattttgtaggggttattgttttttttacggtgttttttttatgcgtgatttggtagttgtagtttttgtgggatttttattgtttaggcgttaggtttagatagttgttggtcgcgtatttgttgttgttttgtttggagggtgtggtggtttttattttcgttttgacggggttgttatttgttttttaggttattgttacggttttcgggtagaagttatttatgagatatattagtgtggttttgttggtttgaagttttttagaggagggcgggaatagagtgatcgagggggtagttttgggttgatttgcggggtggatgaggggtagggggttagagttttggtgtttatttggggagtttttgattttagtatatgatgaggtgttggggtgtttttgtttaggggttttgtgtttgaaggtttatgttaggtagaggggttagggtgttttttattatgttttgatttgtacggggagttgttttattttagatatttgattatttgttttgagatttttcggggttttggtttttaatatcgatatttgatttttagcgttttgattttgtttttttttgttattttgatagataaagagagttttgtgttttttttgtatagcgaattttggggttatttttttggtttggttttttagttttgtgggatattggggttttttggttttttaggttgttttagttaaatgtgtgttttggagttcgtgtatggggtaagggtttggggggatcggagagtttgtttgttgttttgggtttttttttatttcgtggagttttttttggtatttattttacgtttcggttatttggttatagtagtggggtttttacgtagtggattttgtttttttgatttttttgggtataggggatatgttttgaagagatttaggagttcgttttttcgttatatttattttttttgtgattttttttttggttttttggtgtttagagtttgtttttttttttttttttttgacggggttttttgagttttaggttggtttagggtttagtttttggtagtttttagacgtttagggtagtttttttattttttattttattttgggtttggattttggttttgggttttagttttgtgattttcgagtattagtttcgagggtattgggtttttttaaagttttttaggaggtgttttttttagattttttgtttttaattttttaggagatggaatttaggtaatttaaggataaagttgtttcgataagaatttagattgaggaggttagaatagaataaggtttagagatttagtttgcgtttgttagatagttagagagataaatagagagatagagagataaatagagagatagatagatagatagatagacgaggtttagtaggttattttatttagttttttgtttttgtggttagaggtgaagtggttgtagtgatttgttgaggtaagtaagggtttgaatagggagggtagaggtttttgtttaggtttgggatgtagggagaaaggttgattataagttgagataagatatagaaataaataaaaatagtagaaattgttttaagagcggggaaggagaggggagaagagatttatttaggacggttagtttggttttttcgtcgaatattatatattgtgatataggtttatataaaaattttttttgggatgttttagttttagtttttattgtagttgtgaaggaggaagttggggttagtggttttggtggtatttgtttatgagggagtttatatggtttttatatttaatttataaagagaaggggatcggtgacgttttgtgatttatagtaggatttttggaaatttaggtttttggaggatattgggattttgaatttgttttttgtattaattattatttaggtttaggattgaattttttagggagtattagtatcgttaaggagtgaatttttatagatgggttaggtggttttttttttgtaaagttgaattaatttatggtttaatttttggtaatattatggggtggtgtagaggg

SEQ ID NO: 1771 - DNA, 2388 bp, Artificial Sequence
  chemically treated genomic DNA (Homo sapiens)
gtttttatcgtttgatgtcgtagatatcgtagtttttgatgtagggtttggttttatggggtttagtgggtgtttttttcgtgtgtggagatgagaaatcgtaaaaagtaaagatataagataaagagataaagcgaaaatagttgggttcgggggattattattattaagatacggagatgggtagtggttttaaatggttgcgtgtattgttatttattgtatataagataaggggggtagggtaaggagggtgagtcgtttaagtgattgataaggtcgagtaagttacgtgattataggatagggggttttttttttataggtagtcgaagtagagagggaaggtagtatacgttagcgtttttttttatgtatttattagaaagattaaagattttaagatttttattattttttttatcgttattttttgagaattttaaagagggattaggagtataggaggaaagtggataaggagcgtgattattgaagtatagtattatagggaggggtttaggttttcggatggttgtaggtaggtttggatattatttagttttttataagaagttggtggagttgagcgttttttgatttttttaagaaaagggagattttttttcgtggttcgttaagtaacgatgtttttttaggtattggcgttatcgtttgattaaggagttttttagtagtttttatgcgggtgtgatagagggtttattttttgtattttcggttattttttataatagttttttagtatttgattttatatttatcggttattttttggttatattagtaatataataaagagtaatattaaaagttaatgattaataatatttatattaatgattgataatgtttatgattatttttgtatttaatttgtattataattatttttattgtaagtatattttttattatattgaaatagtttgtgtttttagttttttgttttagtatttaggtaatttttcgtttatatttttgaggggttgaattgttttttattttttggaagttgggaggttggaagaggggatgcgtgcgatggatttagtatatagttgggaattcgaggtatatttaagttttcgtttgtgttgtgcggagtttatatttttttttttattggggttttaaaatttttttttatttaatagggtggtgttgtttaaagttttgggtatatattagggttggggagggggtggtggagagggggttttagtttgtttaattattaggtaacggggtatttgttttttttttagttgggtttggattcgcgttttaggtttaggttgtaatgttttttttttttttttttttttttttttgtagtttcgttgggttttgtttaggatagataaagatagagtagtttgtttttatcggaggtttttttgttagtaggaggggttcggagaaaattagaaagagggttagagttagagaaatatgaagtatttcggggttttttatattagtgtttgagtaggaatggggaggggttatgatttataaggttttgggaggttattttaaagagggttgtttaattgtaaggacgttgtaagtaggaagagaagttatagcgttttagaaaagagtgggatagggataagtatatttaagaggttgaatatgaatttatagattaggtatttttgtacgttttgttcgttaggttttttttgttattttttgttaggcggttttgttgggttttagttttggtttttttttgttttagttttatttttgggtttttttttttttggttttttcgttgtttttatttttagttaagttttttgttttgttgtgtggttttacgattgttgtttttgaatgggttattttttttatttgttttagtttagttcgtttgttgagattttttttcgaaaattatgttcgggttggtgtttttcgttttgggagggtgttttttttgtgtgttttttattatttttgggagttttggaattgggagaattgaattaaaggatgatttgagtaattaggtattttgtttttagcgttttggtgtaatttttgtaagatttattttgttttaatataaagttttaggagagggtgtgggggagggaatggtttttgtattagaaaataagttattttttttaaagatgtttttattgtgagtagagtaggatgtatacgattttagatataggttttttttttgtgagtatcgtttattttttagaatgatatttgtaatatggagtgtaggaaaaaatatgatgattaggagaaatgtttttattttaggttaggtacggtggtttatgtttgtaattttagtattttgggaggttgaggcgggcgggttatttgtggtta

SEQ ID NO: 1772 - DNA, 2388 bp, Artificial Sequence
  chemically treated genomic DNA (Homo sapiens)
tgattataagtgattcgttcgttttagttttttaaagtgttaggattataggtataagttatcgtgtttggtttaaaataagagtattttttttgattattatatttttttttatattttatgttgtaggtgttattttgaaaggtgaacggtgtttatagaggaggagtttgtgtttggggtcgtgtgtattttattttgtttatagtggaggtatttttggaagaagtgatttattttttggtatagagattatttttttttttatatttttttttaagattttgtattgaaataaagtaaattttatagaaattgtattaaagcgttgagaataaaatgtttgattgtttaaattattttttggtttaatttttttagttttagagtttttaggaatagtgggaagtatatagaggaagtatttttttagggcgggaagtattagttcgggtatgattttcgggggagagttttagtaggcggattgggttggggtaagtggggaaggtggtttatttagaagtagtagtcgtgggattatatagtagggtaaggagtttggttgggagtgggggtagcgggggaattaggggggagggagtttagaggtggggttggggtagggggaggttagggttgaggtttagtaggatcgtttggtaggaagtggtaggaggggtttggcggataaagcgtgtagaggtatttgatttgtggatttatgtttagttttttagatatgtttgtttttgttttatttttttttgaagcgttgtggtttttttttttgtttatagcgtttttgtagttgagtagttttttttaaagtgattttttagggttttgtgaattatggtttttttttatttttgtttaggtattggtgtgggaggtttcggggtgttttatgtttttttggttttggttttttttttggtttttttcgggttttttttattggtagaggaattttcgataaagataggttgttttgtttttatttgttttgggtaggatttaacggaattgtaaaaagaagagaaagagaaagagaaaggtattgtagtttgagtttgggacgcgggtttagatttagttgagagaggggtaggtgtttcgttgtttggtggttgggtaggttggagttttttttttattattttttttttagttttaatgtgtgtttagagttttgagtagtattattttgttgagtgaggggaggttttgagattttagtggggaaggaagtgtggatttcgtatagtataagcgaaggtttaggtgtgtttcgagtttttagttgtgtgttgagtttatcgtacgtatttttttttttaattttttagtttttagaaggtggggggtagtttagttttttagagatgtgggcggaggattatttaggtgttgaggtaagagattgaaggtataaattgttttagtataataaagaatatatttataataagaatagttataatataaattagatatagagatgattatggatattattaattattagtgtagatattattaattattagtttttaatattattttttattgtattattaatataattaagaaataatcggtgggtatagggttaggtgttgaagggttgttgtgagaagtgatcgagaatgtaagaggtgagttttttgttatattcgtataagggttattggagggttttttggttaggcggtaacgttagtgtttaggaaggtatcgttatttagcggattacgaaagggagtttttttttttttggaggagttagggaacgtttagttttattagttttttgtgggaggttggatagtatttaggtttgtttgtagttattcggaggtttaaatttttttttgtgatgttgtgttttaatggttacgttttttgtttattttttttttgtatttttggtttttttttgaagtttttagaagatagcggtagaagaaatagtgaaagttttaaagtttttgatttttttgataggtgtatagaagaaaacgttgacgtatattgttttttttttttgtttcggttatttataagggaagggttttttgttttatgattacgtgatttgttcgattttattaattatttggacgatttattttttttattttgttttttttgttttgtatgtaataaataatagtgtacgtaattatttggggttattatttattttcgtgttttgatggtagtggtttttcgggtttagttgttttcgttttatttttttgttttgtgtttttattttttacgattttttatttttatatacggggagaatatttattaagttttatagggttagattttatattagggattgcgatgtttgcgatattaagcggtggaagt

SEQ ID NO: 1773 - DNA, 2267 bp, Artificial Sequence
  chemically treated genomic DNA (Homo sapiens)
ttttatttgttttttttaattatatttatttttttttttatttttgtttttttttatttttttttttttttttttttttttttttttttttttttttattttcgtttttatttttatggttttgttttttgatttttatggtattgttatttttgtttttttttttttgtttttttttttttttttttttttttttagtttttagttgggttgtgggtttttttttatttggggatttgttattttttgttggaggataggtaggcgggtaggtgttatgggtgattagagttcgattttttattttatagtttggtagatattaggttttatagtttgtggtataaaggggaagttggtttagtaggtttgggtagggagtgggggattggggttttgatttcgtttggattattgtagatagtagtatttttttttgtgagattagtatatatagtagaaattttggttatagtagttttattttttaattttattttgattttttttttaataattttagttagggatgggtttttaaaagggtttttgttggttgttaatatggggtagggaaaaggggagattttgggaggtaggagattagagtttgaattttgatttagttattgcgcgttgtgtggtttttggtaggtttttatttttaggggggtttttgtgtttgtaattataaggtgggtacgtgtttttgttggatgttatatagaaaagaaggtgataatgagtatagaagcgttttgtaaaggtagatgtgggtttgatatggatagttttttttacggagtgtttattgtgtgtcgaattcgtgttatttcggttagttttcgggataatttgttttatttggtatttttattatgtttattttatagaagaggaaagtgaaggtatagagaggttagagttagtttaggttagttagttttgggtttgtgtgttttttttttttgttgtttagttttgattttggtttgaggttttttggtttgattttttttttgtaggttggggtgggaatgggagagtcgtattgtgtttagttgggttggatatcggagatttgggttttttttttttttttatattgggttttatttttttttgatttatcgatagtgatttttttcgttattttagtttttcgtttttatttaggttacgttatttgatttggaggatagtgttggtggttagaaatatgattgtttgttttagagttttttgttttggtaagttttagatgtttattatattttgtttattattggttttagtatttagttgggtttggttaggtagagtttggtatattatgggtttttagttaataattggtgatttaatggtggttttaatggatcggaatagaaggtagggtacggaggagatagggaaattaaggtaaggagagagaagtaaggaggtagatagaagtaatagataaagagagaggtggagatagagatatagagaggtataggggatatggatagtgaaggagcgagagacggagagatagaggttaagttggggtgattaagttttaggacggaggaatagacgttagaaattatagggtttaatttttttattttataaatggagaaatcgaggtttaggtggaataaatgattttaatatagttatatggcgggaatttatagtatagttggggttagaaggagtttggggagttgtttagttaggttatttgtagtcggttttttagttttaggtagggtatattgcgggggtatttggataggtttttgttttttttttttcggggttttaggtttttcgtggagtttagttttgttttgaattttttttggtttggagttagttttgtttttgtttttttattatttagtattttttcgttttttagtttttttttggttttttattttgggttaagatttggtgggtggggtgtgggtaggaattgtaagatggggtagttattggaattggggttaagacgtttgtggtgagggtttatttattagtttaggttttaaagttaggttatttggggtagtttcgtgttttttttaaagttttaggaatgggttgtttgttagagggtgggggtagagaagggggatggtttattatgttggtggttttattttgagtatttattattattattgtattttttattatattttttttttttttgttttgttttatggagttaatttattttttttttttttttttttttttttttttttttt

SEQ ID NO: 1774 - DNA, 2267 bp, Artificial Sequence
  chemically treated genomic DNA (Homo sapiens)
aaaaaaaaaaaagaaaagaaaaaaagaaaagaaaataaattggttttataagatagggtaaaaaagaaaaagatataatgaaggatataataataataataaatgtttagagtggagttattaatatggtgggttattttttttttttgtttttattttttggtagatagtttatttttggggttttagggggggtacggaattgttttagatgatttggttttgaagtttagattggtgggtgggtttttattataggcgttttggttttagttttagtggttattttattttgtagtttttgtttatattttatttattaagttttggtttaggatgaaaggttaaggagaggttaggaagcgagggggtgttgggtggtggagggatagaggtaaagttggttttaggttagggagagtttaagatagagttgggttttacggggagtttagaatttcgaaaaagaagagataggagtttatttagatgttttcgtaatatattttgtttgggattggggagtcgattgtaggtgatttagttgagtagttttttaggttttttttgattttagttgtattgtgagttttcgttatgtgattatgttgaagttatttgttttatttgggtttcggtttttttatttgtgaaatgggaggattgggttttgtgatttttggcgtttgttttttcgttttgaggtttgattattttaatttgatttttgttttttcgtttttcgtttttttattgtttatgttttttgtgtttttttgtgtttttgtttttatttttttttttgtttgttatttttatttgtttttttatttttttttttttgttttggtttttttatttttttcgtattttattttttgtttcgatttattggaattattattgagttattagttattgattgagaatttatgatgtgttaagttttatttagttaggtttagttaggtgttggggttagtggtgaataagatgtggtgggtatttggggtttgttagggtaggaggttttgggataggtagttatatttttggttattagtattgttttttaggttagataacgtggtttgggtagaggcggggaattggggtggcgagagggattattgtcgataggttaggaaaggatggggtttaatgtggggaaaagaaaaagatttaggttttcgatatttaatttagttgagtatagtgcgatttttttatttttattttaatttataaagaggaagttaggttagggggttttaggttaaggttaaggttggatagtaggagaagaaagtatataggtttagagttggttggtttgggttggttttgatttttttgtgtttttattttttttttttgtgaaatgggtataatgaaagtattaaataaggtagattgtttcggggattgatcgagataatacgggttcggtatatagtaagtatttcgtaaaaaaggttgtttatattaaatttatatttgtttttataaaacgtttttgtgtttattgttatttttttttttatatggtatttaatagggatacgtgtttattttataattgtagatatagaggtttttttaggggtagagatttattaaaagttatatagcgcgtagtggttgagttaggatttaaattttggttttttgttttttagggtttttttttttttttgttttatgttggtagttagtagggatttttttgggggtttatttttggttggggttgttgagaaaggagttagggtagggttggaaggtgaagttgttgtggttagggtttttgttgtgtgtgttggttttataaaggaaagtgttgttgtttgtagtgatttaggcgaggttagggttttagttttttattttttgtttaggtttgttgagttagttttttttttgtgttatagattatagggtttgatgtttgttagattataaaatggggggtcggattttagttatttatagtatttgttcgtttgtttgttttttagtaggaagtagtaagtttttaggtaagagggaatttatagtttagttgagagttgaaggggaggggaagagaaaagggagatagagagagggaggtagagatagtagtgttatgagagttagagagtagggttatggagataaagacggaagtggagagaggaagaaagggagggagagggagaggggagagagtgagaaaagatagaaatagagagagaagtaaatataattaaaaaggatagatagag

SEQ ID NO: 1775 - DNA, 2408 bp, Artificial Sequence
  chemically treated genomic DNA (Homo sapiens)
attataggcgttcgcgttattttcggttaatttttgtgtttttagtagagacggggttttattatgttggttagtttggttttgaatttttgattttaggtgatttatttatttcggttttttaaagtgttgagattataggcgtgagttattgcgtttagtttaaagttatgcgtttgatagagttgtattttatttttttaaaaggaaattggtgtggttattttataggttatgagtaggatttaggtgttttttaggttatacggatggtaagaaagaagtagggttggattttattttagatgatttggtttttagttatgttgtttttttatgtttgttatatttattttatatataagtatgtatgtatgagggattttttaggttttttatacgttaatttagagggtagggtttcgggataagaggtatatagtaaattgtataagttttggatatttggtaagtgtgttatagtttgtaaagtatgtttgtaattaatagtttttttatgttgtttatagtgttattcggatttatttttaggttttgtggatttagtaggttttggtttagttttttttttttgttttatttttttttaggttttttgagttttaggttaattgggttattagtttttttttgtatatgtgttttaagtttttatttttgaatttttttttagaatgtttttttttttattttattttgtatatattttttttattttttagagtttagtttaaatgttttttttaacggtaagtttatttggattgttttaattggaagagaaaggggaaagagagaaggaaaggaataggtattttttgaatgtttattttgtattaggtatgttatgtaattttataataattttgtgatatggtttgtttttgttttattttataggtagaaattgaggggaaatgattcgttggagtttatatagttaggaaggatgtttttggattttttatttagtgtttatttttttgttttagttaggaattttgtggggttgatgagggttaatattttattttttttttttttcgtggttgatttttgggggtggtgatttggttttttttttttttgttaaagttagagttgttgacggtttgttattggttttttagttagggttggtttttgtttttgtggtttagttgttgagtcggggttttgttttttaggggttttttttttttttttgtttataagagttcgatttcggttggttttagatttgatatgttttttgggtttatttcggtaagttttaggtttggaggaggggtgggattagagttttgagtgagtattttgggaggcgaggaatttaggtttttagttttagggatgttattgtgttattttgaatgttatttttattttaattaaggatgagttttaattattaagattagtatttgttttttttatttaaaaataaattatttttgtagttttattgtttaaatttttattattagagttatttttttgagttaggtgttgtttttggaagggtttttttatgttgagtattttagtattcgttggggtgatgtatttatttattagtagttataaaaatttttttataataagtagataagagaatatagagtggggtttagagttaatgagatttagtaagggtgagttttgagatggggataggatggaagatggtattggtgatagatggaaaggataggagagggataggttaaagttatgtattgtttttagtttagttatttttggattttttatgtggattttgattaggtttaagttagttatttgtataaagaggagagtagagggttagggtggaagattataatgttttttttttttgtaggaaggggttataatgattttgtaatgtataaagttagcgggattttggaaggtaggaagaggtatggggagggggtgtttagggggtatggggagggtttaggtttttatgaattttaggaggggggtattataaatgtttattttatagaggtgtaattaaggtttagagttgagaagggatttgtatgttatatatagggaggttgaatgtgaatttgggttttttggtttttaaagttgatttgttatattttttggtagaggttgtagtttttgggtatgatttttttgattatttttgtgtgtgtttgtttgttttataaagtttttggatttattattagtttttaaaagtttggaagaattatataaaagtttagatttagtgattgttttgagaaattggaaggtttggtttgtatttttatttggtaattattggtggtattgggaagaggttatttatttatttggtatttgtgttgtttagtgttttatatttattattgtttttgtttttt

SEQ ID NO: 1776 - DNA, 2408 bp, Artificial Sequence
  chemically treated genomic DNA (Homo sapiens)
ggaaggtaagagtagtgataaatgtgagatattagatagtataggtgttaggtaaatgggtggtttttttttagtgttattaatggttgttaagtgggaatgtaggttagattttttaattttttaagataattattagatttggatttttatgtggtttttttaggtttttaaaggttgatgataaatttaaaagttttataaaataaataaatatatatagagatggttaaagaaattatgtttaaagattgtaatttttgttaaagagtgtaataggttaattttgggaattagaagatttaaatttatatttaatttttttgtatgtgatatataagtttttttttaattttgagttttgattgtatttttgtgaaataggtatttataatgttttttttttaggatttatggggatttgaattttttttatattttttgaatattttttttttatgtttttttttattttttagggtttcgttgattttgtgtattgtagggttattgtggtttttttttgtagaagagaagaatattataattttttattttgattttttgtttttttttttatgtagatggttggtttggatttggttaggatttatatagggagtttaggagtgattgggttaggggtaatgtatggttttggtttgttttttttttgttttttttatttgttattaatgttattttttattttatttttattttaaaatttatttttgttgggttttattgattttgagttttattttgtatttttttatttgtttgttatgggaaaatttttgtggttgttggtgggtgggtgtattattttagcgagtgttgaaatgtttagtataagagagtttttttaaagatagtatttagtttaaagaggtagttttgatggtggaaatttaggtaatagggttataggaataatttgtttttaaatgagggaagtaggtgttggttttgatggttggggtttatttttggttaggatgaggatggtatttaggatgatatagtgatatttttaggattggggatttgggtttttcgttttttagaatgtttatttagaattttgattttattttttttttaaatttgggatttatcgagataggtttagggaatatgttagatttgagattagtcgaggtcgggtttttataggtagggagggaagaggggtttttgggagataaagtttcgatttagtaattgggttatagaaataaaagttagttttggttgaagagttaatggtaagtcgttagtagttttggttttagtagggagggaaaggattagattattatttttagggattagttacgaagaaggagagaggtggaatattggtttttattagttttataaggtttttgattagagtaggagaatgagtattagatgaggagtttagaagtattttttttagttatgtgagttttagcgagttatttttttttaatttttgtttataaaatggggtagaaataaattatattatagagttgttgtgaggttatataatatgtttggtatagagtaaatatttaggaaatgtttatttttttttttttttttttttttttttttttttagttgaagtaatttagataggtttgtcgttagaggaggtatttgaattagattttgaaggatgaggaagatatgtatagagtgagatggaaggagaggtattttaagaaaaagtttagaggtgggaatttggggtatatgtataagaaagagttggtagtttaattggtttggagtttaggggatttgaagggaagtgaggtaggagaagagggttaggttagggtttgttgggtttataaagtttgaagatgaattcggatggtattgtgggtagtatagaggagttgttagttgtaaatatgttttgtaaattgtggtatatttgttaaatatttaggatttgtataatttgttgtgtgttttttgtttcgaaattttgttttttgaattggcgtatgagggatttaagaggttttttatatatatatatttgtgtgtaaaatgggtgtaataagtataggaaaatagtatgattggaaattagattatttgagatgaaatttagttttgttttttttttattattcgtgtgatttggaggatatttgagttttgtttatgatttgtaaagtggttatattagtttttttttaagagggtgaaatgtagttttattaaacgtatgattttaggttgggcgtaatggtttacgtttgtaattttagtattttgggaggtcgaggtgggtggattatttgaggttaggagtttaagattaggttggttaatatggtgaaatttcgtttttattaaaaatataaaaattagtcgggagtagcgcgggcgtttgtaat

SEQ ID NO: 1777 - DNA, 2432 bp, Artificial Sequence
  chemically treated genomic DNA (Homo sapiens)
ttggtttagtatttgagcgtttatttataggatatttatttgtagaggtgttttgagcgttattgtgggttaagggatttttttttttttggagatagtttttgagaagttgaaggttttgggggttttttattaaatgtttttgggaggtgggaaaatattaaatgcgggtgtggtttttttggaatagttttgtgtggggatttaggagttaagttttttagtatacgtttttaatatttttagtaggggttatttttttggagttacgggtggttgttaatattttgtggtttttagtaggtattatttaggtaagagagagaataggtcggggaataatgggttggtttggtcgtaagcgttggggtagattatagatcggatggtttaagtttatgttttggggttatttttgattttttgtaagtgtggtaagggttttttttggatattttgagaagttgtagttgggagaggattattcgtttgtttggatgtttagtttaggtgttagggtttaaatgattagttttaggtcgtagtttttattattcgttttggttgtaggggtttttagaagttattaagggtttggttcggttttgtttattcgtatttgagttttagtttttttatttgtttaagaagggaggtgaatattgattaaattatgtaaatttttagcggtaggattaggtgtggttgggatagttaaggttttttagggtggtggtatttttggagttcggggatgggttttgtttttttttcgggtttttcgttgggtttgggtattttttttttttttttttttttttttttttagaggggatttttgtagagttgttttcgttttagggtttagtttgtgtttgatttaaatagtttttgtttttttttgaggatgagttgggtgtattttttttttgtaggaagatgagggttagagatggaggtttatgttagggttatagagtttggaattttttttggagttaaaatagttttgttttatttattttgcgtattttattttttgttttagtttcgtcgggttcgttttgtatgtaaggcggggttgggatttagggtttgagtttcgttttttggatattcggtttatcgtttgttaaaggttttgtggttggaggtttcggtttttttatttttttatagggttttagggtcgatttaggtttgcgggttaggaatgtgttaacggggtaatttgggttttgttggtttacgtaggtatttgtggattttgagaggggattgggtggggaggggcggggaggggcggggcggggcggtgtcgtagagtgtagggcgggcggggttaggttagtagggagtgagtttgtttggtcgtttcgtttcggagttattgtattgttggttgtagatataggttgtattatgaagttagtttttttgttttgggttttgttgttgttggcgatagttttcggttcgggtttcggatttatagtaggtatgtttttttgtttttttgtgttttcgtttgtttgtttatttgtttgtagttaggtttgggttgatatttttttgggtttagtttttgtttatttgttaggttatttgtggttgtgttaggggtgatgggaagaaattttgagggtttatgtggaggggtagtttatggggatgggaggtttgagtcgggtttattttaaatttgttggtagttaggagggaggcgggggagattagtagaggttttcgtttgtgtttttagttttgatagggcgggattacggagggggagttaggattgtgggtttttattagggtggggttgaatttaggaaagtttagggaaagtttcgaattttagaattaggatattggttttaggttgtttttcgttttttattttattttttatcgatttttttgttatttattttatttgtaagtatttttcggttttttttttcgatttttgtgcgttattaaatttttggttagtatatatttattgttgtttttaagtgttaggtattgtatttggtgaagtggggttagcggggtggtttaggtttaggtttggttttcgattggttttttttgatgggggatggggaagggttagggaagtgtaattttagtttgggtgtatgtatttgttttagtttttttttgtaattttttttttatgttagtttttggaaatatggttttgtttatcggttttatggtttataggagaagttttgggttcggcgtttatagttttttgtggtgtgtatttttatttttttttttttattgttgggatttttgtttgaaatgttttttttttttttagaaaggaggggagcggttttggttttttgttttgagtacggagttttttttggggttttaattgtagtttttgggagagcgagaagtgttacgtttag

SEQ ID NO: 1778 - DNA, 2432 bp, Artificial Sequence
  chemically treated genomic DNA (Homo sapiens)
ttgaacgtgatatttttcgtttttttaggggttgtaattgagattttaaagagagtttcgtgtttagggtagaaggttagggtcgttttttttttttttggggagaggagggatattttaagtaggggttttagtagtggggaaagggaagtgggggtgtatattataaggggttgtgggcgtcgggtttaaaattttttttatgggttataagatcggtgggtaaggttatatttttaggggttggtatgaaggaagggttgtagggagggattggggtaggtgtatgtatttaggttggaattgtatttttttggtttttttttattttttattaaaagaggttagtcgagggttaggtttgggtttgagttatttcgttggttttattttattaagtgtagtgtttggtatttaaaagtaataataaatatgtattggttaaggatttggtggcgtataggggtcgggggaggaggtcgagagatgtttgtaagtgagataagtggtaagagggtcgatgggaaatggggtgggggacggggggtagtttgggattagtgttttggttttggagttcggggttttttttagatttttttggatttagttttattttgatgaggatttataattttggtttttttttcgtgatttcgttttgttagggttggggatataggcggaggtttttgttggtttttttcgttttttttttagttattagtaggtttagggtgggttcggtttagattttttatttttatgggttgtttttttatatggatttttagaatttttttttattatttttagtatagttatagatggtttgatagatggatagaggttgagtttagagggatgttagtttaggtttggttgtagatagatggatagatagacggggatatagaagggtagggaggtatatttgttgtgggttcggggttcgggtcgagggttgtcgttagtagtagtagggtttagggtaggagggttggttttatggtgtagtttgtgtttgtagttagtagtgtagtggtttcgaggcgaggcggttagataagtttattttttgttggtttggtttcgttcgttttgtattttgcggtatcgtttcgtttcgttttttttcgtttttttttatttagtttttttttaaagtttataggtgtttgcgtggattagtaaggtttaagttgtttcgttagtatatttttggttcgtaggtttggatcggttttgggattttgtgggagggtgaggaggtcggagtttttagttataggatttttggtaggcgatgagtcggatgtttagagggcgaagtttagattttgggttttagtttcgttttgtatgtagggcgagttcggcggggttgaagtagaggatgggatgcgtagggtgaataaggtagggttgttttagttttagggaggattttagattttgtggttttgatatagatttttatttttagtttttatttttttgtaggaaggaggtgtatttaatttatttttagggggaggtaggagttgtttgggttagatataggttgagttttggggcggaggtagttttgtaggggttttttttggagggaggaaggaggaaggggagagaaggtatttaagtttagcggggggttcggaagggagatagggtttattttcgggttttagagatgttattattttggggagttttggttgttttagttatatttaattttgtcgttaagagtttgtataatttaattagtatttatttttttttttgagtagatgaggaaattgaagtttagatgcggataggtaaggtcgagttaggtttttggtggtttttgggagtttttgtagttagggcgggtggtaagggttgcggtttgggattggttatttggattttgatatttgggttggatatttagataggcgggtggtttttttttagttgtagttttttaaggtgtttaaaagggatttttgttatatttgtagggagttagaggtggttttagggtatgagtttaggttattcggtttgtgatttgttttagcgtttgcggttaggttagtttattgtttttcggtttgtttttttttttgtttgggtggtgtttgttgggaattatagggtgttggtagttattcgtggttttagagaggtggtttttattgaaagtgttagaggcgtgtgttgggggatttggtttttgagtttttatatagagttgttttagggaagttatattcgtatttgatgtttttttattttttaaagatatttggtgagaggtttttaagatttttagttttttagggattgtttttagaggggagaaagttttttaatttataatggcgtttagggtatttttgtaggtgagtgttttgtaagtggacgtttaggtgttgagttag

SEQ ID NO: 1779 - DNA, 2359 bp, Artificial Sequence
  chemically treated genomic DNA (Homo sapiens)
aggacggatatttcggatttttttttgtatttagtgttgtagggagtaattttagttttgggtttgggatgaatgttttcgttagtttggggttaggagataggttttttttggtttagtatttgagcgtttatttataggatatttatttgtagaggtgttttgagcgttattgtgggttaagggatttttttttttttggagatagtttttgagaagttgaaggttttgggggttttttattaaatgtttttgggaggtgggaaaatattaaatgcgggtgtggtttttttggaatagttttgtgtggggatttaggagttaagttttttagtatacgtttttaatatttttagtaggggttatttttttggagttacgggtggttgttaatattttgtggtttttagtaggtattatttaggtaagagagagaataggtcggggaataatgggttggtttggtcgtaagcgttggggtagattatagatcggatggtttaagtttatgttttggggttatttttgattttttgtaagtgtggtaagggttttttttggatattttgagaagttgtagttgggagaggattattcgtttgtttggatgtttagtttaggtgttagggtttaaatgattagttttaggtcgtagtttttattattcgttttggttgtaggggtttttagaagttattaagggtttggttcggttttgtttattcgtatttgagttttagtttttttatttgtttaagaagggaggtgaatattgattaaattatgtaaatttttagcggtaggattaggtgtggttgggatagttaaggttttttagggtggtggtatttttggagttcggggatgggttttgtttttttttcgggtttttcgttgggtttgggtattttttttttttttttttttttttttttttagaggggatttttgtagagttgttttcgttttagggtttagtttgtgtttgatttaaatagtttttgtttttttttgaggatgagttgggtgtattttttttttgtaggaagatgagggttagagatggaggtttatgttagggttatagagtttggaattttttttggagttaaaatagttttgttttatttattttgcgtattttattttttgttttagtttcgtcgggttcgttttgtatgtaaggcggggttgggatttagggtttgagtttcgttttttggatattcggtttatcgtttgttaaaggttttgtggttggaggtttcggtttttttatttttttatagggttttagggtcgatttaggtttgcgggttaggaatgtgttaacggggtaatttgggttttgttggtttacgtaggtatttgtggattttgagaggggattgggtggggaggggcggggaggggcggggcggggcggtgtcgtagagtgtagggcgggcggggttaggttagtagggagtgagtttgtttggtcgtttcgtttcggagttattgtattgttggttgtagatataggttgtattatgaagttagtttttttgttttgggttttgttgttgttggcgatagttttcggttcgggtttcggatttatagtaggtatgtttttttgtttttttgtgttttcgtttgtttgtttatttgtttgtagttaggtttgggttgatatttttttgggtttagtttttgtttatttgttaggttatttgtggttgtgttaggggtgatgggaagaaattttgagggtttatgtggaggggtagtttatggggatgggaggtttgagtcgggtttattttaaatttgttggtagttaggagggaggcgggggagattagtagaggttttcgtttgtgtttttagttttgatagggcgggattacggagggggagttaggattgtgggtttttattagggtggggttgaatttaggaaagtttagggaaagtttcgaattttagaattaggatattggttttaggttgtttttcgttttttattttattttttatcgatttttttgttatttattttatttgtaagtatttttcggttttttttttcgatttttgtgcgttattaaatttttggttagtatatatttattgttgtttttaagtgttaggtattgtatttggtgaagtggggttagcggggtggtttaggtttaggtttggttttcgattggttttttttgatgggggatggggaagggttagggaagtgtaattttagtttgggtgtatgtatttgttttagtttttttttgtaattttttttttatgttagtttttggaaatatggttttgtttatcggttttatggtttataggagaagttttgggttcg

SEQ ID NO: 1780 - DNA, 2359 bp, Artificial Sequence
  chemically treated genomic DNA (Homo sapiens)
cgggtttaaaattttttttatgggttataagatcggtgggtaaggttatatttttaggggttggtatgaaggaagggttgtagggagggattggggtaggtgtatgtatttaggttggaattgtatttttttggtttttttttattttttattaaaagaggttagtcgagggttaggtttgggtttgagttatttcgttggttttattttattaagtgtagtgtttggtatttaaaagtaataataaatatgtattggttaaggatttggtggcgtataggggtcgggggaggaggtcgagagatgtttgtaagtgagataagtggtaagagggtcgatgggaaatggggtgggggacggggggtagtttgggattagtgttttggttttggagttcggggttttttttagatttttttggatttagttttattttgatgaggatttataattttggtttttttttcgtgatttcgttttgttagggttggggatataggcggaggtttttgttggtttttttcgttttttttttagttattagtaggtttagggtgggttcggtttagattttttatttttatgggttgtttttttatatggatttttagaatttttttttattatttttagtatagttatagatggtttgatagatggatagaggttgagtttagagggatgttagtttaggtttggttgtagatagatggatagatagacggggatatagaagggtagggaggtatatttgttgtgggttcggggttcgggtcgagggttgtcgttagtagtagtagggtttagggtaggagggttggttttatggtgtagtttgtgtttgtagttagtagtgtagtggtttcgaggcgaggcggttagataagtttattttttgttggtttggtttcgttcgttttgtattttgcggtatcgtttcgtttcgttttttttcgtttttttttatttagtttttttttaaagtttataggtgtttgcgtggattagtaaggtttaagttgtttcgttagtatatttttggttcgtaggtttggatcggttttgggattttgtgggagggtgaggaggtcggagtttttagttataggatttttggtaggcgatgagtcggatgtttagagggcgaagtttagattttgggttttagtttcgttttgtatgtagggcgagttcggcggggttgaagtagaggatgggatgcgtagggtgaataaggtagggttgttttagttttagggaggattttagattttgtggttttgatatagatttttatttttagtttttatttttttgtaggaaggaggtgtatttaatttatttttagggggaggtaggagttgtttgggttagatataggttgagttttggggcggaggtagttttgtaggggttttttttggagggaggaaggaggaaggggagagaaggtatttaagtttagcggggggttcggaagggagatagggtttattttcgggttttagagatgttattattttggggagttttggttgttttagttatatttaattttgtcgttaagagtttgtataatttaattagtatttatttttttttttgagtagatgaggaaattgaagtttagatgcggataggtaaggtcgagttaggtttttggtggtttttgggagtttttgtagttagggcgggtggtaagggttgcggtttgggattggttatttggattttgatatttgggttggatatttagataggcgggtggtttttttttagttgtagttttttaaggtgtttaaaagggatttttgttatatttgtagggagttagaggtggttttagggtatgagtttaggttattcggtttgtgatttgttttagcgtttgcggttaggttagtttattgtttttcggtttgtttttttttttgtttgggtggtgtttgttgggaattatagggtgttggtagttattcgtggttttagagaggtggtttttattgaaagtgttagaggcgtgtgttgggggatttggtttttgagtttttatatagagttgttttagggaagttatattcgtatttgatgtttttttattttttaaagatatttggtgagaggtttttaagatttttagttttttagggattgtttttagaggggagaaagttttttaatttataatggcgtttagggtatttttgtaggtgagtgttttgtaagtggacgtttaggtgttgagttagggagagtttgttttttggttttaggttggcgagggtatttattttaggtttagggttgaagttgttttttatagtattgggtgtaggggagggttcgaggtgttcgtttt

SEQ ID NO: 1781 - DNA, 2436 bp, Artificial Sequence
  chemically treated genomic DNA (Homo sapiens)
tattgggtgggtattattaaaggattatttttaaataaaggtaaaattacgattttcgtgtaattatagaatgaatatttattagagattttatttaaagtattaattaatgatagaataaggaaaatggtataattggtttaaaggagaatttaagtattatatatagatatgtaggtaaatataaatgttggtatttatttataagtagatacgaaatcggttaataatttgaggataataattaattgtattttattggatataatttatttgtatttttatggtattaagtatttgtattattattggttttttttttaagtttcgagagttaggaaatagtttaaagatgatgaaaggtatagatattttggagagttatgttagatagaatatttagtaatttttatagattttttggtttatattaatattttttataattttttttgatagtatagtgtagttattattattttagagaagaagtgaggggttatgttgtgttttttggatttttgttttttaatttgtaaaatgggtatgataagagtttttgataatttagagatatgaggttttgttgggataagtatcgtgggaaacgtgaagtgttaagggatagtgttttaaattttagtgtggtttttttttttgatttagtttatatttttgttttattttggaagatttatttttttttttttatattaattttgatttgataatatttttgaaattagagaatgaggtgttgattttgtatgttttttttttttaatatatatgaatatagataaaaagttattgagataagaaaggtaagtttatttttgtattaattaatttagtgttttgtgggaagtataggattaggaagaaattaaatgatagtttataaatatatatatatatatatatatatatatatatatattttattaattattattattattatcgtcgttattattaatgtattttgtaaatttatatataatttgtaaatttttttttgaaataagagagagagggtaattgaaattatttaaggtagtatttggaatacgtaggttaaagattgagttagggagggattgttattatatgggttgtggggaggtagagtttttttgtgttttcgagagtattttttttcggggttttattagtttttaattcgtttttcgaatttttatttttttttttgttttgcgtttttggaaatttagatagcggttttattttcgtgatttatttagtaggaatgtgggagttttcgaattgttttagttaaagttttttaattttttttcggtgatgaatgggtgaggtttttaaatgaaatgtggaggtttttagttttagttcgcggtttttttttttttcggcgtaattatttttgtgtagaatatgttaagtgttttgtttttcgggaatttgtttcgtatgtaaatatttggtgattaagcgaggtttatttaattaagtattttgtaatgatttttaaattaaagaatagtggattaggagtttagttcgtgttggtgatgggaaaggtagttttatattataaggaggtagatagtgatttggtgtggggaggcggtcgggttaagcggggtagagtaggcgttttgggaattttgttagaattatttatttatttatttaattaatttatttttggagtattttttggagttagagtagttggtgaataataataataataataatagggttaggtattgtgttaataagtttgttgaataataagagtgaggaggagttagagatagttattgagagttgattttattaggtatgaattgttagtagtagtgacggtaataataagtatttttattgtagtagtaaatttttgaataggattttgttgtggttttgcgtgttttgaaattgttgggtttttgttatggatttggtttttggaaatagtttttatttttgttgttgttttattgatttattggttttttatttattagtggtttattttttatatttgtgtaatgggtagttggatttagattttttttaagatgtttttgggttttaggagtttagggtgttttttttgtttttgggggttataggaatggtggcgttattttgggggttttagttgtaatattgtagaaggttttagagtttagttttatatagttttaggatagagtaagggtgatttttagtttagatttttataaattgtgggatttttattaggtagtttgttttttttgacggataagttttttattttttaattgaaataatttttttatttgtttttagggtttttgtaagggaattatatagatttatggatatagatgttttttgaaaattatttatttggtggtagaagttattatgttttaaatttggatttacgaatatatttta

SEQ ID NO: 1782 - DNA, 2436 bp, Artificial Sequence
  chemically treated genomic DNA (Homo sapiens)
tggggtgtgttcgtgggtttaagtttgagatatgatggtttttgttattaggtagatggtttttaaagggtatttatgtttatgagtttgtgtgatttttttataggagttttggaagtagatggaagggttattttaattgagaggtgaaggatttgttcgttagagaggataagttatttggtgaaggttttataatttatgaaggtttgagttgagagttatttttgttttgttttggagttgtgtagggttgggttttgaagttttttgtaatattgtagttgaggtttttaaagtggcgttattatttttgtggtttttagaagtagaggagatattttaggtttttaagatttaaaagtattttagagaagatttagatttaattatttattatatagatgtgggaagtgagttattggtgggtgagaagttagtgagttagtaagatagtaataaagatgggggttgtttttaaaggttaagtttatggtagaaatttagtagttttagggtacgtagggttatagtaaaattttatttaaggatttgttgttgtaatgaaaatgtttattattgtcgttattattattagtagtttatgtttagtagagttagtttttaataattatttttggtttttttttatttttgttatttagtagatttattagtatagtgtttggttttattattattattattattgtttattagttattttggttttaagaagtgttttaaaaataaattgattgaatgaatgaatgagtgattttagtagagtttttagagcgtttattttgtttcgtttggttcggtcgtttttttatattagattattgtttgtttttttgtgatatgaagttgttttttttattattagtacgaattggatttttaatttattgttttttggtttaagagttattataaagtgtttaattaagtaagtttcgtttaattattaaatgtttgtatgcgaaataagttttcgggaagtagggtatttgatatgttttgtatagaaataattacgtcgaggagggggagggtcgcgggttgggattgggagtttttatattttatttgagggttttatttatttattatcgaaggggaattaaaaggttttagttggagtaattcgagaatttttatatttttgttggatgaattacgggagtggggtcgttgtttgggtttttaaaggcgtagagtaaggggagaggtgggaattcgagaggcgagttgggggttggtggggtttcggggaggggtgttttcggggatataggggagttttgtttttttatagtttatgtgataataatttttttttggtttagtttttggtttgcgtgttttaagtgttgttttagatagttttaattgtttttttttttttattttaggaggaggtttgtaaattgtatatgaatttgtagaatatattggtggtggcggcggtggtggtggtggtggttagtggagtgtgtgtgtgtgtgtgtgtgtgtgtgtgtgtgtgtttgtaggttattatttaatttttttttaattttgtattttttatagagtattggattagttggtataagaatgaatttattttttttattttaatggttttttgtttatatttatatgtattagaaaaaaaaaatatatagaattagtattttattttttgattttaagggtattattaaattaaagttggtataaaggaaaaaaaataaattttttaaggtagaataaggatgtgaattaaattaggaaggagggttatattgaggtttgggatattgttttttagtattttacgttttttacggtatttgttttagtaggattttatgtttttggattgttaaaggtttttattatgtttattttgtagattaagaaatagaggtttaggaaatataatatagttttttattttttttttgggatggtggtggttgtattgtattgttagaaaaaattataaaagatgttgatatgggttaaaaaatttataaagattgttgaatgttttgtttagtataattttttaggatatttatgttttttattatttttgagttattttttaattttcgaagtttaagaaaaaaattaatagtaatataaatgtttggtgttatagaaatgtaaatgaattgtgtttagtggaatgtaattgattattatttttaagttattgatcgatttcgtatttatttgtaaatgaatgttagtatttgtgtttgtttgtatgtttatgtgtggtgtttaaatttttttttgaattagttgtgttattttttttgttttgttattaattaatgttttaaataaaatttttgatgggtgtttattttgtaattgtacgagagtcgtgattttgtttttatttaaaaatgattttttaatggtatttatttaata

SEQ ID NO: 1783 - DNA, 2391 bp, Artificial Sequence
  chemically treated genomic DNA (Homo sapiens)
ttatttttggtatttttagggttgtttacgttgtatttttgttttgtttgtttttattatgagtagttgtattgttgagggttatttgggggaataagttggttggcggttaggtattttttatttgagaatatggcggtttaaaatttaattatgatgtttatgtttttacgtagtcgtttttttttttgagtaggaaattttgggggatagttttaaataattataagaggataacggttgagtgtttggagttagggattagaggttagttatataaagtagtgagaaggtgatgtagataattttttaatgataaaaggttagtttaaagttagttattagtaaggatgatttggtttatttttatgggaaggtgtggtggttcgggagtttttttatgttttttttttttattgtttatagtagtttttatagttttttattgaagttgtatttgtggtagattagggtaaggaagttgtatttatataatagtatagtttatgggtgtagagttttaggtagtgggtgtttgtaatttttcgtgtaataagtttttatattaatagggaaattaaatggacgtatttaattttttaaattagttgaattgagggaaaatttgtttatatttcgttgggaggttagttttaagtatacgggatatatgtatagggttgaaaggtatttaaatttatagggttagggatattgaaggaggaggttggtgagtataattgggtaattgtgtatttttgtgagtgattttttgggggtttggggcgatggagtatttggaggggttgggtcgtttttggatgttgtatagtatattttgggggagtatttgaagtagttaaaggtagtggagtagattttttcgcgaagtatattgcggatggttgtatttggaattatatcggtatgtaggagggatagttttagggttagtagtttgtgagggagtttcggattcggttagagtaggagtttggtttggggttaagtttattttatggatttttttttttgtttttttaggagtagtttattgaaatgtgtttttcgtttatagaagtatcgtgatatatagacgttttatgatatattgtatatattaggggttttgtgttttttaggaagagggtttttatttgaagcggggttcgatggtcgttacgtgtcggtttatgttttttttggttttgtcgatgtttagggatatggagcgttgtagtaggttggagaagatttttatttggttagagttgtagtatttggcgattttaaatcgttgtattaggaattgagcgaaaagaggaagacgttgtggtggtggggttgagtcgggttaattttggggtcggtagagatagttgaggaggggttttgggttgattggtcgagtttgtcgaaggttttgggttcggttatttttattttaggaatagttttggttttttaggtggagtattttatagttttcgtgggggaataggtacgtacgtcgatttagatgtagtggggggttatttcggggggatagggtttgggttgatttgttttcgaggtagttagggggtttgttttttttattttagtagaaaataggttaaatttttgttttattgttatgtgttagtttttgttatttttcgtatgaattataggtatagaaggaatgttagtttttttgtgaaatataaaaaggggttattgttaagttttttttaattaaaaaaaggaatacgtgtttattgaataagatttagaaattaagaaaagtatgaagaaaaaattgaagatcgtttatagttttatattttagggttatttgtgttagtgtttggtgtattttttttagtttttcgaggttgtattttgtttaattcggtttatcgtgtggatattgtaggtgtgaggtggtagtattcgggatgtatttgatgttttgataggtattgggtaggtgatttttttttataattttgataattttttgtggttgtgagcgggaagatttttttgtgggttgttgagttggtaagggtagaagagggttttggatttagggtttggttttttttttttattttatatagattttattcgatatttttatttcgttaattagattaggaaggtttatggagtcgaggcgagtttgtagttattatggttaggtttgggagtttagggttaggttgtttttatggtttagttatgtttagttaggtttttatttcgtgggggggtatgaggggtgtttagagggagtagtatggtgttcgggagatatttgggtgttgtagagagtaagaggtgtagtttatatatggaaagtttttatgatttttgggtgtttttataaggagattaataaatagt

SEQ ID NO: 1784 - DNA, 2391 bp, Artificial Sequence
  chemically treated genomic DNA (Homo sapiens)
gttgtttgttggtttttttgtaaaaatatttagaaattatgggggttttttatgtgtgagttgtattttttattttttgtagtatttaggtgtttttcgggtattatgttgttttttttgggtattttttatgtttttttacggaatggggatttggttgagtatgattgggttatgggagtagtttgattttgggtttttaggtttggttatggtggttgtaggttcgtttcggttttatgggtttttttaatttggttagcgggatgaaggtatcgggtagggtttgtgtggggtggagaggaggagttaggttttggatttagaatttttttttgtttttgttagtttagtagtttatagaggggttttttcgtttatagttatagagggttattagggttatagagaagagttatttatttagtgtttgttagggtattaggtatatttcgggtgttgttattttatatttgtaatgtttatacggtgaatcgggttgaatagaatgtagtttcgagaggttggagaaaatatattaagtattgatatagatgattttgggatgtgggattataggcgatttttaattttttttttatattttttttggtttttaaattttatttagtgagtacgtgtttttttttttaattagagaaaatttgatagtagtttttttttgtgttttatagaggagttaatattttttttgtatttgtagtttatgcgggagatggtaggggttggtatatgatagtggagtagaaatttggtttgttttttgttgagataaaggaagtagattttttggttgtttcggaagtaagttaatttaaattttgttttttcgaagtgattttttattatatttggatcgacgtacgtgtttgtttttttacgaaggttgtggggtgttttatttggggggttaggattgtttttggggtgggggtagtcgagtttaaggttttcggtaagttcggttagttagtttagaatttttttttagttgtttttgtcggttttagggttagttcggtttagttttattattatagcgttttttttttttcgtttagtttttggtgtagcggtttgagatcgttaagtattgtagttttgattaagtggagattttttttagtttgttgtagcgttttatgtttttgaatatcggtagggttaaggggagtatgaatcggtacgtggcggttatcgggtttcgttttaagtgagggttttttttttggggagtatagggtttttggtgtgtatagtgtgttatggggcgtttgtgtattacggtatttttgtagacggggaatatattttagtgagttgtttttggaagggtagggaagagagtttataaggtgaatttggttttaggttaggtttttgttttgatcgggttcggggtttttttataggttgttgattttggggttgttttttttgtatgtcgatgtggttttaaatgtaattattcgtaatgtgtttcgcgagaagatttattttattgtttttgattattttaggtatttttttaagatgtgttgtgtagtatttagggacggtttagtttttttaagtgttttatcgttttagatttttaggaagttatttataggaatatatagttgtttagttgtgtttattaatttttttttttagtatttttggttttgtggatttaaatattttttagttttgtgtatgtgtttcgtgtatttagagttagttttttagcgagatgtaggtaaatttttttttagtttaattgatttaggagattaagtgcgtttatttaatttttttgttaatgtgaaggtttattgtacgaagaattgtaaatatttattgtttggggttttgtatttataggttgtgttgttgtgtgagtgtagtttttttgttttgatttgttataagtgtagttttagtggaaagttgtaggggttgttgtgggtagtgagggaggagggtataagagggttttcgagttattatatttttttatgggaatgggttagattatttttgttaatgattggttttgggttgattttttgttattaagaaattgtttgtattatttttttattgttttgtgtgattggtttttagtttttgattttagatatttagtcgttgtttttttatggttgtttgaagttgttttttaaagttttttatttaaggagagaagcggttgcgtgaagatataagtattatgattaaattttggatcgttatgtttttagataagaagtatttgatcgttagttagtttgtttttttaggtaatttttaatagtgtagttgtttatggtggaggtaggtaggataggggtgtaacgtgggtagttttgagggtgttagaggtag

SEQ ID NO: 1785 - DNA, 2258 bp, Artificial Sequence
  chemically treated genomic DNA (Homo sapiens)
ggttgaagtgtaatgatatgattatagtttattgtaattttgaatttttgggtttaagtgattttttcgatttagttttttaaagtgttaggattataggtatgagttattgtatttggtacgtggatatttttgatttattttaattagggaaggtatttaataaatgttaatttttttttttttttttttaattatttgattttagtattttaggaaatgaggattgggatattggatggtttgggagaggaggaaagaggtgtttagggaaaaggaagaaattgggaaatagaagattacggataaataaaagaggaggggttaatttagaatagggaagacgggttaggcgtaggggtttatatttgtaattttagtattttgggaagtcgagataggcggattacgaggttaggagttcgagattagttttgttaatatggtgaaatttcgtttttattaaaaatataaaaattatttgggcgtggtggtatttaattgtagttttagttgtttaggaggttgaggtagaagaatcgtttgaatttgggaggcggaggttgtagtgagttgagatcgtgttattgtattttagtttgggtaatagagtaagattttattttaaaaataaaaaaaaagaaaagaaaagaatagagaagatgattttaattattagagttttttaataaaggtaggttttggttgtttgggggaggttgagagttttttgttattagaggtatgtaagtagaggttgagggattgtgagttatatagatgtgtttgtgaggattcgtaatggttaggaggtagatttttttatttagtaaattttgggagagggttgtttttgtttggttttgtaatggggtagggaagttaaggtgaataggatattatttttggttttagggagcgtttagtttaggaaataagtaaatcgttgagatttttttattttgtagttttgtgttttgaagtatttaagttttggagggagttggttggggatttttagtgtgcgttttttggtattgatttattgaagttggagttggttggggaatggtaggaggacgtcgtagtgttattagtgcggaggatacgttgtaatttgttagtgttatttcggttgtagttggttaggaattattttgttgttaacgtttttttttttagtagttatggagtatataatttgtatagtatttgttagtgtttttatttttttttgtaggagggagagtgtggatatttattttttttttgtatttttttagtatgagttttcgtttttaattatattaatttatttagtgttttttaatatattttgggtatttttatttttgtatttttagttattagaattttttattagcggtggttatttttgtttatttatttatttatttgtttatttatttaattatttatttatttatttatttatttatttaattatttatttatttattcgttatttatttatttttttatttatttatttaattatttatttatttatttatttatttatttatttattttttatttatttaattttgtaattcgttttagtttaatttaatttaatttatttttatttaatttataaggttattgggttttgttatgtattatatatatgtgataagtgaggtatgtttttgtttttaaggagtttatgggaagaattttttttattttttatggttagttttgtattttatttttgttaattttttgttatgttttttagtagaagtaacggattttgaagggttgttttgtgaggagagtttagttttggtttttatgaattgtagaggatagagtttagataaggagagaggtaaagggtggggaggaggtgagagtgagatgagttagtgggacggggattttggttttgtggagggagttgtttttagttagttgtgagtatttagtagtgtattgggggatgaagggaaagagaagggggtaaggaaattattattggagaagtgggttagtgtggcggtgaggaggtgagttttgtagttaatggattatttggtttattgttttagttttattatatttttgttgtgtgaatttgggtatatattttaatatttttgagtttttatgtttttatttgtaaaatgaggataataagatttattttataatgttgtttttagtattaatatatgtagtgtttaaattaatgcgtggtataaagggagagtttaatagattttagtttt

SEQ ID NO: 1786 - DNA, 2258 bp, Artificial Sequence
  chemically treated genomic DNA (Homo sapiens)
aaagttggaatttattaagttttttttttgtgttacgtattaatttaagtattgtatgtgttaatgttaaaggtaatattgtgagataggttttattatttttattttataaatgaggatatggaggtttagagatgttaagatatgtgtttaggtttatatagtaggaatatggtggagttgagataataagttaggtagtttattggttgtagagtttatttttttatcgttatattaatttatttttttaatagtggtttttttgtttttttttttttttttttattttttaatatattgttgagtatttatagttaattggaagtagttttttttataaagttaaaattttcgttttattagtttattttatttttattttttttttattttttgtttttttttttgtttgagttttgttttttgtaatttatgaaagttagaattgaattttttttataggatagttttttagagttcgttgtttttgttgaagggtatggtaaaggattaatagaggtgagatgtaaagttggttatggagaatggggaggattttttttatgggttttttgagggtagaggtatgttttatttattatatgtgtgtggtatatggtaaagtttagtaattttatgagttgaataaaggtgaattgaattgaattgaattgaagcggattgtaaagttgaatggatggaaggtgggtgggtggatggatgaatggatggatggatgattgaatggatgaatggggggatggatggatgacggatgaatggatggatgattgaatggataggtgggtggatggatggatgattggatggatggataggtggatggatgaatggataggagtgattatcgttggtagggaattttggtaattgaaggtatagaggtaggaatgtttaaggtgtgttggaaaatattgaataaattagtgtgattggagacgaggatttatgttagggagatgtagaaaaagaataaatatttatatttttttttttataaggagaggtggaggtattggtaggtgttgtataagttgtgtgttttatggttgttgggaagggaggcgttaatagtaggatggtttttggttagttgtaatcggggtgatattgatagattatagcgtgtttttcgtattaataatattgcggcgtttttttgttattttttagttagttttaattttagtggattaatattaaaaggcgtatattgaaaatttttagttaattttttttaaggtttggatgttttaaagtatagaattgtagagtaaaaggattttagcgatttgtttattttttgggttgggcgttttttggggttagggatggtgttttatttattttggtttttttgttttattataggattaggtaaggatagtttttttttaaagtttgttgagtgaaggaatttattttttggttattgcgagtttttataaatatatttgtgtggtttataattttttagtttttatttgtatatttttaatgataggaggtttttaattttttttaagtagttagagtttgtttttattggaaagttttgatgattaaaattattttttttattttttttttttttttttttttatttttgagatggagttttgttttgttgtttaggttggagtgtagtgatacgattttagtttattgtaattttcgttttttaggtttaagcgatttttttgttttagttttttgagtagttgggattatagttgagtgttattacgtttaggtaatttttgtatttttagtagagacggggttttattatattggtaaggttggtttcgaatttttgatttcgtgattcgtttgtttcggttttttaaagtgttgggattataggtgtgagtttttgcgtttggttcgttttttttattttgaattaatttttttttttttatttgttcgtggttttttattttttaattttttttttttttttggatattttttttttttttttttaaattatttaatattttagtttttattttttggggtattgaagttaaataattaaggggaggaagaagggaattagtatttattgagtattttttttagttgagataagttagaaatgtttacgtgttagatgtagtggtttatgtttgtaattttagtattttgagaggttgagtcgggaggattatttgaatttaggagtttaaggttgtaatgagttatgattatgttattgtattttagtt

SEQ ID NO: 1787 - DNA, 2486 bp, Artificial Sequence
  chemically treated genomic DNA (Homo sapiens)
agaataatagtaagatagtttgaatttgttttttttttttataataatttaaaaattaatatgattttatttatatgaaatatttagaaatatatttgtatatgtggatatttttatcgtatattttttatttaggttgttttaaagtggtattttttttttttttgtttatgttttttttttttttttattttttttgttgatacgtggtttttttttgtttttttttttagtagttttagtagattaggtttaattagttaataagtttttggatttggggaataaaagtatatttttttggatttttgaggatttgttttgttagggtgttttttttaatttaatttttttttttcggtagtttattttttttagattttgtaatttatttaattttatttatttgtatttatttcgtggatttttttatatttttatttgaatattaggaatttttaggttatgtttatatgtttttggtttttttgtagtttttttttttttttttttttgtgatgttattaagtcgaagtttttttttagattttggagtgtagtagggatttttttggtttttgttttagggattaagggggtggaagagtggatttttgtgttttttttatgtttgtgtttttattagggttagttgtaaaaggtagggattaggttgtttaggtagggattatggtattaggtagggattatggtatttttagagttgagttttatgtttagtaaaagatacgtgtttagtaattatttgatagagatttattttttattatatgggatatattatattggatttaggatggggttgaattgggagaggtagttgtggatttgtttttcgttttgtttttattttaagagttgatggggtatttattaggaagagtatttttgggtagggagagggttatgagtagttttgttttgtatgtgagatatagtttagttcggttataagatttagatgattatgattgtaatttaggggaagtagagaatgaagattgattagaataattttttgggaatgtgttttgggttttttagagggaagagttttttttttatttagcgttgtaggatttatagaggaaggagagttttggttattagggaggagttatatgagaggattcggtgtttttataaatgggaacgtgagtttatgaaagtcggtttttgttttgggtttgattgtgatttatgaggatattgtgtagttattatttgagttttttataataaatagtgagagcgttacggatagatttattttcgaggagtttagtaaagtgggaggattgaggttatagggagaagatataggtattatttggtttggttttgatagggggtagtggatagaatagtgcggaggtagtggggtttttagaggttttggttattttgttatattatggtttgtttcggtttggatattagagggtatttggggattatttttgagaagattgaggttgattagagtagaattagttatttgttttgtttagtgttttttgtttagggtttatagttgcgttttttatattcgtgggattatatagttttatttttgttattttttgatatttttaggtatagggatttgatttagggtttagggtgggattagaaagttgggggtttgatttgtatggatggatttttttatttttagagtatgaagaggggtagggagagatttggggaggttttgttttagttgtgggtataagaggtagtatttaggataatttttagtatggtttggtttttttttttttttatttttttcgtttattgtataggtgattggatataggtttaggggaggggttttgggaagtttatggatttttgtttttttttgttgtttttagaagtcgaataatgatgtttgtgttttttttatttttagggttttgggtttagtttgtgttgacgtagtcgtttttagtgtttggggttttagggtagagggttattattttttgtattgggagtagttttaatatcggggtaggttatgatgtatattggtattagtagtttttaggaatagtttttaaattttttatttatggtaatagtaatcggtttttaggggtttttgatcgattttttggttttaagtttggtattttagtttttttggttattattgggttttaggttgaggatgaggttgattattattgttagttttatgatagtagtttgagtggttttatagtgttttaggttcggggggaattgagataagaatttatttttttttttgttaggagggtgagtttcggtagttgttgtttaggtttggtttgtggtttttgcggttgttgttttttttatggttttaggggtatttagggttttgtttgggagtggaggttttttttttttttttgtttttagagttaggaatagggaatttaggaagtagaatattttttttttttaatttg

SEQ ID NO: 1788 - DNA, 2486 bp, Artificial Sequence
  chemically treated genomic DNA (Homo sapiens)
taagttaagggagagggatattttgttttttggattttttgtttttgattttgaggatagaaggggaggaggagtttttatttttaggtagggttttggatgtttttgggattatgagggaagtagtagtcgtagaagttataggttaggtttgagtagtagttgtcggggtttatttttttggtagaggaggaagtgggtttttgttttagtttttttcgggtttggagtattgtggaattatttaggttgttgttataggattggtagtaataattagttttatttttagtttggagtttagtgatggttagggaggttgaggtgttagatttggagttagagaatcggttagggatttttgagggtcgattgttgttattatagatgaggagtttgggggttgtttttggaagttgttggtattagtgtatattataatttgtttcgatgttggagttgtttttagtgtaggagatggtgattttttgttttggggttttagatattgagggcggttgcgttagtatagattgggtttaggattttggaagtgggagagatataggtattattattcggtttttagagataataggagaaagtaagaatttataggttttttagggttttttttttggatttgtatttagttatttgtgtagtgagcgaggagagtgaggaggagaggagattaggttatgttggagattgttttgagtgttgttttttgtgtttatagttgaagtagagtttttttaaatttttttttgtttttttttatattttgagagtgggagggtttatttatgtaaattagatttttagttttttaattttattttgggttttgggttaggtttttatgtttgaggatgttagggggtggtaggggtggggttgtgtggttttacgggtgtaaaggacgtagttgtgagttttgagtagaggatattaggtaggataggtggttggttttgttttgattaattttagtttttttaggaatgatttttaagtgttttttagtgtttagatcgagataaattatggtatgataaggtgattagagtttttagagattttattgttttcgtattgttttgtttattgttttttgttagggttaggttaggtggtgtttgtgttttttttttgtgattttagtttttttattttattgggtttttcgggagtgaatttgttcgtggcgtttttattgtttattgtagaggatttaggtggtgattatataatgtttttataggttataattaaatttagagtagggatcgatttttatggatttacgtttttatttgtggggatatcgggtttttttatgtggtttttttttggtggttagggtttttttttttttgtggattttgtagcgttgaatagaagggaagtttttttttttaggaggtttagggtatatttttagagggttattttggttaatttttattttttattttttttgaattgtagttatagttatttggattttgtgatcgggttgagttgtgttttatatataggataaggttgtttatggttttttttttgtttaggaatgttttttttggtggatgttttattagtttttagggtgagggtagagcgaggagtaggtttatagttattttttttagtttagttttattttgggtttagtataatgtgttttatgtgataagaggtaggtttttgttaagtagttgttgagtacgtattttttgttgggtatagagtttagttttggaaatgttataatttttatttaatgttataatttttatttagatagtttaatttttattttttgtagttaattttgatgaaaatataggtataggaagggtataggagtttatttttttatttttttaatttttggggtagagattagagaagtttttgttgtattttagggtttgagaagagatttcgatttggtggtattataggggaagaaggaagaagggattataggagaattaagggtatatgggtatgatttgaagatttttggtgtttaggtgaagatgtaaggaagtttacgaagtagatatagatgaataagattagataaattataggatttaggagaagtggattgtcgggaaggagagattggattgagaaagatattttggtagggtaagtttttagaaatttaagaagatgtatttttgttttttaagtttaggagtttgttgattggttgggtttgatttgttggggttattggagaggaaggtagggaggagttacgtgttagtaggagaggtgaggagagggggagaatatgagtagaagaagaggagatgttattttaggatagtttggatgggaggtgtgcgatgggaatgtttatatgtatagatatatttttagatattttatataaatgggattatgttaatttttagattgttgtgagagaagaagataaatttaaattattttgttattatttt

SEQ ID NO: 1789 - DNA, 2411 bp, Artificial Sequence
  chemically treated genomic DNA (Homo sapiens)
tgtggatatttttatcgtatattttttatttaggttgttttaaagtggtattttttttttttttgtttatgttttttttttttttttattttttttgttgatacgtggtttttttttgtttttttttttagtagttttagtagattaggtttaattagttaataagtttttggatttggggaataaaagtatatttttttggatttttgaggatttgttttgttagggtgttttttttaatttaatttttttttttcggtagtttattttttttagattttgtaatttatttaattttatttatttgtatttatttcgtggatttttttatatttttatttgaatattaggaatttttaggttatgtttatatgtttttggtttttttgtagtttttttttttttttttttttgtgatgttattaagtcgaagtttttttttagattttggagtgtagtagggatttttttggtttttgttttagggattaagggggtggaagagtggatttttgtgttttttttatgtttgtgtttttattagggttagttgtaaaaggtagggattaggttgtttaggtagggattatggtattaggtagggattatggtatttttagagttgagttttatgtttagtaaaagatacgtgtttagtaattatttgatagagatttattttttattatatgggatatattatattggatttaggatggggttgaattgggagaggtagttgtggatttgtttttcgttttgtttttattttaagagttgatggggtatttattaggaagagtatttttgggtagggagagggttatgagtagttttgttttgtatgtgagatatagtttagttcggttataagatttagatgattatgattgtaatttaggggaagtagagaatgaagattgattagaataattttttgggaatgtgttttgggttttttagagggaagagttttttttttatttagcgttgtaggatttatagaggaaggagagttttggttattagggaggagttatatgagaggattcggtgtttttataaatgggaacgtgagtttatgaaagtcggtttttgttttgggtttgattgtgatttatgaggatattgtgtagttattatttgagttttttataataaatagtgagagcgttacggatagatttattttcgaggagtttagtaaagtgggaggattgaggttatagggagaagatataggtattatttggtttggttttgatagggggtagtggatagaatagtgcggaggtagtggggtttttagaggttttggttattttgttatattatggtttgtttcggtttggatattagagggtatttggggattatttttgagaagattgaggttgattagagtagaattagttatttgttttgtttagtgttttttgtttagggtttatagttgcgttttttatattcgtgggattatatagttttatttttgttattttttgatatttttaggtatagggatttgatttagggtttagggtgggattagaaagttgggggtttgatttgtatggatggatttttttatttttagagtatgaagaggggtagggagagatttggggaggttttgttttagttgtgggtataagaggtagtatttaggataatttttagtatggtttggtttttttttttttttatttttttcgtttattgtataggtgattggatataggtttaggggaggggttttgggaagtttatggatttttgtttttttttgttgtttttagaagtcgaataatgatgtttgtgttttttttatttttagggttttgggtttagtttgtgttgacgtagtcgtttttagtgtttggggttttagggtagagggttattattttttgtattgggagtagttttaatatcggggtaggttatgatgtatattggtattagtagtttttaggaatagtttttaaattttttatttatggtaatagtaatcggtttttaggggtttttgatcgattttttggttttaagtttggtattttagtttttttggttattattgggttttaggttgaggatgaggttgattattattgttagttttatgatagtagtttgagtggttttatagtgttttaggttcggggggaattgagataagaatttatttttttttttgttaggagggtgagtttcggtagttgttgtttaggtttggtttgtggtttttgcggttgttgttttttttatggttttaggggtatttagggttttgtttgggagtggaggttttttttttttttttgtttttagagttaggaatagggaatttaggaagtagaatattttttttttttaatttgggatataaagtttttatattgaagttt

SEQ ID NO: 1790 - DNA, 2411 bp, Artificial Sequence
  chemically treated genomic DNA (Homo sapiens)
gaattttagtgtagagattttgtgttttaagttaagggagagggatattttgttttttggattttttgtttttgattttgaggatagaaggggaggaggagtttttatttttaggtagggttttggatgtttttgggattatgagggaagtagtagtcgtagaagttataggttaggtttgagtagtagttgtcggggtttatttttttggtagaggaggaagtgggtttttgttttagtttttttcgggtttggagtattgtggaattatttaggttgttgttataggattggtagtaataattagttttatttttagtttggagtttagtgatggttagggaggttgaggtgttagatttggagttagagaatcggttagggatttttgagggtcgattgttgttattatagatgaggagtttgggggttgtttttggaagttgttggtattagtgtatattataatttgtttcgatgttggagttgtttttagtgtaggagatggtgattttttgttttggggttttagatattgagggcggttgcgttagtatagattgggtttaggattttggaagtgggagagatataggtattattattcggtttttagagataataggagaaagtaagaatttataggttttttagggttttttttttggatttgtatttagttatttgtgtagtgagcgaggagagtgaggaggagaggagattaggttatgttggagattgttttgagtgttgttttttgtgtttatagttgaagtagagtttttttaaatttttttttgtttttttttatattttgagagtgggagggtttatttatgtaaattagatttttagttttttaattttattttgggttttgggttaggtttttatgtttgaggatgttagggggtggtaggggtggggttgtgtggttttacgggtgtaaaggacgtagttgtgagttttgagtagaggatattaggtaggataggtggttggttttgttttgattaattttagtttttttaggaatgatttttaagtgttttttagtgtttagatcgagataaattatggtatgataaggtgattagagtttttagagattttattgttttcgtattgttttgtttattgttttttgttagggttaggttaggtggtgtttgtgttttttttttgtgattttagtttttttattttattgggtttttcgggagtgaatttgttcgtggcgtttttattgtttattgtagaggatttaggtggtgattatataatgtttttataggttataattaaatttagagtagggatcgatttttatggatttacgtttttatttgtggggatatcgggtttttttatgtggtttttttttggtggttagggtttttttttttttgtggattttgtagcgttgaatagaagggaagtttttttttttaggaggtttagggtatatttttagagggttattttggttaatttttattttttattttttttgaattgtagttatagttatttggattttgtgatcgggttgagttgtgttttatatataggataaggttgtttatggttttttttttgtttaggaatgttttttttggtggatgttttattagtttttagggtgagggtagagcgaggagtaggtttatagttattttttttagtttagttttattttgggtttagtataatgtgttttatgtgataagaggtaggtttttgttaagtagttgttgagtacgtattttttgttgggtatagagtttagttttggaaatgttataatttttatttaatgttataatttttatttagatagtttaatttttattttttgtagttaattttgatgaaaatataggtataggaagggtataggagtttatttttttatttttttaatttttggggtagagattagagaagtttttgttgtattttagggtttgagaagagatttcgatttggtggtattataggggaagaaggaagaagggattataggagaattaagggtatatgggtatgatttgaagatttttggtgtttaggtgaagatgtaaggaagtttacgaagtagatatagatgaataagattagataaattataggatttaggagaagtggattgtcgggaaggagagattggattgagaaagatattttggtagggtaagtttttagaaatttaagaagatgtatttttgttttttaagtttaggagtttgttgattggttgggtttgatttgttggggttattggagaggaaggtagggaggagttacgtgttagtaggagaggtgaggagagggggagaatatgagtagaagaagaggagatgttattttaggatagtttggatgggaggtgtgcgatgggaatgtttata

SEQ ID NO: 1791 - DNA, 2386 bp, Artificial Sequence
  chemically treated genomic DNA (Homo sapiens)
ttgatggagaaattttattcgaaattttaaagtagggtagggatatttttattagatatttttgtagtttttgttttgtgggacgaagtaagggatgatgatatattcgtttgtttattcggaagtgagttttaggttattgtattagaagggtgataatttaatataagttattgttaagtaattttcgcgtgtttagtatttatatttttttgttttattttgattattatattgtataggagttattatttttatttttcgtttttatttatagatgaggatatcgagatttagagagttttttgttttgttttgttttttgagatggagttttgttttgttatttaggttggagtgtaatggtacgattttagtttattgtaatttttgttttttgggtttaagagatttttttgttttagttttttgagtagttgggattataggtatttgttattatatttagttaattttgtattagagatggggttttattatgttggttaggttggtttttaatttttgatttcgtgatttatttgttttagttttttaaagtgttgggattataggtatgagttatcgcgtttggtttgttttattttttgttttgtttgtttgttttgttttgtttttagagatagggtttggttttgttttttaggttagggtgtagtggtgcgattatagtttattgtagttttaaatttttgggtttaagtaattttttcgttttagtttattaggaattggaattataaatgtatgttattatttttagttaatattttttttttttggaaaaatgaagttttattatgttgtttaggttggttttaaatttttgggtttaagtgatttttttgtagtgttgggattataggtatgagttattttgttcggttaattttagagagttttgatgaagttataaaattttgattatggagttagaatttaaatttaggtatgtgaggtttgagtttaggtttttattagggttattgtgttgtaattgttattattttttggtattttaagtgatattcgagtattatttaagggaaatggtttatatttcggtaatttttttattcgttttatttttttttttgaattagggatttcggtagagatagagttttagtagtttttattcgttttttcgtgtcggttttgtttatttacggatgagttagttggaatgtttggatattttagtttagcggttgtggtattaggagttgttaggaggcgggaatgtagagaatgtggtttattgtgttttcgttcgtttaggttgaattcgtagagaggtttggaaggtgaatgatataatgtttgttaagggtttgggacgataggtgtatgtgaagatgaggataaagattgattttttttttggggttgttagtatagtttcgtattttttttatatatgttcgtattttaggtttagatatttcgtgttttgggtttttatgaagggtaagaaattattgattaggaagtaagaagaagaaaaagaaatgttttaggtttttaaaagaaagagtgtttgatttttttatttaaatgttattttgaaatatagtttttttgtttttcgtttttttttttttttagagatagggttttgttttgttatttaggttggagtgtagtggtacgtttatagtttattgtagtttttaatttttgggtttaagcgattttttcgttttagttttttaaagtattgggattataggcgtgagttattgtattaggttttgaaatattgttttgattttgttttttttttatttagatgtttttgtgtaggtcgataattttttttggtgttttttttgtgcggggttgtgtttgggtattgagtagatagtagtgaagaagatgatgatagtttttttttagggagttttttttttggagagaggtttagataattaaaaagtgagtgcgtttacgtttgtaattttagtattttgggaggttaaggcggatggattataaggttaggagttcgagattagtttggttaatatggtgaaatttcgtttttattaaaaatataaaaattagttagttatgatggtgggtatttgtaattttagttatttaggaggttgagataggagaatcgtttgaattcgagaggcggaggttgtagtgagtcgagattgcgttattgtattttagtttggacgatagagcgagattttgttttaaaaaagaaaagtgagtgtgtgattatagatgagtagtgtgggggaggaaataaattaggtttatgatggaaattaggggaatggggtttttttaaaatgaaattaaatttcgagagttgcgtgttgtttaaatgtgttattttattgtttat

SEQ ID NO: 1792 - DNA, 2386 bp, Artificial Sequence
  chemically treated genomic DNA (Homo sapiens)
gtgggtagtgaggtgatatatttaggtagtacgtagttttcggagtttgattttattttaaaggaattttatttttttaatttttattatagatttagtttgtttttttttttatattgtttatttgtaattatatatttattttttttttttgagatagagtttcgttttgtcgtttaggttggagtgtaatggcgtaatttcggtttattgtaattttcgtttttcgagtttaagcgatttttttgttttagttttttgagtagttgggattataggtgtttattattatggttggttaatttttgtatttttagtagagacggggttttattatattggttaggttggtttcgaatttttgattttgtgatttattcgttttggttttttaaagtgttgggattataggcgtgagcgtatttattttttaattatttgaatttttttttagaaaggaaattttttggggaaggattattattattttttttattattgtttatttagtgtttagatatagtttcgtatagagaagatattagaaaagattgtcggtttgtataaaggtatttgagtaggagagagatagaattaaagtagtgttttagggtttggtgtagtggtttacgtttgtaattttagtgttttgggaggttgaggcgggaggatcgtttgagtttaggagttggaagttgtagtgagttgtgagcgtgttattgtattttagtttgggtgatagagtaagattttgtttttaaaagaaaaaaaaaacgaaaaataaaaaagttgtgttttaggatggtatttgggtaaagaggttaaatatttttttttttaagagtttgggatattttttttttttttttttgttttttaattagtggttttttgttttttataggagtttagggtacggagtgtttgggtttggaatgcggatatgtgtgggagggatgcgaaattgtgttggtagttttaagaaaagaattagtttttgtttttatttttatatgtatttgtcgttttaaatttttgataaatattgtgttatttattttttaaatttttttgcggatttagtttgggcgggcgggagtatagtgagttatattttttgtattttcgttttttgatagtttttggtattatagtcgttgagttgggatgtttaaatattttaattgatttattcgtgggtgagtaaggtcgatacgaggggacgggtggaggttgttggggttttgtttttgtcgaagtttttaatttagagaagaaagtggggcgggtgggggaattgtcgggatatgggttattttttttgaatgatgttcgggtgttatttgaggtgttaggaagtggtggtagttgtagtatagtggttttggtggaagtttgggtttagattttatatatttagatttgagttttggttttatggttagaattttgtaattttattaaaattttttgagattggtcgggtagagtggtttatgtttgtaattttagtattgtaggaggattatttgagtttaggagtttgagattagtttgggtaatatagtgagattttatttttttaaaaaggaaaaatattagttggggatggtggtatgtatttgtagttttagtttttggtaggttgaggcgagaggattgtttgagtttaggagtttgaggttatagtgagttatggtcgtattattgtattttaatttggaaaataaagttagattttatttttgaaaataaaataaaataaataaataaaataaaaaataaaataggttaggcgcggtggtttatgtttgtaattttagtattttgggaggttgaggtaggtggattacgaggttaggagttggagattagtttggttaatatggtgaaattttatttttaatataaaattagttgggtgtggtggtaggtgtttgtagttttagttatttaggaggttgaggtaagggaattttttgaatttaggaggtagaggttgtagtgagttgagatcgtgttattgtattttagtttgggtgatagagtaagattttattttaaaaaataaaataaaataaaaaattttttgggtttcggtgtttttatttgtaaatggaggcggggggtgagaataatggtttttgtgtagtgtagtggttagaatgaagtaagaaaatgtgaatattgagtacgcgagagttgtttagtaatgatttgtgttaggttgttatttttttgatgtaatgatttgagatttattttcgggtgggtaggcgagtgtgttattattttttgtttcgttttataggataaaggttgtaaaagtatttggtgggaatgtttttgttttgttttgggatttcgggtaggatttttttattag

SEQ ID NO: 1793 - DNA, 2500 bp, Artificial Sequence
  chemically treated genomic DNA (Homo sapiens)
tttgaatgaggttattgaatgtgtacgggaggtttagcgttgttttattttagtttgatggagaaattttattcgaaattttaaagtagggtagggatatttttattagatatttttgtagtttttgttttgtgggacgaagtaagggatgatgatatattcgtttgtttattcggaagtgagttttaggttattgtattagaagggtgataatttaatataagttattgttaagtaattttcgcgtgtttagtatttatatttttttgttttattttgattattatattgtataggagttattatttttatttttcgtttttatttatagatgaggatatcgagatttagagagttttttgttttgttttgttttttgagatggagttttgttttgttatttaggttggagtgtaatggtacgattttagtttattgtaatttttgttttttgggtttaagagatttttttgttttagttttttgagtagttgggattataggtatttgttattatatttagttaattttgtattagagatggggttttattatgttggttaggttggtttttaatttttgatttcgtgatttatttgttttagttttttaaagtgttgggattataggtatgagttatcgcgtttggtttgttttattttttgttttgtttgtttgttttgttttgtttttagagatagggtttggttttgttttttaggttagggtgtagtggtgcgattatagtttattgtagttttaaatttttgggtttaagtaattttttcgttttagtttattaggaattggaattataaatgtatgttattatttttagttaatattttttttttttggaaaaatgaagttttattatgttgtttaggttggttttaaatttttgggtttaagtgatttttttgtagtgttgggattataggtatgagttattttgttcggttaattttagagagttttgatgaagttataaaattttgattatggagttagaatttaaatttaggtatgtgaggtttgagtttaggtttttattagggttattgtgttgtaattgttattattttttggtattttaagtgatattcgagtattatttaagggaaatggtttatatttcggtaatttttttattcgttttatttttttttttgaattagggatttcggtagagatagagttttagtagtttttattcgttttttcgtgtcggttttgtttatttacggatgagttagttggaatgtttggatattttagtttagcggttgtggtattaggagttgttaggaggcgggaatgtagagaatgtggtttattgtgttttcgttcgtttaggttgaattcgtagagaggtttggaaggtgaatgatataatgtttgttaagggtttgggacgataggtgtatgtgaagatgaggataaagattgattttttttttggggttgttagtatagtttcgtattttttttatatatgttcgtattttaggtttagatatttcgtgttttgggtttttatgaagggtaagaaattattgattaggaagtaagaagaagaaaaagaaatgttttaggtttttaaaagaaagagtgtttgatttttttatttaaatgttattttgaaatatagtttttttgtttttcgtttttttttttttttagagatagggttttgttttgttatttaggttggagtgtagtggtacgtttatagtttattgtagtttttaatttttgggtttaagcgattttttcgttttagttttttaaagtattgggattataggcgtgagttattgtattaggttttgaaatattgttttgattttgttttttttttatttagatgtttttgtgtaggtcgataattttttttggtgttttttttgtgcggggttgtgtttgggtattgagtagatagtagtgaagaagatgatgatagtttttttttagggagttttttttttggagagaggtttagataattaaaaagtgagtgcgtttacgtttgtaattttagtattttgggaggttaaggcggatggattataaggttaggagttcgagattagtttggttaatatggtgaaatttcgtttttattaaaaatataaaaattagttagttatgatggtgggtatttgtaattttagttatttaggaggttgagataggagaatcgtttgaattcgagaggcggaggttgtagtgagtcgagattgcgttattgtattttagtttggacgatagagcgagattttgttttaaaaaagaaaagtgagtgtgtgattatagatgagtagtgtgggggaggaaataaattaggtttatgatggaaattaggggaatggggtttttttaaaatgaaattaaatttcgagagttgcgtgttgtttaaatgtgttattttattgtttattgaatatattatatttttttgttttattgttttagtttttgtaatttttttattcgggtt

SEQ ID NO: 1794 - DNA, 2500 bp, Artificial Sequence
  chemically treated genomic DNA (Homo sapiens)
aattcggatggggagattataggaattgaggtagtgaggtagaaaaatatggtgtgtttagtgggtagtgaggtgatatatttaggtagtacgtagttttcggagtttgattttattttaaaggaattttatttttttaatttttattatagatttagtttgtttttttttttatattgtttatttgtaattatatatttattttttttttttgagatagagtttcgttttgtcgtttaggttggagtgtaatggcgtaatttcggtttattgtaattttcgtttttcgagtttaagcgatttttttgttttagttttttgagtagttgggattataggtgtttattattatggttggttaatttttgtatttttagtagagacggggttttattatattggttaggttggtttcgaatttttgattttgtgatttattcgttttggttttttaaagtgttgggattataggcgtgagcgtatttattttttaattatttgaatttttttttagaaaggaaattttttggggaaggattattattattttttttattattgtttatttagtgtttagatatagtttcgtatagagaagatattagaaaagattgtcggtttgtataaaggtatttgagtaggagagagatagaattaaagtagtgttttagggtttggtgtagtggtttacgtttgtaattttagtgttttgggaggttgaggcgggaggatcgtttgagtttaggagttggaagttgtagtgagttgtgagcgtgttattgtattttagtttgggtgatagagtaagattttgtttttaaaagaaaaaaaaaacgaaaaataaaaaagttgtgttttaggatggtatttgggtaaagaggttaaatatttttttttttaagagtttgggatattttttttttttttttttgttttttaattagtggttttttgttttttataggagtttagggtacggagtgtttgggtttggaatgcggatatgtgtgggagggatgcgaaattgtgttggtagttttaagaaaagaattagtttttgtttttatttttatatgtatttgtcgttttaaatttttgataaatattgtgttatttattttttaaatttttttgcggatttagtttgggcgggcgggagtatagtgagttatattttttgtattttcgttttttgatagtttttggtattatagtcgttgagttgggatgtttaaatattttaattgatttattcgtgggtgagtaaggtcgatacgaggggacgggtggaggttgttggggttttgtttttgtcgaagtttttaatttagagaagaaagtggggcgggtgggggaattgtcgggatatgggttattttttttgaatgatgttcgggtgttatttgaggtgttaggaagtggtggtagttgtagtatagtggttttggtggaagtttgggtttagattttatatatttagatttgagttttggttttatggttagaattttgtaattttattaaaattttttgagattggtcgggtagagtggtttatgtttgtaattttagtattgtaggaggattatttgagtttaggagtttgagattagtttgggtaatatagtgagattttatttttttaaaaaggaaaaatattagttggggatggtggtatgtatttgtagttttagtttttggtaggttgaggcgagaggattgtttgagtttaggagtttgaggttatagtgagttatggtcgtattattgtattttaatttggaaaataaagttagattttatttttgaaaataaaataaaataaataaataaaataaaaaataaaataggttaggcgcggtggtttatgtttgtaattttagtattttgggaggttgaggtaggtggattacgaggttaggagttggagattagtttggttaatatggtgaaattttatttttaatataaaattagttgggtgtggtggtaggtgtttgtagttttagttatttaggaggttgaggtaagggaattttttgaatttaggaggtagaggttgtagtgagttgagatcgtgttattgtattttagtttgggtgatagagtaagattttattttaaaaaataaaataaaataaaaaattttttgggtttcggtgtttttatttgtaaatggaggcggggggtgagaataatggtttttgtgtagtgtagtggttagaatgaagtaagaaaatgtgaatattgagtacgcgagagttgtttagtaatgatttgtgttaggttgttatttttttgatgtaatgatttgagatttattttcgggtgggtaggcgagtgtgttattattttttgtttcgttttataggataaaggttgtaaaagtatttggtgggaatgtttttgttttgttttgggatttcgggtaggatttttttattaggttggagtggggtagcgttgagtttttcgtgtatatttagtgattttatttagg

SEQ ID NO: 1795 - DNA, 2340 bp, Artificial Sequence
  chemically treated genomic DNA (Homo sapiens)
gttttattaagttttttagaggggaaaaattttaggttgggaggggaggtgatttgtttagagttatatagtttttggagggtagaggggaggttaatatttgtttttgtgattttgatattgaagtaaaaatgggtgattttaataatttaatagtgtttaggtttgattttgtttttataaatatagagatttaagtttttatttttgtagttatatttataattttatagtgtggtttttgaattttatgattgtaaagttggtattatgttataggtattattttgtaatgcgatttttttatttttttgttttagttatgttttttattagggatatagtatagtttgttttttttttattagtttagaggtttgaatagagggatagaggtgagggttagagacgtgaagttttatgatttgtttgtttagttttttgatacgggattttggtaagttattttttttttagggttttagtttttttatagggtttggtataagtaggtgtttagatttagggtgagtgagataatttttgagttttttgtgttttaaaagaaatttgttgtttttattgggttttagtagtagtattttggggttagtttgggtgtggttcggttataaggatatgtcgggttttaggttatttttttttttttattttttttgatttttttaaattttttaaagagatgggtatttttaatatttattttttttttggggttagttggtcgtgtttgagggtgttagaattagagttgagttcggggagttttgtgaatttatttaagttgttttttttatttttttttatagtttattcgtttagtaggagggagggagtaattagatttaagtttgggtgtaaatttcggttttgttattgtttttttgtttgatttgaattagttatttaatttttttgagtttatttataaaagttgaatgattttttttttatagagttattgtaagaataaggatatgggggtagattatattatttttaatttattaagggatttttttttgatagagattgagtaagatttaattgttttgagttgtgtggattttacgtttagttgtgtatttgtgtaataattagatacgtttttcggttttttagatatattttggaattcgaaagggaaagtgaaagttataattttttagtagtttatgattaagtatagtaaatacgttgttttttagtattatttgtagtttaggtttagtttttttgttgttgtatttagaggagtagtcgtagattagatattcgggttttttttatttaatttatttgttttatatttttaggatttaaggtttgttgtgttagttgtttatgttttaggtagttagaattagagttgagtttggggagttttttgaatttatttgagtcgtttgttttttaattttcgtttcgatttttgtagtttaagggtatagtaggtgggggagagaagttagatttaagttttagtgtaattttaggttttgtttttgttttattgtttgatttgaattagttatttaatttttttgagtttaagaaagatttgttattgattgatcgtggggttttttagattatttttcgttttttcgtttttttatattttttagatgtttgttttatttttatatatgttattagtattagtatagttttttatatatgttgggtggatgtttattgtatatttattgtaatgtttttgaggttatgttttttgttatgtttttgatatagagttttgttttgtagtttaggttggagagtagtggtataattatagttattttaagtggtataattaagttatttttttattttagttttcgagtagttgggattataggtgtttgttattatatttagttaattttttgtaattttagtagagatggggttttattattttggttaggttggttttgaatttttgattttaagtgatttatttgttttggttttttaaagtgttgggattataggtgtgagttacggcgtttagtttattgtattttttttgtgattttgtgtttttatagtttagtttttattaataaatgagaatatataatatttggttttttatttttgagttattttatttagaataatggtgtttaattttatttagattgttacggatgttattattttttttttttttatagttgagtaatattttatggtatatatatatataggggtgtgtgtgtgtgtgtgtgtgtgtgtatatatatatatattttttttatttatttgttggttgatgagtatttaggttggttttatattttttcggtt

SEQ ID NO: 1796 - DNA, 2340 bp, Artificial Sequence
  chemically treated genomic DNA (Homo sapiens)
aatcgaaaaaatatggaattaatttaaatgtttattagttaataagtggatgaagaaaatgtgtgtgtatatatatatatatatatatatatatatatttttatatatgtatatgttatggaatattatttagttgtaaaaaggaagggaataatggtattcgtaataatttggatgaagttggatattattattttgagtgaagtaatttaggaatggaaaattaaatattgtatgtttttatttattagtaggagttaagttatgaagatataaagttataagaaggatataatgggttgggcgtcgtggtttatatttgtaattttagtattttgggaggttaaggtaggtggattatttgaggttaggagtttaagattagtttggttaagatggtgaaattttatttttattaaaattataaaaaattagttgggtgtagtggtaggtatttgtaattttagttattcggaagttgagatgggaggatggtttgattgtgttatttgaagtagttatgattgtgttattgttttttagtttgggttatagagtaagattttatattaaaaatataatagaaaatataattttagaagtattataataaatatgtaataagtatttatttagtatgtgtgggggattgtgttgatgttgatggtatgtgtgggagtaaggtaggtatttgaggaatgtgggggaacggaaggacggggagtaatttggagagttttacggttagttagtggtaggttttttttgagtttagaaaggttaggtaattagtttagattagatagtaaaataggggtagagtttggaattgtattgaggtttgagtttgattttttttttttatttgttgtgtttttaaattgtagagatcggggcgggggttggggggtaagcggtttagatgggtttaaaaaattttttaggtttaattttggttttgattgtttgagatatgggtagttgatatagtagattttgaattttgaggatgtgaggtaggtgggttggatgagagggattcggatgtttggtttgcggttgtttttttaagtgtagtagtaaggaggttgggtttggattgtaggtggtgttggggagtagcgtgtttattgtgtttggttatgagttgttgggaagttgtgatttttattttttttttcgaattttagggtatatttgggaggtcggaggacgtgtttggttattatatagatgtatagttggacgtgggatttatatagtttagaatagttggattttgtttagtttttgttagaggaagattttttggtaagttggggatagtgtgatttatttttatgtttttatttttgtaatagttttataagggaaggattatttagtttttgtagataagtttagagaggttaggtagttggtttagattagataggaaagtagtggtagagtcgggatttgtatttaggtttgagtttgattgtttttttttttttgttgggcgggtaaattgtagagagaggtggggaaaatagtttagatgggtttataaagtttttcgggtttagttttggttttgatatttttagatacggttagttgattttagaagaaaggtaggtgttgggggtgtttatttttttgggaaatttgaaggaattaaagaaggtggaggaggggaggtgatttggagttcggtatgtttttgtggtcgggttatatttaggttggttttagggtgttgttgttgaagtttaatgggaataatagattttttttgagatataaggaatttagaggttgttttatttattttgagtttgagtatttatttgtgttaggttttgtggggaaattgaggttttgggaggggaatgatttgttagggtttcgtgttaggaggttgagtaggtagattataggattttacgtttttggtttttatttttgtttttttgtttagatttttgagttgatagagaagaaataggttgtgttgtgtttttaatgggaaatatggttgagataggggagtgagaaggtcgtattgtagaatggtatttgtggtatgatgttagttttgtaattatgagatttaaaagttatattgtggaattgtgagtataattataggagtgagagtttaggtttttgtgtttgtagaagtagaattaaatttggatattgttggattattaaaattatttatttttgttttaatattagagttataagggtagatgttggttttttttttgttttttaagagttgtgtgattttgggtaagttatttttttttttagtttaagattttttttttttaaaaaatttgatagagt

SEQ ID NO: 1797 - DNA, 2495 bp, Artificial Sequence
  chemically treated genomic DNA (Homo sapiens)
ggttttatgattagttttgttttatatgggaggaaatcgaggtttagaaaagtgatttggttagtttttttgtttttgtttaatggtttagtgaggatttgttgattgtgagaatgattttagtttagagtatgtttttaggttgtggtgaggttttggtttagggtaggttcggaagtagtttgtttttagattgatatgatgttagtttttaggtggtaggagtataatggtattttttagaaaggagggaggtatttagttcgggtttttgagtttttttttgtttgtttgtttaaatagagataagttttgttttgttgtttaggttggagtttggagtgtagtggaatgattatggtttattgtagtttttattttttgggttaaagtgatttttttattttagttttttgagtagttgggattataggtatatattattacgtttggttaattttttaattatttttggtagagatagggtttcgttatgttgttcgggttggttttgaatttttggttttaagtgattgttttattttggttttttaaagcgttaggatgatagattattttttttgtttagttggtttttttgtttttagtttgtgttaggtatggttttttttttatcgttgggttgtttttcggtttttaggagtttttttttcgttgtttattggattatcgtttgttttggagttttttttgggttttaggttttagtttttgcgttggagttggtggtttttttagagtttgtggtgaaggttgtgttttagggtaggttagggaggggatttatggggatagatcgttgaagcgataagtatttataatgtagggattattgttgggtttttagataagttttagaggattagtttttggtagtggttatattgttacgtgttttagagtttattttgggagattttttttttggagaattttaggaagtttttagagtttttgttcgttagtttttgagaggtttagagggggtagagatttatttgaggttattgagttgttttgaatttttttttgtattatcgggtttaaagatttatttttttatgtcgtttggaattgttggtttagtttggaggcgtagcgtagggataggttgttttcgtttggtaggagtttttttttacggttcgtaggtttggtagttgggatagggttgaatgggaggtattgtcggtagattaggtaagttaggtttttttaggttgaggtgaagaaggggcgggcggcgggcgggagtagcggttggagttatagggttttttgtttgttttagtcgaggattgaggtttcggtttgaatttttgggttagttcgatagggagggggtattagtagttggttcgggagttagtagttttgggtttttttttgttatgtgggttgtttttttagaggttgttttttagtttttgaaaaatatattttattaataagtagttttgaggttatagtgggggtttaggttcgtatttggtatatagtgggtgttttagaataggtgatttttttttttcgtttgtgtttatatattgatataaatagtttaatattggatatataggattttagatatttattttttttatttaattttagattattgggagttatttaaattgattttttcgaattttattattttgtggtatatagtattttattgtgtaaatgtattatattgatttagttatttattttggatattggttatttttaattttttgttatttataaataatattgtaaagaatatttaaatacgtatttttttaagttcgtgtttgttttttaaataatatatttagattatggttaatgtttatgtattttgattttttagatttttgtttttgatggaattgtattttttattgtttgtttttttaattggaaataggggttaggtatagtggtttatgtttgtaattttagtattttgggaggttgaggtgggaggattatttgagtttaggagtttgagattagtttgggtaatatagattttgttttaagagaaaaaaaaaaggtcgggcgcggtggtttacgtttgtaattttagtattttgggaggcggaggcgggtggattacgaggtcgagattaagattattttggttaatatagtgaaattttatttttattaaaagtataaaaaattagtcgggtgtggtggtaggcgtttgtagttttagttatttgggaggttgaggtaggtaaatggtatgaacgcgagagtcgagatggcgttattgtattttagtttgggtaatagagtgaaattgttttaaaaaagaaaaaaaatatatatatatatatatatatatatatatatatatatatatatatatatatatatatgtatgtgtgtgtgtatatatttatgtgtgtatatatttatatataataaaaatataaatgtatatgtttatatatatttatatatgttaaataatgaat

SEQ ID NO: 1798 - DNA, 2495 bp, Artificial Sequence
  chemically treated genomic DNA (Homo sapiens)
gtttattgtttaatatatataaatatatataaatatatatatttatatttttattatatataaatatatatatatataagtgtatatatatatatatatatatatatatatatatatatatatatatatatatatatatatatatatatgtatatatttttttttttttttgagatagttttattttgttgtttaggttagagtgtagtggcgttatttcggttttcgcgtttatgttatttgtttgttttagttttttaagtagttgggattataggcgtttgttattatattcggttaattttttgtatttttagtagagatagggttttattgtgttagttaggatggttttgatttcgatttcgtgatttattcgttttcgttttttaaagtgttgggattataggcgtgagttatcgcgttcggtttttttttttttttttgagatagagtttgtgttgtttaggttggttttaaatttttgggtttaagtgatttttttattttagttttttaaagtgttgggattataggtatgagttattgtgtttgatttttgtttttaattaaaggaataaatagtagaagatgtaattttattagaagtaggaatttgaaaaattaagatatatgaatattggttatggtttggatgtattatttaaaaaataaatacgagtttgggaagatgcgtatttggatattttttgtaatattgtttgtaaatagtaaaaaattggaggtagttaatgtttaagatgaatggttaagttaatgtgatatatttatataatggaatattatatattatagaataatgagattcggaagagttaatttggataatttttagtaatttgaggttaagtgaaaaaaatgagtgtttagaattttgtgtgtttagtattaaattatttatgttaatgtgtaagtataaacggaaggaaagggttatttgttttgaagtatttattgtgtgttaggtgcgggtttgaatttttattgtgattttagagttatttattaatgggatgtgttttttagagattaggaagtagtttttgggagggtagtttatatggtaggagggagtttaggattgttgattttcgggttagttgttggtgttttttttttgtcgggttggtttaaggatttaggtcggggttttagttttcggttggggtaggtaggaggttttgtaattttagtcgttgttttcgttcgtcgttcgttttttttttattttagtttggggaagtttggtttgtttggtttgtcgataatgttttttatttagttttgttttagttgttaggtttgcgggtcgtggaggggggtttttgttaggcggggatagtttgtttttgcgttgcgtttttaggttggattagtagttttaggcggtatggaggggtgagtttttgggttcgatggtgtaaggggggatttagagtagtttagtggttttaggtaagtttttgttttttttgggttttttagaggttggcgggtaggggttttggggattttttggggttttttaggaagggggttttttaaggtgggttttgagatacgtggtaatgtggttattgttaggaattggttttttggggtttgtttgagagtttagtagtggtttttgtattatgaatgtttgtcgttttagcgatttgtttttatgggttttttttttggtttgttttgaggtatagtttttattataggttttggagaagttattaattttaacgtaggggttggagtttgggatttaaaggagattttaaaatagacgatagtttagtgagtagcgagggggaggtttttgggggtcggggaatagtttagcgatgggggagaggttatgtttgatataggttgagaatagaggggttagttgggtaggggaggtgatttattattttagcgttttgggaggttaaggtgggataattatttgaggttaggagtttaagattagttcgggtaatatagcgagattttgtttttattagaagtaattaaaaaattagttaggcgtggtggtgtgtgtttgtagttttagttatttaagaggttgaggtgagaggattattttagtttaggaggtgaaggttgtagtaagttatagttattttattgtattttagattttagtttgggtaatagagtaaggtttgtttttatttaaataaataaataaaaaaagatttaaggattcggattggatgttttttttttttttggggggtattattatgtttttgttatttgggagttggtattatattagtttgaggataggttgttttcgagtttattttggattagagttttattatagtttgagaatatgttttgaattggagttatttttatagttagtaagtttttattgagttattgggtagaggtaaagggattaattaggttatttttttgagtttcggtttttttttatgtaaaataggattaattataggatt

SEQ ID NO: 1799 - DNA, 2492 bp, Artificial Sequence
  chemically treated genomic DNA (Homo sapiens)
taaaaattttttagagtttttttttttgggtttaggaaagtgttaattattttgagtttttttgttttttattttttacgtagtggaggttttatgattagttttgttttatatgggaggaaatcgaggtttagaaaagtgatttggttagtttttttgtttttgtttaatggtttagtgaggatttgttgattgtgagaatgattttagtttagagtatgtttttaggttgtggtgaggttttggtttagggtaggttcggaagtagtttgtttttagattgatatgatgttagtttttaggtggtaggagtataatggtattttttagaaaggagggaggtatttagttcgggtttttgagtttttttttgtttgtttgtttaaatagagataagttttgttttgttgtttaggttggagtttggagtgtagtggaatgattatggtttattgtagtttttattttttgggttaaagtgatttttttattttagttttttgagtagttgggattataggtatatattattacgtttggttaattttttaattatttttggtagagatagggtttcgttatgttgttcgggttggttttgaatttttggttttaagtgattgttttattttggttttttaaagcgttaggatgatagattattttttttgtttagttggtttttttgtttttagtttgtgttaggtatggttttttttttatcgttgggttgtttttcggtttttaggagtttttttttcgttgtttattggattatcgtttgttttggagttttttttgggttttaggttttagtttttgcgttggagttggtggtttttttagagtttgtggtgaaggttgtgttttagggtaggttagggaggggatttatggggatagatcgttgaagcgataagtatttataatgtagggattattgttgggtttttagataagttttagaggattagtttttggtagtggttatattgttacgtgttttagagtttattttgggagattttttttttggagaattttaggaagtttttagagtttttgttcgttagtttttgagaggtttagagggggtagagatttatttgaggttattgagttgttttgaatttttttttgtattatcgggtttaaagatttatttttttatgtcgtttggaattgttggtttagtttggaggcgtagcgtagggataggttgttttcgtttggtaggagtttttttttacggttcgtaggtttggtagttgggatagggttgaatgggaggtattgtcggtagattaggtaagttaggtttttttaggttgaggtgaagaaggggcgggcggcgggcgggagtagcggttggagttatagggttttttgtttgttttagtcgaggattgaggtttcggtttgaatttttgggttagttcgatagggagggggtattagtagttggttcgggagttagtagttttgggtttttttttgttatgtgggttgtttttttagaggttgttttttagtttttgaaaaatatattttattaataagtagttttgaggttatagtgggggtttaggttcgtatttggtatatagtgggtgttttagaataggtgatttttttttttcgtttgtgtttatatattgatataaatagtttaatattggatatataggattttagatatttattttttttatttaattttagattattgggagttatttaaattgattttttcgaattttattattttgtggtatatagtattttattgtgtaaatgtattatattgatttagttatttattttggatattggttatttttaattttttgttatttataaataatattgtaaagaatatttaaatacgtatttttttaagttcgtgtttgttttttaaataatatatttagattatggttaatgtttatgtattttgattttttagatttttgtttttgatggaattgtattttttattgtttgtttttttaattggaaataggggttaggtatagtggtttatgtttgtaattttagtattttgggaggttgaggtgggaggattatttgagtttaggagtttgagattagtttgggtaatatagattttgttttaagagaaaaaaaaaaggtcgggcgcggtggtttacgtttgtaattttagtattttgggaggcggaggcgggtggattacgaggtcgagattaagattattttggttaatatagtgaaattttatttttattaaaagtataaaaaattagtcgggtgtggtggtaggcgtttgtagttttagttatttgggaggttgaggtaggtaaatggtatgaacgcgagagtcgagatggcgttattgtattttagtttgggtaatagagtgaaattgttttaaaaaagaaaaaaaatatatatatatatatatatatatatatatatatatatatatatatatatatatatatgtatgtgtg

SEQ ID NO: 1800 - DNA, 2492 bp, Artificial Sequence
  chemically treated genomic DNA (Homo sapiens)
tatatatatatatatatatatatatatatatatatatatatatatatatatatatatatgtatatatttttttttttttttgagatagttttattttgttgtttaggttagagtgtagtggcgttatttcggttttcgcgtttatgttatttgtttgttttagttttttaagtagttgggattataggcgtttgttattatattcggttaattttttgtatttttagtagagatagggttttattgtgttagttaggatggttttgatttcgatttcgtgatttattcgttttcgttttttaaagtgttgggattataggcgtgagttatcgcgttcggtttttttttttttttttgagatagagtttgtgttgtttaggttggttttaaatttttgggtttaagtgatttttttattttagttttttaaagtgttgggattataggtatgagttattgtgtttgatttttgtttttaattaaaggaataaatagtagaagatgtaattttattagaagtaggaatttgaaaaattaagatatatgaatattggttatggtttggatgtattatttaaaaaataaatacgagtttgggaagatgcgtatttggatattttttgtaatattgtttgtaaatagtaaaaaattggaggtagttaatgtttaagatgaatggttaagttaatgtgatatatttatataatggaatattatatattatagaataatgagattcggaagagttaatttggataatttttagtaatttgaggttaagtgaaaaaaatgagtgtttagaattttgtgtgtttagtattaaattatttatgttaatgtgtaagtataaacggaaggaaagggttatttgttttgaagtatttattgtgtgttaggtgcgggtttgaatttttattgtgattttagagttatttattaatgggatgtgttttttagagattaggaagtagtttttgggagggtagtttatatggtaggagggagtttaggattgttgattttcgggttagttgttggtgttttttttttgtcgggttggtttaaggatttaggtcggggttttagttttcggttggggtaggtaggaggttttgtaattttagtcgttgttttcgttcgtcgttcgttttttttttattttagtttggggaagtttggtttgtttggtttgtcgataatgttttttatttagttttgttttagttgttaggtttgcgggtcgtggaggggggtttttgttaggcggggatagtttgtttttgcgttgcgtttttaggttggattagtagttttaggcggtatggaggggtgagtttttgggttcgatggtgtaaggggggatttagagtagtttagtggttttaggtaagtttttgttttttttgggttttttagaggttggcgggtaggggttttggggattttttggggttttttaggaagggggttttttaaggtgggttttgagatacgtggtaatgtggttattgttaggaattggttttttggggtttgtttgagagtttagtagtggtttttgtattatgaatgtttgtcgttttagcgatttgtttttatgggttttttttttggtttgttttgaggtatagtttttattataggttttggagaagttattaattttaacgtaggggttggagtttgggatttaaaggagattttaaaatagacgatagtttagtgagtagcgagggggaggtttttgggggtcggggaatagtttagcgatgggggagaggttatgtttgatataggttgagaatagaggggttagttgggtaggggaggtgatttattattttagcgttttgggaggttaaggtgggataattatttgaggttaggagtttaagattagttcgggtaatatagcgagattttgtttttattagaagtaattaaaaaattagttaggcgtggtggtgtgtgtttgtagttttagttatttaagaggttgaggtgagaggattattttagtttaggaggtgaaggttgtagtaagttatagttattttattgtattttagattttagtttgggtaatagagtaaggtttgtttttatttaaataaataaataaaaaaagatttaaggattcggattggatgttttttttttttttggggggtattattatgtttttgttatttgggagttggtattatattagtttgaggataggttgttttcgagtttattttggattagagttttattatagtttgagaatatgttttgaattggagttatttttatagttagtaagtttttattgagttattgggtagaggtaaagggattaattaggttatttttttgagtttcggtttttttttatgtaaaataggattaattataggatttttattgcgtggggggtggggggtagggaggtttagggtgattggtatttttttgggtttaaaggaggaggttttgaggggtttttg

SEQ ID NO: 1801 - DNA, 2354 bp, Artificial Sequence
  chemically treated genomic DNA (Homo sapiens)
aatatttatatttgttaggagttgtagttattgattggtagcgttttatttatttattgaatattggttgagtatttgtaatgtgttaggtacgttgttagttaaggaggtagttattaaatatatagataaataaataaatgtgagatgataatagttatgagtgttttgtagtagacgtgtagggatttgtgagagaatgtagtagggagggttttaatttagggtgtgtggttagggaaggtttcgttaaagatgtagtttttaagttgagatgtaaaggaggtagtgaagagttttttttagtagagggaatattatgagtataggttttggggcggacgttttagaatattttagaaacggaaaggaggttagtgagaaaaagggagtttaggagtagaggttggggaaggttgtagggttttaggggtattggaggtaggtagggtaaggattttggattttattttgagtatagggtgatggggtaggagagtttaagtagggagggtgaaatttattttgattggtagttttgtgaaagaggattggttgggtatggagatttaaggatgaggaaaggatattttagagtgttagggcgcgtaaattaaattttatattttaggaagatagaggttagaggaattaggagggttttttggaggaggtggtatttattttgggtttaagagattataggaaaatggaggttagtattttaggtttggggaagagtttgggtaaaggtttggtagtaagagaataaaggtggggtttgatgggttagaggataagtgattttttaaggttataagatattttgatggttgggattttatttttgatggagtaaggtttttgatatttaattgaggtttggcgttaaggattgatattaaggaagtggatttttgtaaatttggtattcgagggtttatttttttaatttttgtgtagttgggaggtgaggtaagaggaagtgtgggttataggttaggtttagagagtttggaggaggagtttttgttagattggagagaagtaggtttgagtttttttaaaggtagtttttggggatttttaggattataggttgagacgagacgtagggtggttggaggaagtgagaggtgaatttagtttgggattggttgggcgagattttttatttgttttttgggattatcgtttattatggttgtggtttagtagttgcgggtcgagaggtgagtgtcggggtgtggtcgttttcgggtttttttattgttttttataggttttagggataaaggttagtttttttgtagtttttgattaatatgagaggttggggttgagttagaatttaaatatttagaaatgtaattttttagaattgttttaacgaaattttgagttgtggtttattatttttagatataaatgagaatattgaggttttaagagtgggagtgatttgtttacggttatataacgagtgatcggtagtgtttggagaggaatgtaggtgttttgggttttaggttggggttttttgttttatatggtgattagtaatgattttttattttttgcgtaaatagaatttatagaatttggtttgttttttcgttaattagggtttgttttaaatgttattttttttaagaagtttttttgatagtttttattttattgttgtttgattttttgttttattttttttttttgtttggtttttatattataggaataatattatatgtttatttattatttttttttgaacgttggtttttttatgagaagtaagttttacgaggttgtgttcgttttgatcgttgttgtattattaggaggtagtttatttttattgagtattaggattaagggtttaataaatgttgttgaatgaatgaataaatgaatgaatgaatgggtggatttttgagacggaaaaggttttagatttttttagtttaattttgttattgtatagattggaaatttgaggtttagggaggataagagatttatttagggttatagagagtgattggtaaggttggggtttggagtacggttttattagtatttagtttcgtcgtttgggaagtatttttagaatttttttttagtagttaggtttgagttttaagttgcgggggttttgaggacgtaaagtttggtttttgtattttttggattggaatagtaggtgatttttgttatttacgtggaggttatttagggggttattagagataggttaggttggtgtgtgtttacgcggggaatagaaggtttatgttggggtttggggttggaagtagaatttgaagcgtgggttggggtaagggtagtagaag

SEQ ID NO: 1802 - DNA, 2354 bp, Artificial Sequence
  chemically treated genomic DNA (Homo sapiens)
tttttgttgtttttgttttaatttacgttttaggttttatttttagttttaggttttaatatgggttttttgtttttcgcgtaggtatatattagtttggtttgtttttggtgattttttgagtggtttttacgtaggtaatagaggttatttgttgttttaatttagggggtgtaggggttaggttttgcgtttttagggttttcgtagtttagagtttagatttggttattgaggaaaaattttgaaaatgttttttaagcgacgaggttagatgttggtgaggtcgtgttttaagttttaattttgttagttattttttgtgattttgagtaagttttttattttttttgggttttagatttttaatttgtataatggtaaggttggattagaagaatttaagatttttttcgttttaaagatttatttatttatttatttatttatttatttatttagtaatatttattgagtttttggttttggtgtttaatagggatgagttattttttagtgatatagtagcgattaaaacggatatagtttcgtggagtttgttttttatgggggagttaacgtttaagaaaaaataataaatgagtatataatattatttttgtaatataagaattaggtagaaaagggaaatagggtaaagggttagatagtaatgaggtaggggttgttaggaaggttttttggaggaggtgatatttgaggtaagttttgattagcggaagaataagttagattttgtgaattttgtttgcgtagaagatggaaagttattgttgattattatgtgaagtaaagggttttagtttgggatttaggatatttgtatttttttttagatattgtcggttattcgttgtgtgatcgtgggtaagttatttttatttttggagttttagtgtttttatttgtgtttgagggtggtgagttatagtttaaagtttcgttaaagtagttttgagaggttgtatttttgagtatttgggttttgatttaattttagttttttatgttgattagggattgtagaaggattggtttttgtttttaaggtttatgaggagtagtgagaaggttcgggggcggttatatttcggtatttatttttcggttcgtagttgttgggttatagttatggtgggcgatggttttagggagtaggtggagagtttcgtttagttagttttaggttgagtttattttttattttttttagttattttgcgtttcgttttagtttgtggttttgggagtttttaggagttgtttttggggaggtttaggtttgtttttttttagtttggtagaggttttttttttaggttttttgggtttagtttgtggtttatatttttttttattttattttttagttgtatagaaattgaggaagtggattttcgggtgttaggtttgtaggaatttatttttttgatgttagtttttggcgttaagttttagttgggtattagaagttttgttttattagagatggggttttagttattagggtgttttgtgattttgaggagttatttattttttggtttattaagttttatttttatttttttattgttaagtttttgtttaaatttttttttaggtttagaatgttggtttttatttttttgtgattttttaggtttagagtaaatgttattttttttaggaagtttttttggtttttttggtttttgtttttttagagtgtgaagtttggtttgcgcgttttggtattttgggatattttttttttatttttagatttttatgtttagttaatttttttttatagggttgttaattagagtgagttttattttttttgtttaaatttttttgttttattattttgtgtttaggataaagtttagagtttttgttttgtttgtttttaatgtttttgaggttttgtagttttttttagtttttgtttttgagtttttttttttttattggtttttttttcgtttttagaatgttttaagacgttcgttttaaggtttatgtttatggtgttttttttgttggaaaaagttttttattgttttttttgtattttagtttagaagttatatttttagcgaggttttttttgattatatattttaaattaaggttttttttattatatttttttataggtttttgtacgtttattgtagagtatttataattattgttattttatatttgtttgtttatttgtatgtttaatgattgtttttttggttagtagcgtgtttggtatattgtaagtgtttaattaatatttagtgaatgaatgaaacgttgttagttagtgattgtagtttttaataggtatgggtatt

SEQ ID NO: 1803 - DNA, 2282 bp, Artificial Sequence
  chemically treated genomic DNA (Homo sapiens)
tgtagttattgattggtagcgttttatttatttattgaatattggttgagtatttgtaatgtgttaggtacgttgttagttaaggaggtagttattaaatatatagataaataaataaatgtgagatgataatagttatgagtgttttgtagtagacgtgtagggatttgtgagagaatgtagtagggagggttttaatttagggtgtgtggttagggaaggtttcgttaaagatgtagtttttaagttgagatgtaaaggaggtagtgaagagttttttttagtagagggaatattatgagtataggttttggggcggacgttttagaatattttagaaacggaaaggaggttagtgagaaaaagggagtttaggagtagaggttggggaaggttgtagggttttaggggtattggaggtaggtagggtaaggattttggattttattttgagtatagggtgatggggtaggagagtttaagtagggagggtgaaatttattttgattggtagttttgtgaaagaggattggttgggtatggagatttaaggatgaggaaaggatattttagagtgttagggcgcgtaaattaaattttatattttaggaagatagaggttagaggaattaggagggttttttggaggaggtggtatttattttgggtttaagagattataggaaaatggaggttagtattttaggtttggggaagagtttgggtaaaggtttggtagtaagagaataaaggtggggtttgatgggttagaggataagtgattttttaaggttataagatattttgatggttgggattttatttttgatggagtaaggtttttgatatttaattgaggtttggcgttaaggattgatattaaggaagtggatttttgtaaatttggtattcgagggtttatttttttaatttttgtgtagttgggaggtgaggtaagaggaagtgtgggttataggttaggtttagagagtttggaggaggagtttttgttagattggagagaagtaggtttgagtttttttaaaggtagtttttggggatttttaggattataggttgagacgagacgtagggtggttggaggaagtgagaggtgaatttagtttgggattggttgggcgagattttttatttgttttttgggattatcgtttattatggttgtggtttagtagttgcgggtcgagaggtgagtgtcggggtgtggtcgttttcgggtttttttattgttttttataggttttagggataaaggttagtttttttgtagtttttgattaatatgagaggttggggttgagttagaatttaaatatttagaaatgtaattttttagaattgttttaacgaaattttgagttgtggtttattatttttagatataaatgagaatattgaggttttaagagtgggagtgatttgtttacggttatataacgagtgatcggtagtgtttggagaggaatgtaggtgttttgggttttaggttggggttttttgttttatatggtgattagtaatgattttttattttttgcgtaaatagaatttatagaatttggtttgttttttcgttaattagggtttgttttaaatgttattttttttaagaagtttttttgatagtttttattttattgttgtttgattttttgttttattttttttttttgtttggtttttatattataggaataatattatatgtttatttattatttttttttgaacgttggtttttttatgagaagtaagttttacgaggttgtgttcgttttgatcgttgttgtattattaggaggtagtttatttttattgagtattaggattaagggtttaataaatgttgttgaatgaatgaataaatgaatgaatgaatgggtggatttttgagacggaaaaggttttagatttttttagtttaattttgttattgtatagattggaaatttgaggtttagggaggataagagatttatttagggttatagagagtgattggtaaggttggggtttggagtacggttttattagtatttagtttcgtcgtttgggaagtatttttagaatttttttttagtagttaggtttgagttttaagttgcgggggttttgaggacgtaaagtttggtttttgtattttttggattggaatagtaggtgatttttgttatttacgtggaggttatttagggggttattagagataggttaggttggtgtgtgtttacgcggggaatagaaggtttatgttggggttt

SEQ ID NO: 1804 - DNA, 2282 bp, Artificial Sequence
  chemically treated genomic DNA (Homo sapiens)
aggttttaatatgggttttttgtttttcgcgtaggtatatattagtttggtttgtttttggtgattttttgagtggtttttacgtaggtaatagaggttatttgttgttttaatttagggggtgtaggggttaggttttgcgtttttagggttttcgtagtttagagtttagatttggttattgaggaaaaattttgaaaatgttttttaagcgacgaggttagatgttggtgaggtcgtgttttaagttttaattttgttagttattttttgtgattttgagtaagttttttattttttttgggttttagatttttaatttgtataatggtaaggttggattagaagaatttaagatttttttcgttttaaagatttatttatttatttatttatttatttatttatttagtaatatttattgagtttttggttttggtgtttaatagggatgagttattttttagtgatatagtagcgattaaaacggatatagtttcgtggagtttgttttttatgggggagttaacgtttaagaaaaaataataaatgagtatataatattatttttgtaatataagaattaggtagaaaagggaaatagggtaaagggttagatagtaatgaggtaggggttgttaggaaggttttttggaggaggtgatatttgaggtaagttttgattagcggaagaataagttagattttgtgaattttgtttgcgtagaagatggaaagttattgttgattattatgtgaagtaaagggttttagtttgggatttaggatatttgtatttttttttagatattgtcggttattcgttgtgtgatcgtgggtaagttatttttatttttggagttttagtgtttttatttgtgtttgagggtggtgagttatagtttaaagtttcgttaaagtagttttgagaggttgtatttttgagtatttgggttttgatttaattttagttttttatgttgattagggattgtagaaggattggtttttgtttttaaggtttatgaggagtagtgagaaggttcgggggcggttatatttcggtatttatttttcggttcgtagttgttgggttatagttatggtgggcgatggttttagggagtaggtggagagtttcgtttagttagttttaggttgagtttattttttattttttttagttattttgcgtttcgttttagtttgtggttttgggagtttttaggagttgtttttggggaggtttaggtttgtttttttttagtttggtagaggttttttttttaggttttttgggtttagtttgtggtttatatttttttttattttattttttagttgtatagaaattgaggaagtggattttcgggtgttaggtttgtaggaatttatttttttgatgttagtttttggcgttaagttttagttgggtattagaagttttgttttattagagatggggttttagttattagggtgttttgtgattttgaggagttatttattttttggtttattaagttttatttttatttttttattgttaagtttttgtttaaatttttttttaggtttagaatgttggtttttatttttttgtgattttttaggtttagagtaaatgttattttttttaggaagtttttttggtttttttggtttttgtttttttagagtgtgaagtttggtttgcgcgttttggtattttgggatattttttttttatttttagatttttatgtttagttaatttttttttatagggttgttaattagagtgagttttattttttttgtttaaatttttttgttttattattttgtgtttaggataaagtttagagtttttgttttgtttgtttttaatgtttttgaggttttgtagttttttttagtttttgtttttgagtttttttttttttattggtttttttttcgtttttagaatgttttaagacgttcgttttaaggtttatgtttatggtgttttttttgttggaaaaagttttttattgttttttttgtattttagtttagaagttatatttttagcgaggttttttttgattatatattttaaattaaggttttttttattatatttttttataggtttttgtacgtttattgtagagtatttataattattgttattttatatttgtttgtttatttgtatgtttaatgattgtttttttggttagtagcgtgtttggtatattgtaagtgtttaattaatatttagtgaatgaatgaaacgttgttagttagtgattgta

SEQ ID NO: 1805 - DNA, 2398 bp, Artificial Sequence
  chemically treated genomic DNA (Homo sapiens)
tagagattaaacggaggcgtgttaagtatagtgtcgggtatggagggggagtttaggagagttgttacgtgagttggggaagttaacgatatgatatatttggttttttttagttttgatagtttgcgattttgtgatttcgagattttagaattatggtacgagattttgagattaacgtttttgtttttgtagtcgatcgggaggttataggaaggttttttttttgtttttttgggagtttttattttttgtttttttagttttagttttttaagtttattttgggtagaggatgggtttttaggattttatttttcgggatattattcgggttttagtttttttatttgtttatggggtgagggtttttttttttgtcgttaggttggttattattttgttgttttttttttttgtttagtttttaggtgtttttagggtatttttaattagggtttttataaggtatttatttttagatcgtttgcgggtttaggtttttttttaggttttcggttacggttgtttatagagttttttttatttggttttcggttttgattttttaattagagtttggtacgttattttttatttttaggatatattttgggggggtaggggtaaggataggggggagaagttttttagggtgaggaagagaagaggggagtaagggatatagaagttaatagaaatagaggggaaagggggtcgggaggaggtggagaaagagagagagagagaaagagggagggggagagagagagagggagagggagaggagatcgtgagtaggaggaaaggtagaatgagggggagtgatgagagatgcgtgatagggagaagacgagaaggaaagagaggagaggagatacgggtgagagggagagatgtagagagaggtaggagggaggaaggagaatgagggggtggtagggagagtgatagagagggattgtgttatagatggtgatatggagttcgtgaaggagggagtaagtagggaggggttgagggtcggagagtaggtgtggggggtgggggcggggtgtaggttaagggaggaggttcggagagggagtaggaggggcgtagattttgttatcggggagattttagttatttacgttcgttggttttggtttttgtagggagttggagagaagaatgtgtttagtgtttaggggagtcgaggttgttagttagtagttagagtagttcgtgaggttattgcggtataggtttttcggggtagtagttgtgttttaaggtaaggttgggtgtggggttggttagttcgggagtttatagtttagttttgtagtcgggtatatcggtcgtagtacggattattggggaggtcgggtgggggttattagttttgggattggttatatttggagagttttaggtagggtgaggagtggaaggatagaatagagaattaatattttaggttttgagggtaaaattattgtgtagtgagaaaatagatttttattattttgtaattgataaaatttaaaatagaataataataattgaggttagtattttgtaatgtaggtttatttatgagaagaatagagttttttttatagatattattttttgtttaattggagtttagagttagtgttttattaaatcgattgtaaatgtttattcgtaaaaattatttttagtttttaggttgtataaaaataggtagtgggtgggatttgtttcgtgggttatatttattgatttttggtttaagagattttgtcgtatagttttgagtataggtttagatgttttgggatgtcgtgtttttgtttgtgttgatttttgttttagtataggagtgataaggaaaggaatagttagagacggaagggaaaaggatatacgttttggttgagtatttattatgtgttaggttgtatttaggttgttttttaaattgggttattttttgggattagggttggattttttttgttattaggtatttggtattgtagagaattggaagttgaatgtatttagaggtgttattatgtatgcggtagtatatagtaggatatatttatttttagtcggagtcggtttggttttttaacgttgttcgtttttttgttttgtgttcgggataaggtttttgttttaggttttagttttttattgtttttgttcgtataagtttatgaggtgtgggtgggtttttgggagcgtgtttttagggttaagggtgggttttttatggtattgattatttatttttatttacggttttttattgtttttagaataaagttttttcgtcgtagtttatttggtattgtatttttgatttttgtcgtttgcgcgggtttttttttttgttgattttattcgtttttttgtgttt

SEQ ID NO: 1806 - DNA, 2398 bp, Artificial Sequence
  chemically treated genomic DNA (Homo sapiens)
gggtatagaggagcgagtgaaattagtagaggaggaggttcgcgtaggcggtaggaattaaggatgtagtgttaggtgggttgcggcgagagagttttattttgagggtagtgagaagtcgtgggtaggggtgggtggttagtgttatggaaaatttatttttgattttgaggatacgtttttaggagtttatttatattttatgaatttgtacggataaggataatgggaggttgagatttggagtaagggttttgtttcgggtataaggtaaagggacgggtagcgttaagagattaggtcggtttcggttggaagtgggtgtgttttattgtgtgttgtcgtatgtatggtggtatttttggatgtatttaatttttagttttttgtagtgttaggtatttagtgataaaggaggtttagttttggttttagggaatggtttagtttggaaagtagtttaggtatagtttggtatatagtaggtgtttagttaagacgtgtgtttttttttttttcgtttttgattgtttttttttttattatttttgtgttgaggtaggaattagtataggtaggggtacggtattttaagatatttgggtttgtgtttaggattgtacggtagagttttttagattaaagattagtaaatatggtttacggggtaaattttatttattgtttgtttttgtatagtttaggagttgagaatggtttttacggatgaatatttgtaatcggtttgatgaaatattaattttaaattttaattaagtaaaaggtgatgtttgtaaaaagaattttattttttttatgagtggatttatattataaaatattggttttaattattattattttattttgagttttgttagttataaaatagtaaaaatttgtttttttattgtataatgattttgtttttaaagtttaaaatattggttttttgttttgtttttttattttttattttgtttggggttttttagatgtaattaattttaggattaatgatttttattcggtttttttagtggttcgtgttgcggtcggtgtgttcgattgtagggttggattgtggattttcgggttggttagttttatatttagttttgttttgggatatagttgttgtttcgggggatttgtgtcgtagtggttttacgagttgttttggttattggttggtagtttcggtttttttgagtattgagtatatttttttttttaattttttgtaggagttaaggttagcgggcgtgggtggttgaaattttttcggtaatagggtttgcgttttttttgtttttttttcgggtttttttttttaatttgtatttcgtttttattttttatatttgtttttcggtttttagtttttttttgtttatttttttttttacgggttttatgttattatttgtggtatagtttttttttgttattttttttgttatttttttattttttttttttttttttgtttttttttgtattttttttttttattcgtgtttttttttttttttttttttttcgttttttttttgttacgtattttttattatttttttttattttgtttttttttttatttacggttttttttttttttttttttttttttttttttttttttttttttttttttttttttttttttattttttttcgatttttttttttttttatttttattggtttttgtgttttttgtttttttttttttttttttattttgggaagttttttttttttatttttgtttttgtttttttaggatgtgttttggagatggggggtgacgtattaggttttggttgggaagttagggtcggagattagatgggagaggttttgtggatagtcgtggtcgagggtttgggagggaatttgagttcgtaagcggtttagaagtgggtgttttgtggggattttagttaggagtgttttgggggtatttggggattgggtagggagaggggatagtagaatgataattagtttggcggtaaggagggaagtttttattttatgggtaggtaaggaggttggggttcggatgatgtttcgaagggtggggttttggaagtttattttttgtttaggatgaatttgggaggttggggttggggaggtagagggtggggatttttagggaggtaggagggaggtttttttgtgatttttcggtcggttgtaggggtaggggcgttagttttagaatttcgtgttatgattttaggatttcggaattatagaatcgtaggttgttagggttggagggagttagatgtattatgtcgttggtttttttagtttacgtggtagtttttttgagttttttttttatattcggtattgtgtttggtacgttttcgtttaatttttg

SEQ ID NO: 1807 - DNA, 2479 bp, Artificial Sequence
  chemically treated genomic DNA (Homo sapiens)
tggaagataagcggatttattttttagggttgtttgtagagattaaacggaggcgtgttaagtatagtgtcgggtatggagggggagtttaggagagttgttacgtgagttggggaagttaacgatatgatatatttggttttttttagttttgatagtttgcgattttgtgatttcgagattttagaattatggtacgagattttgagattaacgtttttgtttttgtagtcgatcgggaggttataggaaggttttttttttgtttttttgggagtttttattttttgtttttttagttttagttttttaagtttattttgggtagaggatgggtttttaggattttatttttcgggatattattcgggttttagtttttttatttgtttatggggtgagggtttttttttttgtcgttaggttggttattattttgttgttttttttttttgtttagtttttaggtgtttttagggtatttttaattagggtttttataaggtatttatttttagatcgtttgcgggtttaggtttttttttaggttttcggttacggttgtttatagagttttttttatttggttttcggttttgattttttaattagagtttggtacgttattttttatttttaggatatattttgggggggtaggggtaaggataggggggagaagttttttagggtgaggaagagaagaggggagtaagggatatagaagttaatagaaatagaggggaaagggggtcgggaggaggtggagaaagagagagagagagaaagagggagggggagagagagagagggagagggagaggagatcgtgagtaggaggaaaggtagaatgagggggagtgatgagagatgcgtgatagggagaagacgagaaggaaagagaggagaggagatacgggtgagagggagagatgtagagagaggtaggagggaggaaggagaatgagggggtggtagggagagtgatagagagggattgtgttatagatggtgatatggagttcgtgaaggagggagtaagtagggaggggttgagggtcggagagtaggtgtggggggtgggggcggggtgtaggttaagggaggaggttcggagagggagtaggaggggcgtagattttgttatcggggagattttagttatttacgttcgttggttttggtttttgtagggagttggagagaagaatgtgtttagtgtttaggggagtcgaggttgttagttagtagttagagtagttcgtgaggttattgcggtataggtttttcggggtagtagttgtgttttaaggtaaggttgggtgtggggttggttagttcgggagtttatagtttagttttgtagtcgggtatatcggtcgtagtacggattattggggaggtcgggtgggggttattagttttgggattggttatatttggagagttttaggtagggtgaggagtggaaggatagaatagagaattaatattttaggttttgagggtaaaattattgtgtagtgagaaaatagatttttattattttgtaattgataaaatttaaaatagaataataataattgaggttagtattttgtaatgtaggtttatttatgagaagaatagagttttttttatagatattattttttgtttaattggagtttagagttagtgttttattaaatcgattgtaaatgtttattcgtaaaaattatttttagtttttaggttgtataaaaataggtagtgggtgggatttgtttcgtgggttatatttattgatttttggtttaagagattttgtcgtatagttttgagtataggtttagatgttttgggatgtcgtgtttttgtttgtgttgatttttgttttagtataggagtgataaggaaaggaatagttagagacggaagggaaaaggatatacgttttggttgagtatttattatgtgttaggttgtatttaggttgttttttaaattgggttattttttgggattagggttggattttttttgttattaggtatttggtattgtagagaattggaagttgaatgtatttagaggtgttattatgtatgcggtagtatatagtaggatatatttatttttagtcggagtcggtttggttttttaacgttgttcgtttttttgttttgtgttcgggataaggtttttgttttaggttttagttttttattgtttttgttcgtataagtttatgaggtgtgggtgggtttttgggagcgtgtttttagggttaagggtgggttttttatggtattgattatttatttttatttacggttttttattgtttttagaataaagttttttcgtcgtagtttatttggtattgtatttttgatttttgtcgtttgcgcgggtttttttttttgttgattttattcgtttttttgtgttttaggcgtatttagttttatgtatttatttatttatttttgtaggt

SEQ ID NO: 1808 - DNA, 2479 bp, Artificial Sequence
  chemically treated genomic DNA (Homo sapiens)
atttgtaggaataagtgaatgaatatatgaggttgggtacgtttggggtatagaggagcgagtgaaattagtagaggaggaggttcgcgtaggcggtaggaattaaggatgtagtgttaggtgggttgcggcgagagagttttattttgagggtagtgagaagtcgtgggtaggggtgggtggttagtgttatggaaaatttatttttgattttgaggatacgtttttaggagtttatttatattttatgaatttgtacggataaggataatgggaggttgagatttggagtaagggttttgtttcgggtataaggtaaagggacgggtagcgttaagagattaggtcggtttcggttggaagtgggtgtgttttattgtgtgttgtcgtatgtatggtggtatttttggatgtatttaatttttagttttttgtagtgttaggtatttagtgataaaggaggtttagttttggttttagggaatggtttagtttggaaagtagtttaggtatagtttggtatatagtaggtgtttagttaagacgtgtgtttttttttttttcgtttttgattgtttttttttttattatttttgtgttgaggtaggaattagtataggtaggggtacggtattttaagatatttgggtttgtgtttaggattgtacggtagagttttttagattaaagattagtaaatatggtttacggggtaaattttatttattgtttgtttttgtatagtttaggagttgagaatggtttttacggatgaatatttgtaatcggtttgatgaaatattaattttaaattttaattaagtaaaaggtgatgtttgtaaaaagaattttattttttttatgagtggatttatattataaaatattggttttaattattattattttattttgagttttgttagttataaaatagtaaaaatttgtttttttattgtataatgattttgtttttaaagtttaaaatattggttttttgttttgtttttttattttttattttgtttggggttttttagatgtaattaattttaggattaatgatttttattcggtttttttagtggttcgtgttgcggtcggtgtgttcgattgtagggttggattgtggattttcgggttggttagttttatatttagttttgttttgggatatagttgttgtttcgggggatttgtgtcgtagtggttttacgagttgttttggttattggttggtagtttcggtttttttgagtattgagtatatttttttttttaattttttgtaggagttaaggttagcgggcgtgggtggttgaaattttttcggtaatagggtttgcgttttttttgtttttttttcgggtttttttttttaatttgtatttcgtttttattttttatatttgtttttcggtttttagtttttttttgtttatttttttttttacgggttttatgttattatttgtggtatagtttttttttgttattttttttgttatttttttattttttttttttttttttgtttttttttgtattttttttttttattcgtgtttttttttttttttttttttttcgttttttttttgttacgtattttttattatttttttttattttgtttttttttttatttacggttttttttttttttttttttttttttttttttttttttttttttttttttttttttttttttattttttttcgatttttttttttttttatttttattggtttttgtgttttttgtttttttttttttttttttattttgggaagttttttttttttatttttgtttttgtttttttaggatgtgttttggagatggggggtgacgtattaggttttggttgggaagttagggtcggagattagatgggagaggttttgtggatagtcgtggtcgagggtttgggagggaatttgagttcgtaagcggtttagaagtgggtgttttgtggggattttagttaggagtgttttgggggtatttggggattgggtagggagaggggatagtagaatgataattagtttggcggtaaggagggaagtttttattttatgggtaggtaaggaggttggggttcggatgatgtttcgaagggtggggttttggaagtttattttttgtttaggatgaatttgggaggttggggttggggaggtagagggtggggatttttagggaggtaggagggaggtttttttgtgatttttcggtcggttgtaggggtaggggcgttagttttagaatttcgtgttatgattttaggatttcggaattatagaatcgtaggttgttagggttggagggagttagatgtattatgtcgttggtttttttagtttacgtggtagtttttttgagttttttttttatattcggtattgtgtttggtacgttttcgtttaatttttgtaaataattttgggaggtgggttcgtttgtttttta

SEQ ID NO: 1809 - DNA, 2500 bp, Artificial Sequence
  chemically treated genomic DNA (Homo sapiens)
tttttgggagttttttcggtgtagttattgggatggaatgtatataggtttttggtagaggtttagattagtaagttgggagggtggggagtgttttagtttttgtgtgggagtgaatgcgggtggggtgtaggattaaggatgtggtttagtggggggtttattaggggttttttagtttttttatttggagaggggtggtgttagtagggttggttttaggattgggattaggatataggttttagagtttttttattttttataaaggaaggtaagttgtaatttttgtgggaagggggtttaagggggtttagttattcgggggatttagtattattagatttgtttattttttttggttagttttagttattcgggggtttagtatttttagatttgtttgttttttttgtttattatttttattaaagtttataggtgggtttgttttaggattttttttgaaatagtttgtatttttggggttatttacggatgggattttatgggtatttttgaatttaagtgggagtcggaggagggatatagggaggtttatttattgtttgttttaaatttgatattattttttattttttgggttatttttagttgtatataattcgttggttgggtgggtttaggtgtatgtggtttttacggtatagttatattcgatttttgtgtgtgttttttgtagtgacgtattggttttgcggttggtttgtatcggggacgagatggacgtgagttttagggtttcgcgtttggtttagtttttcgaggtggttatgtataggtagtcggtttatgttttatgtttttatatttggggaggggttttgggcggtgggtggaggttttgaatatagtatagggttgggttttgaggaagttttgtgggggatgtgttttgatattggggttatattgaaatttttggttgtttttcgtattttttttgggagtttttagtttttggtattcgttttttgttatttgtttttggtatttttgggtaataaagtagagtttagggtttttttttttttcgtcgtttttattgagtttagatggtatatttttatcgtggttttaagagggggtgttacgtgagttcggattttagattttgggggttgggttttttagcgagttttcggtgggggaatagagtgggtagtggtttgtgagggttttgtagaatgggggtttattttttacgtggttagttttggaagatagggttaaatattcggtgggttggcgggcggttggttggcggaggaagtaggaagttggaatgaatttgattataaatagtttatattacgcggtttttgtaggtggaggcgtttacggaaagggtttcgggtggttgtggggtgggagggtataggtttttgttttttatagttgtgatggtgttatttaagtataggttgtttttatttgtttttgtagtaatggttttgtttttttattttttttgtttatagtttgggtttggtttttatttacgattagattgaggatattagggatgtttttagaagttttatggacggttttattatatttaaggagaatataatgaggttttggagattttcgaatttcgggttttgggtaagagttttgagatttttgattttgatttgcgttgcggttagtgggggttgttagagtcgttttttggggcgttatagtttttattatttcgtattattatttgtgttatttgtgtttatatttgtttgattttatgggtttttgggtttgagatgtttggttttgagtgtataaattagtgtatggttttgggtttttttttggttcgagagtttttatttggtaggtaggattttcgttttttggttagggtaggggtttttttgagtagtttttttggtagtttggttttatggtgtttattcggtatcgtttattataagggtagttgattgtttttatttgtgtttatcgggtgtttttgtttgtgtttcgtagattggtaggtttaggttacgttggtttttttggttacgtttttagggttatttttttttttttttgaattttttttttttttggttttttcgagtttttttttagtttttatttttttgggtttttttttggtatttcgttgttattcgtttggttttattgtcggggtttgtttcgagtttgatttttttgttttgtttttataggtgttttgcgaataggtgttgttggcgttgttgttgttgttggcgttgttgttgtcgttgtttagcgggggtttgtatttgttgtttaagtgaggtttcggcggtttagggcggggttggttttatttttatgattattgttttggaggtggcggtttgttgttgttatttttttaattgtttttttatgatgtttttttatatttaaatttcgagatagtgttggaatattgttgaggttttatatttaggttttttgttttttttttattttagttttt

SEQ ID NO: 1810 - DNA, 2500 bp, Artificial Sequence
  chemically treated genomic DNA (Homo sapiens)
gaaaattggaataaaaaaaaaataaaaaatttgagtataaaattttagtagtgttttagtattatttcggggtttaaatataaaaaggtattatgagaaaatagttaaaaagataatagtagtaggtcgttatttttagggtagtggttatgggggtggggttagtttcgttttgagtcgtcggggttttatttgagtagtaggtgtaggttttcgttgagtagcggtagtagtagcgttagtagtagtagtagcgttagtagtatttgttcgtaggatatttgtgggagtaaagtagaggagttaggttcggggtaggtttcggtaatggggttagacgggtgatagcggagtgttaaggggaagtttaggagggtggggattgggaaggagttcgaggggattagagaaggaaggagtttaggagagggggaaagtggttttgaggacgtggttagagaggttagcgtggtttgggtttgttagtttgcgggatataggtaaagatattcggtgggtataggtgagggtagttagttgtttttgtggtgggcggtgtcgagtggatattatgggattaggttattaggaaggttgtttagggaggtttttgttttggttaggagacgggagttttgtttgttaggtgaaggttttcggattagagggagatttaggattatgtattggtttgtgtatttagaattaggtattttaaatttaaaagtttatgggattaggtagatgtggatataggtgatatagatgatgatacggagtggtggggattgtggcgttttaaggagcggttttgatagtttttattggtcgtagcgtaagttagggttagggattttaaggtttttatttaggattcggggttcggggatttttagaattttattatgttttttttaagtgtggtgaaatcgtttatgaaatttttaagaatatttttgatgtttttagtttggtcgtagatgaaagttagatttaggttatagataaagaggatggggggataaagttattattgtaggagtaggtaggggtagtttgtatttagatgatattattatagttgtggggagtaggggtttgtgtttttttattttatagttattcggggtttttttcgtgggcgtttttatttgtaggggtcgcgtggtatggattgtttgtggttaaatttattttaattttttgtttttttcgttagttagtcgttcgttagtttatcgggtgtttggttttgttttttagagttggttacgtggaaaataaatttttattttatagggtttttataagttattgtttattttatttttttatcggagattcgttgagaggtttagtttttaggatttaggattcgagtttacgtagtatttttttttaagattacggtggaaatgtattatttgggtttaatgaggacggcgagagagaaaagggttttgggttttgttttgttgtttaggaatgttagggataggtggtagggggcgagtgttaggagttgggggtttttaggagaggtgcgggaagtagttaagggttttagtatagttttagtgttaaggtatattttttatagagtttttttagggtttagttttgtgttgtgtttagggtttttatttatcgtttagggtttttttttaggtgtagaggtatagggtataggtcggttatttgtgtatggttatttcggagagttgggttaggcgcggggttttgaggtttacgtttatttcgttttcgatgtaggttagtcgtagggttaatgcgttattgtagggagtatatataggagtcgggtgtggttgtgtcgtggaggttatatgtatttggatttatttagttaacggattgtgtgtagttgggagtggtttagaggataagagatggtgttagatttggggtaggtagtgagtgggtttttttgtatttttttttcggtttttatttggatttagagatatttatgaggttttattcgtgggtggttttagaggtgtaagttattttaaaaagaattttggggtaggtttatttgtgggttttggtggaaatggtggataaggggaataggtaggtttgggggtgttgagttttcggatggttgaggttgattaaggggaatggataggtttggtggtgttgagtttttcggatggttgagtttttttgagttttttttttataggggttgtagtttatttttttttgtgggaggtgagggggttttaagatttgtgttttggttttaattttgaaattagttttgttggtattatttttttttaaatggggggattaagaagtttttagtaggttttttattaaattatatttttgattttatattttattcgtatttatttttatataaagattaagatattttttatttttttagtttgttggtttgggtttttattagggatttgtgtgtattttattttagtgattatatcgggggaatttttaggga

SEQ ID NO: 1811 - DNA, 2467 bp, Artificial Sequence
  chemically treated genomic DNA (Homo sapiens)
ttttggaggaggcggggtttggttttggtttcggatcgtcgagatcggttacgttgcgtcgtttggacgtcgggtttttttatttatagttttgcgatttttacgagttcgattttttttgcgttttagtttttttatttataaaatggagataatgttttcgcgcgttgagttcgagcgcggtcgtgttgttatattattgttgttgttatgtcgttaatgacggtatagtttttatggaaggggggttaaggaaggtacggggattttttcgtaggatatggggtgggtattagttttaagttatgtatataatttattttgaggttaggatttgggtttttttcgtgtttattgggggttttagtcgttgtttttatttttttaggttttagttttttataatgggcgcgtttttttgtttgagagggaggttttagttaagttttagtttttatcgtaaaaagttatatagtaaatatttaatggattttaaatttataaaaattattttatagagttttatgaggtagggaatgttattgtatttatttcgtagatgaggaaatttggggtatcgatattttttagagttaatatgtaaattaggtatttggtttgagtgatagattggtgtaggtggttagtagtttaatttgtattgagcgtttattgggtttttatagcgattttgaattgtgtttttgtttatagtgattcggtcggttcgggtatggtagatttagtggcgggtatcgcgggttcggcggttaagagcgtgcggttatttcgttttagtgaggtttacgtggaggttatgaaggaggatttggtcgagtggtttaatgttttgtacggtttgggtttttcgggtggtggcgatggttttttgatagggttggttacgggtacgattttgtgttaatatgttaacgtcgtgatcgaggttgttcgtgtattggtagtcgttcgttcggttcgaggtgtggttttttaggcgtatagtgtagtgtttggtttttttatggcgcgcgataacgtggttatttttatcggttggtgtcgcgtggagttgggtgtgtcggaggtgtttatgtttgagattgaggatttggtgttgcgtaagaacgagaagagcgtggtgttgtgtttgttggaggtggcgcggcgtggggtacgtttgggtttgttggttttacgtttcgtgtagtttgagtaggagattgagcgggagttgcgtgttgtatttttagtttttaacgtttttgtcgttggggaggatattattgaaatcgttttcgtattagggatttttgttcgcggttttcgtatgatatttagcgatttgcgtaatttcgacgagttggtgagttttttagtattaggtgttagggattcgatagtatagttagtgtttgtaatttgtttttgaattttttagggtttattttgttatttgtagaatagtttgttttataaaaagagtgtatatgttgagtattaaatcgaggaatgtatatttgattttaaggaaatgggtagtttatagagagggaggtgtcggggagatgacgtagtttagtcgggtttgggataggatgcgggtttttggtacgatttttttttattttgtgtgttaattgtgttttaattgagtttgtgtatttttttttttggggggtcgtatgatcggggcgttttttttgtgttttttttgtagttagttttaggtagatgtatttataattttatggaggttcgaggttgagcgggtgttgtgatgttcggttgagacgaggtatggaaaaatttgggtaaggtgtttggtatatagtaggtgttttagggggttttgtaggtttttttattttttaggtatttttgggaagtttagttgggttgttgttgttgttgggagtagggattttgtttggaattataggattcgttttattttaagtataggcgttgttgggttttgtttttaagtttttttttttttaggatttgggtggtttttgttatttttgagggttggattaagagttttttttttattagaaggttaggattataatgtgtttgtttgggaggtagatagcggatggtagtgggtagagtttggggttttattttttgttttggattagggttatttaaggttttatttgtttattttttttggcggtattattgtcgttgtgggcggggaggcgggtagggttgtttatatagttagtttggtagcgttttggttttggtggggggttgtatgtggtgcgtgtttattcggttagtggtttgtgtgtgtatgtgttcgatgtgtttgtggtacgtttttatattagtgtttatttaggggtatggggttttttgtatttgtgttttgtagtttgtttggtttttttgtgggttttagtttttttgtttgagaagtgggtgaagcgggagtgaggacgggttttgg

SEQ ID NO: 1812 - DNA, 2467 bp, Artificial Sequence
  chemically treated genomic DNA (Homo sapiens)
ttagagttcgtttttattttcgttttatttattttttagataagaaggttggggtttataggaaggttaggtaggttataggatataggtgtagggggttttatgtttttgggtgggtattgatgtggaggcgtattatagatatatcggatatatgtatatatagattattggtcgggtgagtacgtattatatatagttttttattagagttagagcgttgttaagttggttatgtgggtagttttgttcgttttttcgtttatagcggtagtggtgtcgttagaggaaataagtaggtggggttttgagtgattttggtttaggatagggggtggggttttaggttttgtttattgttattcgttatttgttttttaggtaggtatattgtagttttgattttttgataagaaggaaatttttggtttagtttttaggggtggtaggggttatttagattttgggagaggagagatttgggggtagggtttagtaacgtttatgtttagagtagaacgaattttgtaattttaaataggatttttgtttttagtaatagtagtaatttagttaggttttttaggggtgtttggggagtggggagatttgtagagttttttggggtatttattgtgtgttaggtattttgtttaggtttttttatgtttcgttttaatcgagtattatagtattcgtttaatttcgagtttttatgaggttgtgggtatatttgtttaagattgattgtagggagggtatagaggaggcgtttcgattatgcggttttttagaagaaggaatgtataagtttagttgaggtatagttagtatataaagtgagggaagatcgtgttaggagttcgtattttgttttaggttcggttgggttgcgttattttttcggtatttttttttttgtgggttatttatttttttggggttaggtatatatttttcggtttggtgtttaatatgtgtattttttttgtggggtagattgttttgtagatagtagggtggattttgggaggtttagggatagattgtaggtattggttgtgttgtcgggtttttggtatttggtgttgggggatttattagttcgtcgaggttgcgtaggtcgttgggtgttatgcgggggtcgcgggtaggagtttttggtgcgggggcggttttagtggtgttttttttagcggtaggggcgttgggggttgggggtgtagtacgtagttttcgtttaattttttgtttaaattgtacgaggcgtggggttagtaggtttaggcgtgttttacgtcgcgttatttttagtaggtatagtattacgtttttttcgtttttgcgtagtattaggtttttagttttaaatatgagtattttcggtatatttagttttacgcggtattagtcgatgaaggtggttacgttgtcgcgcgttatgaaggagttaggtattatattgtgcgtttggaaggttatatttcgggtcgggcgggcggttgttaatgtacgggtagtttcggttacggcgttggtatgttggtatagggtcgtgttcgtggttagttttgttaggaagttatcgttattattcgggagatttaggtcgtataaggtattgagttattcggttaggtttttttttatggtttttacgtaggttttattggagcgaaatggtcgtacgtttttggtcgtcgagttcgcgatgttcgttattgggtttgttatgttcggatcggtcgagttattgtgggtaggaatatagtttaggatcgttgtggggatttagtaagcgtttagtataaattaagttgttggttatttgtattagtttgttatttaggttaaatgtttggtttatatgttggttttgggaaatgtcggtgttttaagtttttttatttgcgaaatgggtatagtaatattttttgttttataggattttatgggataatttttataaatttagggtttattaagtgtttgttgtgtggttttttgcggtggaaattggggtttggttggggttttttttttaggtagggaggcgcgtttattgtgaagggttgggatttagagaagtgaagataacggttaaggtttttagtggatacgaaaggaatttaggttttgattttagagtgggttatgtgtatggtttagggttggtgtttattttatgttttgcgggaaggttttcgtgttttttttggttttttttttataagggttgtgtcgttattaacgatatagtagtagtaatagtgtaatagtacgatcgcgttcgggtttagcgcgcggaggtattatttttattttatagatgaggaaattgaggcgtagaaagggtcgagttcgtgaaggtcgtagagttgtgggtggaggagttcggcgtttaggcggcgtagcgtggtcggtttcggcgattcggggttagggttaggtttcgttttttttaaga

SEQ ID NO: 1813 - DNA, 2385 bp, Artificial Sequence
  chemically treated genomic DNA (Homo sapiens)
tgtggttgtgtgggtattatatatgtgataatttattaagttgtgtttatttacggtttgtttttattgtaggtaagttatatttttataagatcgtttggaaagagatattatttattaggtaagaaaaattattaaatggttagaaaaatatttaatgaatgatatgttagatttgttagattttttattttgaaaattattgaggaaagttaaagaattcggttaaatgaattagatttggattatggttggaaaattttatttaaaaaaaaagtcggttaggtgcggtggtttacgtttgtaattttagtatttagggaggtcgaggtgggtggattatttgaggttaggagttcgagattagtttgattaatatgatgaaattttatttttattaaaaatataaaaaaattagttgggcgtggtggtgcgcgtttgtagttttagttatttagggggttgaggtaggagaatcgtttgaatttaggaggtggatgttgtagtgagttgagattgtgttattgtattttagtttgggagatagaacgggatttcgttttaaaaaaaaaaaaaatttgttgggcgtggtggtttacgtttgtaattttaatattttgggaggttaaggtgcgtggattgtttgagtttaggagtttttaattagtttggttaatatggtgaaattttgtttttattaaaatataaaatattaattgggtatggtggtgggcgtttgtggttttagttatttaggaggttgaggtaggagaattgtttgaattcgggatatggaggttgtagtgagttaagatcgagttattgtattttagtttgggtaatagaatgagatttcgttttaaaaaaaaaaaaaaaaaaggatgttcgttttttttaagatttgtagatttaaggtgattttagttaaagttttagtagtttgttgtttttaagttaataagttttaagggttagtacgtattttttgttttgttggtcggattgggtttggtgattttgtcgtcgtaggttttttgtagtataggttttgagagtaacggtgcggttgtttgattgttacggaataaatatatattaggcgagtattagtttgaggtcgaggggtatatggagttggtttgagtttagttaggagtttggaagtaagtttagtttttttcggtcgtgttttcgagggtttgatcgcgaaacgttcgtacgtacgggttggagttgtttgttacgcgtggtaattgcggtaggaatttgatttacgtacggacgttagtatttataagtgagaggcgttttagatacgtggtgtcggttttggaagtagttggtgggtggtgaggaaatgttatagttttggaaagatagaggtttttgtaaggtggtgttaaaatgttaggttgaattaatagttatttgcggggattttgaaggtaggtaattcgtttagtgaattggtagtatcgggtaggagggtttggagggagaattttggtggtatggttggtgtgtgaggattaaaggtagaggagattttttttttttagtatggtaatttggtattgggttaagtttttagttgtttttcgttggtgatttggtaaaggggaatataaatttttttggtcggtaatattgtttacggtaatattgttttgtggtaggtagattacgtggggattggggagttattggtgtttgggaggttacgttattggtttttttgagtgatttttatatttgggaatgtgttttgcgggttatagtcgcgggattgttgtaggaggaatttcgtttttcgtggggtaagaggtattttcgtgagtgggttttagtttttgaatcgtagtgggaattagggaggcggtaatatttgcgtgtcgttataaagatttttattatgttttcgtaaagatttttattatatcgttttgaagatttttatatattttcgtaaagattttattatattattttaaagatttttatatatattcgtaaagattttattatattattttgaagattttatatattttcgtaaagattttattatatcgttttaaagatttttatatattttcgtaaagattttattatatcgttttgaagattttatatattttcgtaaagatttttattacgttgttttaaagatttttatatattttcgtaaagatttttattatattattttaaagattttatatattttcgtaaagatttttattatatcgttttgaagatttttatatattttcgtaaagattttattatatcgttttgaagatttttatatatattcgtaaagattttattatattattttgaagattttatatattttcgtaaagattttattatatcgttttg

SEQ ID NO: 1814 - DNA, 2385 bp, Artificial Sequence
  chemically treated genomic DNA (Homo sapiens)
taggacggtgtgatggggtttttacgagggtgtgtggggtttttaggatggtgtgatggggtttttacgagtgtgtgtgggggtttttaggacggtgtgatggggtttttacgagggtgtgtgggggtttttaggacggtgtgatgggggtttttacgagggtatgtggggtttttaggatggtgtgatgggggtttttacgagggtatgtgggggtttttaggatagcgtgatgggggtttttacgagggtgtgtggggtttttaggacggtgtgatggggtttttacgagggtatgtgggggtttttaggacggtgtgatggggtttttacgagggtgtgtggggtttttaggatggtgtgatggggtttttacgagtgtgtgtgggggtttttaggatggtgtgatggggtttttacgagggtatgtgggggtttttaggacggtgtgatgggggtttttacgagggtatggtgggggtttttatgacggtacgtaggtgttgtcgtttttttgatttttattgcgatttaggggttgggatttatttacggagatgttttttgttttacgggaggcgaagttttttttgtagtaatttcgcggttatggttcgtagggtatatttttaggtgtggggattatttaggaaggttagtgacgtggttttttagatattaatgattttttagtttttacgtggtttgtttgttatagggtagtgttgtcgtaagtaatgttgtcgattaaaggagtttatgtttttttttattaggttattagcgggaggtagttggaggtttagtttagtgttaaattattatgttgaagaggaaagattttttttgtttttgatttttatatattagttatgttattagggttttttttttagatttttttgttcggtgttgttagtttattgggcggattgtttgtttttagagttttcgtagatgattgttgatttaatttggtattttgatattattttatagaggtttttgtttttttagagttgtgatatttttttattatttattagttgtttttaaagtcgatattacgtgtttgaggcgttttttatttgtgggtgttggcgttcgtgcgtgagttaggtttttgtcgtagttgttacgcgtggtaaataattttaattcgtgcgtacgagcgtttcgcggttaggttttcgagggtacggtcgggaggagttgggtttgtttttagatttttggttgggtttaggttagttttatgtgtttttcggttttaggttagtgttcgtttggtgtgtgtttgtttcgtgatagttaggtaatcgtatcgttgtttttagagtttgtgttgtaaaaggtttgcggcgatagggttattaggtttagttcggttagtaggataggaagtgcgtgttggtttttggagtttgttggtttaagaatagtaaattgttgggattttgattgggattattttgaatttgtagattttggggagaacggatatttttttttttttttttttttgagacggagttttattttgttgtttaggttggagtgtagtggttcgattttggtttattgtaatttttatatttcgggtttaagtaatttttttgttttagttttttgagtagttgggattataggcgtttattattatgtttagttaatattttgtattttagtagagatagagttttattatgttggttaggttggttggaaatttttaagtttaggtaatttacgtattttggttttttaaagtgttgggattataggcgtgagttattacgtttagtagattttttttttttttgagacggagtttcgttttgttttttaggttggagtgtagtggtataattttagtttattgtaatatttattttttgggtttaagcgatttttttgttttagttttttgagtagttgggattataggcgcgtattattacgtttagttaatttttttgtatttttagtagagatggggttttattatattggttaggttaatttcgaatttttgattttaggtgatttatttatttcggtttttttaagtgttgggattataggcgtgagttatcgtatttggtcgattttttttttaaataaagttttttaattatgatttagatttggtttatttaatcgggttttttgattttttttagtggtttttaggatagaaggtttggtaagtttggtatgttatttattagatgtttttttagttatttggtggttttttttgtttagtaaatagtatttttttttaaacggttttgtgaaggtatgatttatttatagtgaggatagatcgtaagtagatatagtttgatggattgttatatgtgtgatatttatatagttata

SEQ ID NO: 1815 - DNA, 2500 bp, Artificial Sequence
  chemically treated genomic DNA (Homo sapiens)
aattttttggttttttggagatttttttgtattttttattattttaagtttttagatttaatttttatttaattgtggttggtaagggggagggtagcggaagagagtcgggtttttttgataaagttttaattttttggaatttagatgttttttatttttgtttttatttttttgtttttttttaattttttgattattttttaaagtgtaggtgatttattattgttattagggttaggggaagttttttggatagagagtatgggagttttgggttttggttttggttttgttattaatttttatgtgatttttgtgatttttttgtttttttgggtttgttttttggttagtttagcgagaattaggtgattgttatcggtttatattttttggagtttttggttttttttagagttgttttggtattttcgggtgggagtgggggattgttttgttttatatatttttaggaggtttggttgaattttagatttgagtcgagggtgggataattgttttttgcgggggatgttttttttagaggtgtgggttggttttagggaatttgggattttgagggtttttgggtaggaaggaggttaaggtttttttttggttagagtgtttagttttagttttggggtagtggggaagaggttgtttaacgttggggtggggttttggtagggaagatggcgtcgaattgggagagggaggaaagagattagtttggtgattttggggtagggtaggagggggagttttttattgtgtgttttttttttaggaggatgaagaagtttttaatttaaaggagggtggcgttagaaagttttagggaagagttttaggataggatgaggtttcgtagtagtagatttgtttcgtagttttttattttttatttttttaaagatttttatttgaatttcgttttttttaaattttttttgagttttttatttgattgttttagtttttttgaatttttagttaattttttggttttttttaagcgtttttttcgtatttttttgattatagtagttggtggtatagtgtgcgtatttgtgggtaggagttagtgaaggtttttttttttttttttaaagttttaggttttacggtttgttattcgtaaaattttaattacgagggggcgtttttttgttcgtcgtttcgtagggagattcggtttaggtcgttggagtttcgagttttagggtttttgtgatggaagggcgggcgcggtttttatatttggttttttagttttatttaaggaggattgttagatagtttcgttttgaggtgtaggaggtcgggtcgtttcggttattttgaatttattcgaagttagagggttcgagttcggggggcggtcgggtgtttatttttagagtttgtttagcgttttgttgagtttagcgttgtgtaggtgcgggtattggttcgcgagttttttgcgcgttgtttgagtttatattatgaaggcgtttatgggtcgtttgacgtgcggtttgtttttgttggcgtcgttgacgcgtacgggtatgggtattagcgtttagtcgtagtcgttgagtatttggttgacggtttcgcggatgtatacggggaatttgttatcgttcgtttcgtcgttttgttgtttttttttgattttgtttagttcgtttggtttcgggttggttcgtaggttcgattcgtcgtcgtcgtcgtcgggttttagcgagggcgcgtttttcggggataggtagcggggttttttcgagtttacggggtttagttttattttcgataggttttgttttttcgttatgtcgttttcggtcgtcgtcgtcgtcgtttcggtcgtttttttcgggttagtcgtcggggttttcgtaaagagtttaacgtttatttggatggaaggagggcgcgatggagcggtcgcgcgcgtagtttcgagggcggttcgagataggacgtgggtatagtttcgaggtggcggttttttttgttttagttaaatttatttggtttttggggtttacgtatatgttagattttaggtgggtgcgtttcgtttttgtgtttttttattatttggttttaatcgttttttggtgtgggtggttttttttttagtttttttttttgggtggaggtttgttgatgataaggaagaaaaaaacggagtttttattttgttttaatttcggtttttggaattttttatttttttttttatttttttttttttttttagtttgttttaacggggtttagaggagagttaggtggggggtaagggcggggtgtcgtttttttttattttatagtagggttttaggtttgggcgggttagggaggagtaggttgcgtatttattttttcggattttttttttagtttggggttcgtttttaggaagtggaaaatcgtgttttaaggtgtgcggtttagttcggggttgggaggtgacgttggtgggttgggagggaggggt

SEQ ID NO: 1816 - DNA, 2500 bp, Artificial Sequence
  chemically treated genomic DNA (Homo sapiens)
gttttttttttttagtttattagcgttattttttagtttcgagttggatcgtatattttgggatacggttttttattttttaaggacgagttttagattggaggagaggttcgaggaggtgagtgcgtagtttgtttttttttggttcgtttaggtttgggattttgttgtgaggtggagagaggcgatatttcgtttttgttttttatttggtttttttttaaatttcgttggggtaggttgagggaagaaggaaaggtgagagaaaaggtgggaaattttaggggtcgggattagagtaaaataaaggtttcgttttttttttttttattattaataaatttttatttaaaaaaggaggttaaaaaaaaagttatttatattaagagacggttgggattaggtggtgggaagatatagaggcgggacgtatttatttagagtttggtatgtgcgtgggttttaggggttagatgggtttagttggagtaggaagggtcgttatttcggggttgtgtttacgttttgtttcgggtcgttttcggggttgcgcgcgcggtcgttttatcgcgttttttttttatttaggtgggcgttggattttttgcgaggatttcggcggttggttcgggggaggcggtcgaggcggcggcggcggcggtcgggggcgatatggcggaggagtaggatttatcggaggtggagttgagtttcgtgggttcggaggagtttcgttgtttgttttcggggagcgcgttttcgttagggttcgacggcggcggcggcggatcgggtttgcgagttagttcggggttaggcgagttgggtaaggttaagaaggagtagtaggacggcgaggcggacgatgataagtttttcgtgtgtattcgcgaggtcgttagttaggtgtttagcggttacgattggacgttggtgtttatgttcgtgcgcgttaacggcgttagtaaaagtaagtcgtacgttaagcggtttatgaacgtttttatggtgtgggtttaggtagcgcgtaggaagttcgcggattagtattcgtatttgtataacgttgagtttagtaagacgttgggtaagttttggaggtgagtattcgatcgtttttcgggttcgggttttttagtttcgggtggatttagggtagtcgaggcggttcggttttttgtattttagagcgggattgtttggtagttttttttggatagggttggaagattaggtgtgggggtcgcgttcgtttttttattataaggattttggaattcggaattttagcggtttaggtcgggtttttttacggggcggcgggtaggaaggcgttttttcgtggttggaattttgcgggtggtagatcgtggggtttggggttttggagggagggaaggaggtttttattaatttttgtttatagatacgtatattatgttattagttgttgtggttaggaggatacgagggaaacgtttggaaagaattaaagggttggttggagatttagggaaattgaggtagttagatggagaatttaggggaggtttaaagaaaacggaatttagatgagagtttttggaagagtgagggatgaagaattgcgggataaatttgttgttgcgggattttattttattttagggtttttttttgggattttttgacgttatttttttttgagttgggggtttttttatttttttagggagaggatatatagtaaggggtttttttttttgttttgttttagagttattaagttgatttttttttttttttttttagttcggcgttattttttttgttagggttttattttaacgttgagtaattttttttttattgttttagagttggagttgagtattttggttagaaggaaattttggttttttttttgtttaggggtttttagagttttaggttttttgggattagtttatatttttaggaaaaatatttttcgtagggagtaattattttattttcgatttaggtttggggtttagttaggttttttggggatgtgtggaataagatagttttttatttttattcgggagtgttagagtagttttgaaagagattagggattttaggagatgtgagtcggtagtagttatttgattttcgttagattgattaagagataggtttagaaaggtaaaggaattataaaggttatatagaagttggtagtagagttagggttagaatttaggatttttatattttttgtttagaggattttttttgattttggtgatagtggtggattatttatattttgaggagtggttaggaggttggggggaagtaagaagatgagaataagagtgaggagtatttgggttttagaaaattagggttttgttagaggagttcggttttttttcgttgtttttttttttgttagttatagttgggtagagattgggtttagaggtttagagtggtagaaggtgtaggaggatttttaagagattaaaagatt

SEQ ID NO: 1817 - DNA, 2402 bp, Artificial Sequence
  chemically treated genomic DNA (Homo sapiens)
ttttgtttttcggtttggttttcgaagattttagaagaattcggaatttgtttttattcggaatttagggattattttttgtatttagtaggtttttgtttttttgcgtggaaagcggttgggtgagttttggtatcggggttattatatttgagtgttgggggttacggagggaggggtttagatattatttgggaaggattttagagtgtagttttagtttaggttattcggggaagggagtcggtaaagtgggattttgagtttttacggttttttcggttgtttttgtttagaggttgttcggcgttttttttttttgttttattgaggagttgtcgtttttgaattttagttaattttttcgtttttaggtgaagaaattgaggttttggggttaggaaggggtttgtttaggttgttgatttttttgggtagtatcgagtttaggttttttttgtaattatgtattaggattagagagggtagggggtttgtttaacgttatatagtttgagtgaggaggagttggtttgggatttaggttttttgacgtttaggttaggttttttcgttttttttggttatggtttttagtttggatattaaggggttgggagttagttgtgtttttattatttttatgttatagggtaggatggagtttggtatttttcgttttaggttggttgttggtgtgatatgggtggttttagtcgagtgaatgttttcgttttttatagtttagggggttttttgttttggttattaatttttgttatgtgatttttttattttaatgtttgattgagtttgaaaatattgagaagatttaggggttgaaaagggaggaagagggaggttagaaggcgttagtcgagttagcgaagtttttataggagaggaagtgggttaggggaataggaaggagggttgggttggtttttgggtttgtttttgtttcgggtatgtggtgagtttagttttttgtttgtaatgaggaggaggaagatgaatagtgtttttgttaattttggttttttcggtttatgggatgggagatgttattattttacgtatttattttagttagttttatataggtcgatcggggaggttttttttgagtttaatttgataagttttgaggagtgagttgtatttattttgttttgtttgggatagggtggggggtttttgggtagggggttgggggttgtaggagtacggtgggcggtcgttttgtatttgtttgaggaaggattatttttttcgttaagtttttgtttggttgtgttcgtttttagtttttgtgtttttttttaattcgttatttcgtaagggttggtttaagggtttttttttatagggttcgtattttttgtttaggttggtatgttgacgtgtttttagaatttggtttttattttttttttgtgtttttaggtttagagaaaatgaggggtttagtgagtttggggttttttagatcgtgacgtttttttttgttttttttgtgtaggtttgggaggcgatggagtcggagtttttgtacgatttgttgtagttttttaagggggtggagtttttagcggaggaggagtttttaaaaggtgtgtgtttacgtaggtttgagggtggagggtgaaggtttgtgtggtaagagtgagtttggttatgtttgggatttgtagtatttttttagttgttagttgagcgtttaattttgtttatttttgtttttattttttgttttatgtttgatttaatttttttttttgggattttttatagagttagaattttttttttttagatgagagacggtgtggattacgatggtgaatattgattgtttttattttgtgagttttttgagtgtttttattgtattagtattttttattaatagtaatttatttatttttaagggcgggtattagtgtttgttttatatagatgaggaaattgaggtataaggggtgacgtgttatagtaataggaaatttttagtaagtggtggatttgggttttgagtttaaggagggtggttttagaattgaggttttatacggattacgtagcgatgtttattatggagtgatattttgtagggtgtggggtttttgacgtgttttttttatacgtgtgggttttttttaaaagtggggtgagtataggatggagtaatttaacgattataggtcgtttttttagtaaagttttgtgttatgagttttttggggggttggcggttatagtttttgtaattttttttttaggagatggtttaaaagaaggatatgggtaggtatttagagttgttattttttttgtgttttttgaaagaaataaatgaataatagtttgtaaggaagtagcgagatgttttagtggggaag

SEQ ID NO: 1818 - DNA, 2402 bp, Artificial Sequence
  chemically treated genomic DNA (Homo sapiens)
tttttttattgggatatttcgttgtttttttgtaagttgttgtttatttgttttttttagagaatatagagagggtgatagttttgggtatttgtttatgttttttttttgagttattttttagaagggaggttgtaggaattgtggtcgttaattttttaaagggtttatgatatagagttttattgaaagggcgatttatagtcgttgaattgttttattttatgtttattttatttttgaaagggatttatacgtgtgaggggagtacgttaggagttttatattttgtaaagtattattttatggtgggtatcgttgcgtggttcgtgtggaattttagttttgggattattttttttgggtttagaatttaggtttattatttgttaagagttttttgttattgtggtacgttattttttgtgttttagtttttttatttgtataaagtaggtattgatgttcgtttttgagaataaatgagttgttattggtaagaggtgttggtgtagtaggggtatttagaaggtttataggatgagagtaattagtatttattatcgtaatttatatcgttttttatttggagagaagaggttttagttttgtagaaggttttaggaggaggagttaggttaagtataaagtagaaggtggaggtaggggtgagtagaattgggcgtttagttgatagttgggaaggtgttgtaagttttaggtatggttaggtttatttttgttatatagatttttattttttatttttagatttgcgtgggtatatattttttgagagtttttttttcgttgggggttttatttttttggggagttgtagtaggtcgtataagaatttcggttttatcgttttttaagtttgtatagaggaggtaggagagggcgttacggtttgagaagttttaaatttattgagttttttattttttttagatttggaggtatagaaggagggtagaagttaggttttggggatacgttagtatgttagtttaggtagggggtacgggttttgtgagaaagagtttttgagttaatttttgcggggtgacgggttagaaaaaggtatagaagttgagggcgggtatagttaagtaaaggtttggcggaggaagtggtttttttttaggtaggtgtagagcggtcgtttatcgtgtttttgtagtttttagttttttatttagggattttttattttattttagataggataaagtaggtatagtttattttttagagtttgttaggttgagtttaagggaaattttttcggtcggtttgtgtggggttggttgaggtggatacgtggaatggtgatattttttattttataaatcggaagggttagggttgatagaggtattgtttattttttttttttttattataggtagaaggttgggtttattatatgttcgggataggggtagatttagaggttagtttagtttttttttttgtttttttggtttatttttttttttgtgaaggtttcgttggttcggttggcgttttttggtttttttttttttttttttttagtttttgggtttttttagtgtttttaaatttaattagatattgaggtaggggagttatatggtagaagttggtggttagagtagggagttttttgagttgtgggagacggaggtatttattcgattggagttatttatgttatattagtagttagtttggggcgggggatgttagattttattttgttttgtagtatggaggtggtggggatataattgatttttagttttttaatatttaagttgagggttatggttagagaaaacgaaagagtttggtttgggcgttaggaagtttgggttttaggttagtttttttttatttaggttgtgtgacgttgggtaaattttttgttttttttggttttgatgtatggttataaggagggtttggattcgatgttgtttaaagggattagtagtttgggtaagtttttttttggttttagggttttagtttttttatttggagacggaggggttggttgaagtttagaggcggtaattttttagtagaatagggagggaggacgtcgagtagtttttgagtaggggtagtcggaggggtcgtggggatttaaggttttattttatcgattttttttttcgggtggtttgggttgggattgtattttgggattttttttaggtggtgtttgggttttttttttcgtgatttttaatatttaagtatggtggtttcgatgttagaatttatttaatcgttttttacgtaggaaaataaaggtttattgagtgtaaagggtggtttttggatttcgaatggaagtaagtttcgggtttttttggggttttcggggattaggtcgggaggtagga

SEQ ID NO: 1819 - DNA, 2439 bp, Artificial Sequence
  chemically treated genomic DNA (Homo sapiens)
gagatgtagtaggaggtatagttttatttgttgttggagggagttaggtgagatttttttatatagggagtaggcggaatagtagcgtgggaagggggttggtattggagttagtcggattcggtttaaatttaggttgtgtcgttttttggttttgtgattttgagtaagtttttttattaatttgagttttagagtttgtatttgtaaatgagggtttggcgtatggtgttttggtgaggattagaagatatgatgtttaatttatgtgttttttgataataatattaataatggttattgatgatataagttgtgagtagtgtgttagggattgtatatgtttgaaattgtgttttaaatttatcgggttaggtacggtggtttacgtttgtaattttagtattttgggaggtcgaggcgggtagattatttgaggttaggagttcgagattagtcgggttaatatggtgaaattttatttttattaaaaatataaaaattagttgggtgtggtggtacgagtttgtaattttagttattcgggaagttgaggtaggagaatcgttggaattcgggaggtagaggttgtaaggagtcgagattatattattgtattttagtttgggtaataagggtgagattttattttaaaaaaaaaaaaaaaaaaaataatttattaaatttttataatttagtgttttttggtttcggttttatcgatgttttaggttaggtaattttttgttggggattgttttgtgttttgtagggcgtttgatagtatttttggtttttatatattagatgttaataaatttttattaattgtgataattagaaatattttttagatatggttagatgtttttagggggttagaattattttttattgagaattatagttataatttaatgaagtaggtatatcgagtattaaaaggatttatttacgttaaagagttagtaatggtggttttgggatataggttggttggttattatattgtaaaagttgtttttttttttgttttttcgatttatttttttagggtttatcgttagttgtaggttacggttgcgaagtatagtcgagtttttttttttattgagttgtgttaggcgtatggcgattatgtagtttttatttttgagtcgtagtagttttaggttgttcgttttttagttttttcgtagtcgttgatagcgtttttgagtttgttgttggtttcgtagtcgttgttttagttttgttcgttttttttcgagtattcggtttcgggtttgtagttgttgttttcgttgtagttggtttttgcgagtttttcgtagtcgtcgtatttttgttattaagaattgggttaggtttttaggtttttttttatttgttaggatagaataggggatagaataggtagtttaggtaagtaaaatttaggagataatatattgtgttaaaaaatttaaattataaaaatattagagggaaattttggaatatatttgtagaattgggagtaggggaggtttttttaaataatatataaaatttaggagttataagagaaaaaagatggataaatttatataaaaatgtttaaatttttgaaaaatgaaagatgtaataaagttaataagtaatagagtgggagaaaatataataagaatttagagtcgtaatatataaagagtttttataaattaataagattaataattaaataaaaatatggataaaaattattaataggtaagttttaaaataaaaatagttaataaatataggaaaatatgtattaatttattaataataattatagtagttattaatatttgttaattttattttttgtgttagatatattttaatttttatgataatattgtaaggtaggtattattattgtatttattttaaagatagaaaaattgaagtatagagtagttatttatttaaggtttaataattagtaatttgtgaattgtattatttaatgaaatataaatttaaaataataatattattttttatatattagaatggtaaaaacgtttaaatatgatttttaggatttaaatgggtttttatatatttttggtaggaggtatgttgatttaatagttaaaatatatagattttttgagaaattttttttagaattttttcgtttgagatatatttgtataaagacgtatatataaggatgttttcgtatcgttgtaataatataaaattggaaatttaggtatttattaattggaaatgggttaaatgaattatgttttaattttattaatgaatagtatgtagttatttaaaataagtgtatgtaatagaggtgaaagaattattaaaattagttgttttaagaaaaagtaaaatatatacgtaggcgtgtgtgcgtgtgtgtatgtgtttgtgttttttatataaaaa

SEQ ID NO: 1820 - DNA, 2439 bp, Artificial Sequence
  chemically treated genomic DNA (Homo sapiens)
tttttatataaaaaatataaatatatatatatacgtatatacgtttacgtgtgtattttgtttttttttagaataattgattttagtgatttttttatttttgttatatatatttgttttaagtgattgtatattgtttattagtgaagttaggatataatttatttaatttatttttagttgatggatatttaggtttttagttttgtattattataacgatacgggaatatttttgtatgtgcgtttttgtgtaaatgtgttttaggcgaagaggttttgagaagaattttttaaagagtttgtgtattttaattgttaaattaatatattttttattaggaatgtgtaagggtttatttgaattttggggattatgtttaaacgtttttattattttgatatgtaaaaaataatgttattgttttaagtttatattttattgagtgatatagtttataggttattagttattaaattttgggtaaataattgttttgtgttttagtttttttgtttttaagatgggtataataatagtatttattttatagtgttgttataaagattaagatatatttagtataaagaatgaagttaataaatattagtagttattgtaattattgttgataggttggtgtatatttttttgtatttattaattatttttattttgggatttgtttattgatagtttttgtttatatttttatttggttgttgattttattgatttgtaggagttttttatatattacggttttgagtttttgttatatttttttttattttgttgtttattaattttgttatattttttattttttaaaggtttaaatatttttatatggatttgtttatttttttttttttataatttttggattttgtgtgttgtttaggaagattttttttgtttttaattttataaatatattttagaatttttttttagtgtttttatggtttgagttttttgatatagtatgttattttttggattttatttgtttgagttgtttattttgttttttgttttgttttggtagatgaggaggggtttgagggtttgatttaatttttgatgatagaggtgcgacggttgcgggaagttcgtaagagttagttgtagcgggagtagtaattgtaggttcggggtcgggtgttcgaggaggagcgggtagggttggagtagcggttgcgggattagtagtaggtttaggagcgttgttaacggttgcgggaggattgggaggcgggtagtttggagttgttgcggtttaaggatgagaattatatgatcgttatgcgtttggtatagtttagtgaggagaagaattcggttgtatttcgtagtcgtgatttgtagttggcggtaggttttggggagatgggtcggggaggtaagggaaggggtagtttttgtaatgtagtagttagttagtttgtgttttagagttattattgttggttttttgacgtggataagtttttttagtgttcggtgtatttattttattgggttatgattgtggtttttaatggggggtgattttgattttttagaaatatttggttatgtttaggaaatatttttggttgttataattagtggggatttattggtatttggtgtgtagaggttagggatgttgttaaacgttttgtagggtataggatagtttttagtaaagaattatttagtttaaaatatcggtagggtcggggttaagaaatattgggttatgaggatttgataagttgttttttttttttttttttttgagatggagttttatttttgttgtttaggttggagtgtagtggtgtgatttcggttttttgtagtttttgtttttcgggttttagcgatttttttgttttagtttttcgggtagttgggattataggttcgtgttattatatttagttaatttttgtatttttagtagagatggggttttattatgttgattcggttggtttcgaatttttgattttaggtgatttgttcgtttcggttttttaaagtgttgggattataggcgtgagttatcgtatttggttcggtgagtttaagatatagttttaaatatgtatagtttttagtatattgtttataatttgtgttattagtagttattgttgatattattattaagagatatataggttaaatattatgttttttaatttttattaaagtattatacgttaagtttttatttgtaaatatagattttgagatttagattagtgaaaggatttgtttaaggttatagagttaggaagcggtatagtttggatttgaatcgggttcggttggttttagtgttagttttttttttacgttgttgtttcgtttattttttgtgtggggaagttttatttgattttttttagtagtaagtgaggttgtgttttttattgtatttt

SEQ ID NO: 1821 - DNA, 2451 bp, Artificial Sequence
  chemically treated genomic DNA (Homo sapiens)
ttgaggttgggagttcgagattagattgattaacgtggagaaattttgtttttattaaaaatataaaattagttgggtgtggtgggatatgtttgtaattttagttattcgggaggttgaagtaggagaatagtttgaatttgggaggtggaggttgtggtgagtcgagatcgtgttattgtattttagtttgggtaaaaagagtaaaatttcgttttaaaaaaaatttagttaggtatggtggcgtgtatttgtaattttagttattcgggaggttgaggtaggagaattgtttgaatttaggaggcgtaggttgtagtgagttacgattgtgttattgtattttagtttgggtgatagagcgagattttattttaaaaaataaaataaaataaaattatattgattttatatcggttttttattttatgtttattattttgtaagttttgatataaagataagttttgttttcgttttgttaggatttttatttttgaatgtttaagtatgttttggaagtttttaggggtaggaaagggtttggaaatagatttttttttgtgtaatttttgttttagggtagatagattttttttattagaagttttttttagttttaatttaggtttgtgatgtagtagggcgcgttattatttgttagagttatggtggttcggggtgtttagtttaggtttttttagttattgttttatgtaagttattgttttgtgtttttttagggaggggttggagataggtttgaggaggaggcgttatttacggagaaattaattaaagttttgtttaggaagtttagagattttttgtttttttagcggtgagttttggtttgttgttttttcggttttattttttttggttggtagtagtgatttggtttttagggtggtgtggagtaggtgtagggttcggagtagttttttgtttgtttagtgattttttgtttttttttattgtttcgttttgttttatttatttttgatagtgtttgatttttagtgtttttcgtgtttgggtgaagggtttgtgtttttgagttgagttgttggtaggtattttggaggtagagtaggttaattttggtatgaatttggcggttttggtattcgtaatttgttttgatatttttttcgtgagttaggtggtgagttattttataatgtaattttaaattgaggttttttgtttttttttaggatttttttttttatagtattattatatgtatatagtcgtaaaaaggttaagaggaaatattttcgacgggtttaggattttaaaaagtttttaagggtttttcgtattagtaaggtttagcgtcgtcgttttataggtaaagtacggtatagcggggagtgagatcgagaacgaagcggtgttttagtttaggttgcggggatttgtttttgtttagtttggttgtttttgtagtttagtttgtatttaggtaatgattgtatagtttaaggttgggaagttaggatttttttggtttggggttagttgtttttgtttggggttagttgtttttgtttggggtttgaattttcgaaggagtaggtagttgagagtaggttttttttaggaagagtttttagagttacgtgggggtatttttttaaatgtgtattttatttggtatttattagatttgtgcgtttgtgatttgtttgtttttgatattacgtataagggtaggtttttggggtggtggaaatggttagggtttatgggtttgtttttagtagttagttttgtggttgtaataaagtatagttttttttgtgttaagattttaattagggttaaggattagtgtgttcgttgttagaatttagagtttatttgttgttttgaaaagtaggtttttgaggttagtgggggagtagtgttttttatgttttttatcgaggagtttttgtgtttgttttttgttttcggttttaggagtttttttaattgatattgaagtggtggaagtagttgagtgttaggttattttttattattatattggggtagcgtttttaggtttttagtagtttttaggtgggttttaacgtggaaggattaattaattttttttaaagtagttgtagtcgggtttggtggtttacgtttgtaattttagtattttgggaggtttaggcgggtagattatttaaggtcgggagttcgagattagtttggttaatatggtgaaattttgtttttattaaaaatgtaaaaattagttaggtgtggtggtatacgcgtgtaattttagttatttgggaggttgaggtggaagaattatttgaattttggaggcggaggttgtagtgagtcgagattacgttattgtattttagtttgggtaacgttgtgattttgttttaaaaaaaaattaaaaaataaagtagttgtattttgattcgtataaaagta

SEQ ID NO: 1822 - DNA, 2451 bp, Artificial Sequence
  chemically treated genomic DNA (Homo sapiens)
tatttttgtacgagttaagatgtaattgttttattttttagtttttttttgagataaggttataacgttgtttaggttggagtgtaatggcgtgatttcggtttattgtagttttcgtttttagggtttaagtgatttttttattttagttttttaagtagttgggattatacgcgtgtgttattatatttggttaatttttgtatttttagtagagatagggttttattatgttggttaggttggtttcgagttttcgattttaagtgatttgttcgtttgggttttttaaagtgttgggattataggcgtgagttattaagttcggttgtaattgttttagaaagaattaattaatttttttacgttgggatttatttgggagttgttggaagtttggggacgttgttttagtgtggtgatgggggatgatttggtatttaattgtttttattattttagtgttagttgaggagatttttggggtcgaggataagggataggtatagaggtttttcggtgaagggtatggggggtattgtttttttattggttttaggagtttgttttttagagtagtaggtgggttttggattttagtaacggatatattgatttttaattttggttaggattttaatatagggagaattgtattttattgtagttatagggttaattgttggagatagatttatgggttttggttatttttattattttaaaaatttgtttttgtgcgtggtattaaggataaataaattataagcgtataaatttgatgagtgttaggtggggtgtatatttgggaagatgtttttacgtggttttgaaggttttttttgggggaggtttgtttttagttgtttgttttttcgggaatttaaattttaggtaaaggtagttgattttaggtaaaggtagttggttttaggttagagaggttttggttttttaattttgagttgtgtagttattatttaggtgtaggttgggttatagggatagttaagttgagtaaggataggttttcgtagtttagattggggtatcgtttcgttttcggttttatttttcgttgtgtcgtgttttgtttgtgagacggcggcgttgggttttgttggtacgaggggtttttgggggttttttggagttttgggttcgtcggggatgtttttttttgatttttttgcggttgtgtgtatgtagtgatgttgtgagggaggagattttaggggagggtagaaagttttagtttaagattgtattgtggggtgatttattatttggtttacggaggggatgttaggataggttgcgaatgttaggatcgttaagtttatgttagagttggtttgttttatttttagagtgtttgttagtaatttagtttagagatataggttttttatttaggtacgaaaagtattggaggttagatattattaggggtgggtgggataggacggggtaatgaggagaggtagaggattattggataggtagagggttgtttcgggttttatatttgttttatattattttaagggttaggttattattgttagttaggaggggtgggatcggggaggtagtaggttaagatttatcgttgagagagtagggggtttttggattttttgggtaaggttttggttggttttttcgtggatgacgttttttttttagatttgtttttagtttttttttaaagaggtataagataatgatttatatggagtagtagttggggggatttgggttgggtatttcgagttattatggttttggtaagtggtggcgcgttttgttgtattataggtttgggttgggattagagaaggtttttgatggaagaagtttatttgttttaaagtaaggattatataggggaaggtttgtttttaaatttttttttgtttttagaagtttttaggatatatttaaatatttaggaatgaaaattttagtaaaacggggataagatttgtttttgtattagaatttgtagaatagtgagtataaaatgaaagatcggtgtgagattagtatggttttgttttgttttgttttttgagatggagtttcgttttgttatttaggttggagtgtagtggtataatcgtggtttattgtaatttgcgttttttgagtttaagtaatttttttgttttagtttttcgagtagttgggattataggtgtacgttattatgtttggttaagttttttttgagacggagttttgttttttttgtttaggttggagtgtaatggtacgatttcggtttattataatttttattttttaggtttaagttatttttttgttttagtttttcgagtagttgggattataggtatgttttattatatttagttaattttgtatttttagtagagatagggtttttttacgttggttagtttggtttcgaatttttaattttag

SEQ ID NO: 1823 - DNA, 2384 bp, Artificial Sequence
  chemically treated genomic DNA (Homo sapiens)
ggggtttttggaattatttaattgtagtttttatttttatatttagttttttaggaggttttgttaggtttgtttttaaaaacggtcgttttaggtttttatagtttttttgtagtagtgagtaaatagtgaaatagtattttttagtttagaggttattatggttttttttttgtcgagtttagagtagtgttttgtggtaatgtattgagggttattttttattttttttgtgataagggttattgtcgtgtgtatttttaggttatttcgagttaaattagtgatgattaattttttttttattttatttttttttgtggtttatttgtttggatatttttttaaattttatcgtttgagtttattgtttttattacgttttgatggtgcgttaggttttttttaatatgtttttatgtttattagggatttatggttatttggaagaaggcgtgtggagagattcggaaggttagttttagtaggttttcgtggatgtatcggtttttagttatatgttttaggggtaggtttttttggttaggagtttttttgtgggcgaaggtgtaggttttttagtgttatagtttttgtagggatttgtttcgttttattcgggttttttatcgttgttttttttttacgaagtagaggtaggttattttattggttttgtttggttttgttgtgaagtgttgcgttagggaggtttttagttttgttagttttttagggtttagtttttggagtaagtggtgaaaagtttttattaggttgtgttgaggtttatttaggttaggtatttttttttagtagggttttcgttgagatttgggggtggaagtaggtaatggttatggtttggtggcggcggttggtgcgtatagttagttgtttttagtggtttgtgtacgtttttgggtcgtatgtcgagtatggagtggatttgtgggaattacgagttggtttaagtgtttataattgggtaagtagtttttttgtttttttttttggttatatttttttttatttggttgaaatggtaggtattttagaattttcggggtaggattattattttttgtttttatatcgtataggatttttcgggagtttcgttataggtttttatcggatgaatttttggaaggtttttattatttgtttggtggtttcggggatgtgtacggtgttaaacggggttgttatagtatacgtttcgtttttgtatttgtcgagtcgatagtttacggtgttattttttttatttatttcgacgttaattagaaatttatatttattacgatatttagtttgtagggagagagagttgtattttattttggttgtttagcgtttgggtttggaaattttgatttttttataggggttggtagttaaataagaggaatagttgataattatgtgatgttattagaagaaaatataaagtagggagattaataggaagggtgagtaaaagtaaagttttttaaaatttaggataggggtttgtggttatcgaagtttagtttgatttgttggggtgatggtttgattttttttagcgggtagtaggttttgttgtgtttgtgtttttgttcgagtagttagggtagtaaggtacggttggtgttttcgatttttttgtaagaggagtagatcggtggttggattttatttattgttttcgatttatgttaggttattttttaaatgtttaggtttttgattttttttttgggatgttattgtgtttattgtgacgtgggtgttttgttggttagtttttaaaggggtcgttagattttgtgttgggttttttaattggtgtatggataggttgaggaagtataggtcgggtagagttttggttaagaggggcgttttgcgtttatatttatttggtaagtttttgtagtatttgttcgtattttagttgttttcgtttaagttgtttagtatagggtattgtttatagaggggttattacgtcggttattcgtgttattggtggtttatttttatttttttgtcgtttttttttggttatggggtcggttttgggtcgggttaggcgtatattgagtgggcggtttttttagagggtattatgtaaaacgcgtagggttttgtttttttttgtagcgttgcggaatgttataaaggcgtagggtggttgtttaaagagtttggttttgtggggttgtagattaaagcggtttaggaagcgtcggacgtcgttgaagttggcgtggcgaggtacgttttgtagttttagtttaaagattttagaggtaaataagttatttttgatgtagttgtagagttcgggttgaggtttcggttttgtagtcgttttagcgttttttttttttatt

SEQ ID NO: 1824 - DNA, 2384 bp, Artificial Sequence
  chemically treated genomic DNA (Homo sapiens)
ggtggagaaagagggcgttggggcggttatagggtcggggttttagttcgggttttatagttatattagggatgatttgtttatttttgagatttttaaattggagttgtagaacgtgtttcgttacgttagttttagcgacgttcggcgttttttgggtcgttttggtttgtagttttataaaattaaattttttgggtaattattttgcgtttttgtgatatttcgtagcgttgtagagagggataaggttttgcgcgttttgtatggtgttttttggaaaggtcgtttatttagtgtgcgtttggttcggtttaaggtcgattttatggttaggaggaggcgataggagggtgagagtgagttattagtaatacgagtggtcgacgtggtgatttttttatggatagtgttttatgttgagtagtttgagcggaagtagttggagtgcgagtaggtgttgtagaaatttgttaagtgagtgtgggcgtaagacgttttttttggttagggttttgttcggtttgtgtttttttagtttgtttatgtattagttgggaggtttagtataggatttggcggtttttttgggagttagttagtaagatatttacgttatagtgggtataatgatattttaaaggaggggttaggagtttggatatttggggagtggtttggtatgggtcgggggtagtaggtggagtttaattatcgatttgttttttttatagggaaatcgggagtattaatcgtgttttgttgttttggttgttcgagtagaggtataagtataataaggtttgttgttcgttggagggggttaggttattattttagtaggttagattagatttcggtggttataaatttttattttgggttttgaaaaattttgtttttgtttattttttttgttgatttttttgttttgtgtttttttttggtaatattatatagttgttagttgttttttttgtttgattgttagtttttgtggggaaattagggtttttaggtttaagcgttgggtagttagggtaaggtgtagttttttttttttgtagattgagtatcgtaataagtgtgagtttttggttggcgtcggggtggatggggaggataatatcgtgggttgtcggttcggtaagtataagggcgggacgtgtgttgtggtagtttcgtttgatatcgtgtatattttcgaagttattaagtaggtggtgaaggttttttaggagtttattcggtgaggatttgtgacggggttttcgggaagttttatgcggtgtgggagtagagggtggtgattttgtttcgggaattttggagtgtttgttattttagttagatgaaggaaggtgtggttagaggagagagtagggggattgtttgtttagttgtgggtatttgggttagttcgtgatttttataggtttattttatattcggtatacgatttagagacgtatataggttattggaagtagttgattgtgcgtattagtcgtcgttattaggttatggttattgtttatttttatttttaggttttaacgggggttttgttgggggagggtgtttagtttaggtgggttttagtatagtttgatgggaattttttattatttattttagaagttgagttttgaggagttggtagagttgaagatttttttagcgtagtattttatagtagggttaggtagggttagtggagtgatttgtttttatttcgtggaggagggatagcggtaaggagttcgagtggggcggggtaggtttttgtagggattgtgatattgaaggatttgtattttcgtttatagaaagatttttagttaggagggtttgtttttggagtatgtggttggggatcggtgtatttacgaggatttgttagggttgatttttcggatttttttatacgtttttttttaggtagttatgagtttttggtgggtatggggatatgttgagggaggtttgacgtattattaggacgtgatgggaatagtgggtttaggcggtgagatttgggggagtatttaggtaggtgagttataggggagggtgaagtaagaaagaggttggttattattgatttgattcgggataatttagaggtatatacggtagtggtttttgttatagggaggatgaggagtggtttttagtgtattattatagggtattgttttgggttcggtaggagggaggttatggtggtttttgggttgggaaatattgttttattgtttgtttattgttgtaggaaggttgtggggatttggagcggtcgtttttggagataggtttggtaggattttttggagggttaggtgtgggggtgggagttgtagttgggtgattttaggggtttt

SEQ ID NO: 1825 - DNA, 2499 bp, Artificial Sequence
  chemically treated genomic DNA (Homo sapiens)
gatttttagtttatttttagagtatggacgtttttggttttgttattaaggttttttttttttttaagaggttgtttttttattattttaaattttttttaagataatcgtgagatatagagggtttagaaattaggtaagttttaaatataagtttgtataatattaatattaaatatatattataaataaggtttataaatataaaattgataaaaattgataaaaatcgataaattagttatgtttttttaaggaattggtttcgtagtttttgagattttttttaggagagtaatggtttttgcgtgagaaaattttaggatttattattagggggagtagttagtagcgaggatttaagacgggtttttcggcgttgggaggtgggtttgtttttatagagattttcgtgtatattttttagcgttatttgtattatttgttttgatttatagatttttaatatttattttacgttagggaatttaagtaatcgataggtagtgggggttttgtatagtttttaattttttagttttataaagagaaaataggtttatagaggtaaagtgatttgttttaggttacgtggcgatttcggggttggtttgggatttgagttttattttttggattttcggattagggtttttgggatattttgtcgttgttatagttgtttaaagtgaggttatttagatatttaggtgtttggtttgggatatgatgaggtataggaggttagtttaggttgtgattttttttttagaaatacggaaaggaggaagtttgggggtaacggttttgtaagttatgagagggaaggatcggtaggtttcggggagtaaggtaggggggtagttagttcggttatgagttagtttgtgttattagatttttgaattaatggaaagtcggtttcgcgtggttcgttcggttattttattgggtttggggaatttggggttgaggtgggagcgtaatagtttgattttgttttttagtttggaggaggtagaggggtttgtttagtttttattttttaaagtgtattttttagtggttagtagtagaggggaataggtttggggattcgggagttgttattttgcgatggttttttttatttatagagtatttgtcgtattttttatcggtaaggggtgttttcgaggttatcggggtagttgttttttggttatgagttttttgttttttttggagggtttggttttgcgtatttttttttttagggtttggtgggggttgtgttttcggtttcggttcgggttttttttttatttgttgaagattcgttttattgagtgtatgaagcgatggtagttatgtaggaatttgtagttttttagtttgcgttgaaaagtattcgaggtaggggtgggggtgggcggttgagaggtttttcggttagttttcgtgggtttagtcgtgtttgagttgtttagtagttgggttatgtagtagatgttgtttttgagttcgaggatgttcggtttcgttatttgtagtttttttaagttttcgatgtttagtttagatttttttaaattttgggttttggggaggcgttgttttaagtcggttagtttgtgtaggacgtagtttagtgtggtattgagggtttgtaggaagtttcgtttgtttagtttttttagggtttttttattggggaaggtttcggggcgttttttgtagtgtttttttagtttaggaatatttaggttttggatacgtatttggcgggaataggaggattatagggtgaatgttgaggattcggattatatttatagataagtaagttttgaaatgttagattttatgtattttaatttaattttttattggatagattcggaaattgaggttcgagagggaagaggattttaagattattgtaggtaaggtcggagtgatgttggggggttggtgggatgttcgtggggaatgaagagttttaagagggttggattttgttttgtttattgttacgttttagtgtttagattagagtttggtaggtgtgtaggaaatatattgagtaagtaggtgagtatggtgatggtgttcggagtttcgtttcgggattatagagttaggaaagttggagggttagttttagttttttagggttaaggttggaataatatagcgatttagtttttcgatttggttatatggagtggggttaggtttgttttttttgttttttattttttttttaattttatagttttttgagatttagatgttataagggtttaggtgtttatataggggtttaggagtttgttggtgttttgtatgagatttgtttgtttttggagttggttaaggagtacgcggtattttttcgagtagttgtttatagtcgttatgttcgttatgtttggaaataggagtgtaaggattagatttaaggtagagaagaggggtgttatttgatttggtgaggaaagttatagatgggagttt

SEQ ID NO: 1826 - DNA, 2499 bp, Artificial Sequence
  chemically treated genomic DNA (Homo sapiens)
aggtttttatttgtggttttttttattaagttaggtgatattttttttttttgttttaggtttggtttttgtatttttgtttttaagtatggcgagtatggcggttataggtagttgttcgaaagagtatcgcgtgttttttggttagttttagaagtagatagattttatgtaggatattagtagatttttggatttttatgtaagtatttgggtttttgtggtatttgagttttagagaattatggggttaggaagggagtgagaagtagggaggataggtttagttttattttatatggttaggtcggggaattgagtcgttatgttattttagttttaattttgaggagttaaggttggttttttagtttttttagttttgtggtttcggggcgggatttcggatattattattatgtttatttgtttatttagtgtgttttttgtatatttgttaggttttggtttaggtattgggacgtagtagtgagtaagatagagtttagtttttttgaagttttttattttttacgggtattttattagttttttaatattatttcgattttgtttgtagtgattttggggtttttttttttttcgggttttagttttcggatttgtttagtgggagattggattggggtgtatgaggtttagtattttaaggtttatttgtttgtgagtgtggttcggatttttagtatttattttgtgatttttttgttttcgttagatacgtatttaaggtttggatgtttttaaattgagagagtattgtagggagcgtttcggggttttttttagtgaggagattttgagggggttgggtaggcggggttttttgtagatttttaatgttatattgggttgcgttttgtatagattggtcgatttagagtagcgtttttttaaggtttaggatttggagaggtttgggttgaatatcgaggatttggagaagttgtagatggcgaggtcgaatattttcgggtttaggaataatatttattgtatggtttagttgttggataatttagatacggttgagtttacgaaggttggtcggggggttttttagtcgtttatttttatttttgtttcggatgttttttagcgtaagttggagggttgtaggtttttgtatggttattatcgttttatgtatttagtggggcgggtttttagtaagtggggggagagttcgaatcggagtcggagatatagtttttattaggttttgaggaagggggtgcgtaggattagattttttaggaaaggtaagagatttatgattaggggatagttgtttcggtagtttcgagagtattttttgtcggtgaaggatgcggtaggtgttttgtggatgagaggaattatcgtaggatgatagttttcgggtttttaaatttgtttttttttgttattagttattgagaagtgtattttaagaggtgggagttgggtagatttttttattttttttaggttgggagatagagttaggttgttgcgtttttattttagttttaagttttttaggtttagtggggtggtcgggcgggttacgcgggatcgattttttattgatttaggggtttgatgatataggttgatttatggtcgggttgattgtttttttgttttgtttttcgaggtttgtcggttttttttttttatgatttgtagggtcgttgtttttagattttttttttttcgtgtttttgaaggggaggttatagtttgagttggttttttatgttttattatgttttaaattagatatttggatgtttgggtgattttattttaggtagttgtaatagcggtagggtgttttaggagttttgattcgggggtttagggaatggagtttaggttttaggttagtttcgaagtcgttacgtggtttggggtaggttattttatttttgtggatttgttttttttttgtgaagttagggagttagaggttgtataaggtttttattgtttgtcggttgtttggattttttgacgtaaggtggatattaaaaatttgtaaattaggataggtggtgtaaatggcgttgggaggtgtatacggaggtttttgtaaaagtagatttattttttagcgtcgggaagttcgttttgggttttcgttgttggttgttttttttggtggtggattttggaatttttttacgtaggagttattgtttttttagagggggttttagaaattgcgaggttagttttttggagggatatgattaatttatcgatttttattaatttttattagttttatatttataagttttatttatgatgtatatttaatgttaatattgtgtaaatttatatttaaaatttgtttggtttttaaattttttgtgttttacggttgttttggaaaggatttggggtggtggaagggtagttttttagagagaggagggattttggtggtaaggttaaaagcgtttatgttttggggatgggttggaggtt

SEQ ID NO: 1827 - DNA, 2455 bp, Artificial Sequence
  chemically treated genomic DNA (Homo sapiens)
gttgtttttgtaatgatattatatgaaataatttgaaatacgattttaattgtatttggtgggtttcgttaattttgtaagttatggatagaatatttatttaaattgtagttaagtttaggtttatgggaatacgtgattaatttaggtgaatgaaagggattttaaaatattaatttttagtttaggtttttttaagattgtttgtatgttttttaatattattttagtttgagtgttacgtggattttgaatgcggatttgtgtgtatattgttgaaaaataagtaattgaaaattttaggtagcggggtggagtgatgatgaaagatatcgagatttatcgggaagttggaaatttttttttagtttcggtgtttgggttgtatttcgtttttttatttttttaaattattttcgtggtgcgagtgtgttcgtagtagatgttttttaattgttttttgtatttgtagtaggatgagtagtaaataaaattttttagatatcgagttaaagaaggaaggggtttatttagtcgggggtatcggtaagattttcgttttaagagtcgagtttttcgagtgagtaatttttgtgtttttaattttaagtgggtgcgtgtgagagggtcgtgattgattgagtaagttgggggtaagtgattgggagttgtacgtattgttaagtagatcggaataaaataggatagggattttataatgtttttttatataatgtttgtaatttttagataatataatcgattaggttaggggtcgatttttaattattaggtttagggtgtggcgttgggttgtcggtttgtggattttatttttgttttttagtttttattttttttttttttggtcgtagaaattaggtataagataatatgagaggtggtttttttttttatattgatagtaaaattttaagggtaggaatatttttattttttaatattattttaataattaaattaaaattttttatttgagtgtaagggagtggtgatttttttaagtcgggagtttttttattagggggttttttaagggtatttttgtttttagcgggggagtcgttattttattttgttttgtttagtttgagatacgtaattttttttagtttttatttttcgttgaatttttaaggcggggttggggggatgtttaggtttaggaaggaggttgggggttcggtcgttggacgttgtttatcggtagttcggattagagtaggagttttattattatttgcggggataggtgggatatatgtattttcggggttattttagattttttggaggatgttgattgatattgtttagtttgagaattattgtgttttcggagtagaggtttttttattgtttttgggtagcgggcgtcgggtatagggttttttcggatgagcggggcgggtatgagagtatatggaattgggggcgggaggtcggggtagttaaggaggagaaggaggaggcggagggggagggaggggaggaagaagaggaggaggagttttttgtggttattcggaggggagagatttggttgggaggcgttaatcgagttggtcgttgggattttgtatttaggtgcgttaatttttgggcgtacgtttttcgtagattttcgttgaaggagcggtgggcggcgcgtcgcgattttggcgggttatagattatatcgtttgtagggcgttgttggggcgcgtagagcggggttgttttagggtggtttttttaggttggggcgcggcgggcggcggtcgcgggcgcgcgttttattcgggtttcgagtaatcgttatcgtcgttgttaaagttcgttaatatggtggatttggaggtcgtggtggtcgatgttagttatttgatggttatggagaagagtaaggcgatttcggtcgattacgtttgtaagaggatcgttttgttcgaatttacgtattatttgtttcggttcgcgtcggttttcgacgtcgtcgttttttgcggtcgttagcgattttttgcgttcgggagaatcgggagttgagtcgtcgttgtttcggagcgggtgatatagcggagcgggcgatgcggggtcggttttttggttttagtttttgaaatggggtatcggagggcgggtggggggtatttcgggagagagcgttttaaagtgtttggcgtcgcgttttgcgcgtagttagtattttagtaaggggttggttatgatttggttggattagttttatttttgtcgtttttttttttagttttgtttttttttgttttattttcgtggttttatttgttgtattggtgtggtttttttgggttttttgtttgttattcgtttgcgttttattttggtcgtttttttttttcgggttttgtggtttttttttttaattttatttttttagttttttttgggtcgattatttggggattgtagg

SEQ ID NO: 1828 - DNA, 2455 bp, Artificial Sequence
  chemically treated genomic DNA (Homo sapiens)
tttgtagtttttagataatcggtttagagggagttgaaaggatggagttggaaaggggaattatagagttcgggaagaaggagcgattaggatggagcgtaaacgagtgataggtaaggagtttaaagggattatattaatgtaataggtagaattacggggatgggataggagaggatagggttgggggagggggcgatagggatggaattggtttagttaagttataattagttttttgttggggtgttagttgcgcgtagggcgcggcgttaggtattttggagcgttttttttcggagtgttttttattcgtttttcgatgttttattttagagattggagttaggaggtcggtttcgtatcgttcgtttcgttgtgttattcgtttcgggatagcgacggtttagttttcgattttttcggacgtagggggtcgttggcggtcgtagggggcggcggcgtcggggatcggcgcgggtcggggtaggtggtacgtgggttcgggtaggacggtttttttgtaggcgtggtcggtcggggtcgttttgtttttttttatggttattaggtaattgatatcggttattacggtttttaggtttattatgttggcgagttttggtagcggcggtggcggttattcgggattcggatgggacgcgcgttcgcggtcgtcgttcgtcgcgttttaatttgggggagttattttggggtagtttcgttttgcgcgttttagtagcgttttgtaagcggtgtaatttgtagttcgttagggtcgcggcgcgtcgtttatcgtttttttagcgagggtttgcggggagcgtgcgtttaagggttggcgtatttgggtgtagagttttagcggttagttcggttggcgttttttaattaagtttttttttttcgggtggttataaaggattttttttttttttttttttttttttttttttttttcgtttttttttttttttttttggttgtttcgatttttcgtttttagttttatgtgtttttatgttcgtttcgtttattcggagaagttttgtgttcgacgttcgttatttaagggtaatggggaggtttttgtttcggggatatagtagtttttaaattggatagtgttaattagtattttttaggaggtttaggatggtttcggaaatgtatgtgttttatttgttttcgtaggtggtgatgaaatttttgttttggttcgggttatcggtgaatagcgtttagcggtcgggtttttaattttttttttgagtttgaatatttttttaatttcgttttgagaatttagcgaagagtaaaagttggagaaaattgcgtgttttaggttaagtagagtaaagtggggtgacggttttttcgttaggaatagagatgtttttagggaattttttgatggaagagttttcggtttaagaaggttattatttttttatatttaggtgagaggttttagtttggttgttgaaatggtgttgagaaataagagtatttttgtttttggggttttattgttaatataagggaggagattattttttatattgttttatatttagtttttgcgattaaagaaagaaaaagtaaaaattaaaaggtagaaatgaaatttataagtcgatagtttagcgttatattttgggtttggtagttaaagatcgatttttgatttaatcggttatgttatttagagattataaatattgtatagaaaagtattgtgaaatttttattttgttttgtttcgatttatttagtagtgcgtgtagtttttagttatttatttttagtttgtttaattaattacgatttttttatacgtatttatttagagttgaaggtataggaattgtttattcggggagttcggtttttgagacgggagttttgtcgatgttttcggttgaataaattttttttttttttaattcggtgtttgaggagttttgtttgttgtttattttgttataaatataagagataattagggagtatttgttgcgagtatattcgtattacgggggtgatttagggaagtggaaaagcgagatatagtttaaatatcgaagttgggggggaatttttagtttttcgataggtttcggtgttttttattattattttatttcgttgtttggggtttttagttgtttattttttagtagtgtgtatataagttcgtatttaggatttacgtgatatttaggttggagtggtgttaaggaatatgtaggtagttttaggaagatttaagttggaaattaatgttttaaagttttttttatttatttgaattggttacgtgtttttatgagtttagatttggttataatttgagtaaatgttttgtttataatttatagggttaacgggatttattagatatagttaagatcgtattttagattattttatgtaatgttattgtagaagtagt

SEQ ID NO: 1829 - DNA, 2471 bp, Artificial Sequence
  chemically treated genomic DNA (Homo sapiens)
ggttttatgggtgggttttgagatgtggtatacggtatttagggtagggttgggaagggtggggtgtaggggtttttttggttgtagggtttatttattaggtgtttgggtttgttgtattgagtaggtatgggttttggttttttttattgttttttttaggtttagtttgtgtttagggtttaggatagggtttggttagtaggttttaggtttttaagatgtttttagtttttggagtgtgtgtgatgatgagtatttatggagttttttgtatgttgggttttgggtttttgagagggttatcgggtggcgattgagttacgaggtggagggttagttttagggattttaggtgatttcgtgtcggtattacgttttttttttatgggtagttttgggcgtttttttttggttttgggtttagtggtttgtggtttgatttcgtttatttttgtttggttgttttagtagtagtaggagtttatgttggagaaggtgttatggggtaggtggagggttcggttgatttagatgattttttaagtttttttttaatgaatatttgtttagtgtagttttttttttttaaattttttttatataggtagatatttttttggtttagggtaatttgttgagtttttgtttaaatatagtagttttgttgttttttaaatataattaatttaatttgggatttggggattcgaggtgggtagtattgggttttagatgagtttttattattttagatttatgtaggaagagttaggtagggtggggttttggggttatttggtgggtttagggttagggtatcgcgatgtttttattttttatattacggggttttttggttgtagagttggggatttagttgggaatgttggttatagaggtagagagtttttattttgttgggttagttttgatttggtttttttagggtggtttagtgtttttttttgttttttttttggtttttatcgtttatatttttttatttgtttattttggataataattagtatagtgtagtgtggttttgtagtgatattatttgtagagaggttaggtttagtttttttcgttttttaaaaggttagtaggttttaggagttgggggtggggtttggttgtggggtttttatgttttaggggttagggtagattttttttagtcggtaattattgtagattttttttttggttagtattcggggatttttttgtttttgtttcgtttttttattttgtttgttgagatatagggttttacgggttttttttttggggtcgggttgattgtggtttgcgaggggtagttatcgtgttgggtttttttgttagaggtagaaattataaaattatttggaatatatacgttttaagtgatagatttaatttaattttataaatattgatttcgcgtttaatttattcgttttttagtgttagtttatttttgagaagtttagtttggtagtcgtagattttatttaattttagttttataatgttattagttcgtagtttgggagttgggtttatttaggttttggtaggtggggttagagttgggttttgatttttgtatttatatttattattatgtaaagtgttgggaagaggggtggggagttacggtaagttgagggtttaggtttgttttagttcgttagatgttcgttttggttgttttgatttagtagttaatttttgcggggtattgcggttatatggtgattttagtacggggatatttattagaaatggaattgatggattaaagtggaattaagcgaattgatttttttttttgggtattgaaatgttgcgtttaattaagcgattaatttcgtgggtagggtggttgtggggacggaggtgggggataaggggatggtggttatggtggggattgaaaggtggttatggggatagatgaggtgagttaggtggttttggggtcgagttttagtttagtttttggtaaagaggttttgtgtgtagaagttcgggtgtgatgttttttttttatcgattgtgtgatatcggttagttttgtttcggttgagtttcggtggttttgatgtaattttgtggggtttggtggtagggattgatttatttatttgtttatttatttatgtgtttgatatatattgtagtaaaggaaaggtgagagtagttataggttggttagggacgatttagattttagagtgtagcgtgttcgtttttttttttgtgaggtttagttttggtgtgtgtggatttttaggtattttttaggtttattttttattttgtagtgtttcgtttatttgtttatatattttgttttgtggtttgatcgttatttttttgttttgcggttaattggatggtttaagcggattgagttgggtagggtggttatatttgtggagtttgtggttgtggttggaggtttcgtgggtagttga

SEQ ID NO: 1830 - DNA, 2471 bp, Artificial Sequence
  chemically treated genomic DNA (Homo sapiens)
ttagttgtttacggggtttttaattatagttataggttttataggtatgattattttgtttaatttagttcgtttgggttatttagttggtcgtagagtagaaggatggcgattaaattatagaatagagtatgtggataggtgggcggggtattgtagagtggagggtggatttggagggtgtttgggaatttatatatattaaggttggattttataagaggaggggcgggtacgttatattttgaagtttgaatcgtttttggttagtttgtggttgtttttattttttttttgttgtagtgtgtgttaaatatatgaatgaatgagtaaatgagtgaattagtttttgttattagattttatagggttatattaaggttatcgaggtttagtcgggataggattggtcggtattatataatcggtggggggagggtattatattcggatttttgtatatagggtttttttgttagaggttgggttggagttcgattttagggttatttggtttattttatttgtttttatagttattttttagtttttattatggttattatttttttgttttttattttcgtttttatagttattttgtttacggagttgatcgtttgattaagcgtagtattttagtgtttagggagaaaaattaattcgtttggttttattttaatttattagttttatttttgataaatgttttcgtgttggagttattatgtagtcgtagtgtttcgtagagattagttgttaggttagggtagttagggcgagtatttggcgagttggggtaagtttggatttttaatttgtcgtgattttttatttttttttttagtattttatatggtggtaagtgtgggtatagaggttagagtttagttttggttttatttgttagggtttggatgagtttagtttttaagttgcgagttggtgatattgtggggttgggattaaatgggatttgcggttgttaggttgggttttttaggaatgagttggtattggaggacgagtggattagacgcgaggttaatatttgtggaattgaattgaatttgttatttggggcgtgtatgttttaggtaattttgtggtttttgtttttggtaggaaaatttaatacgatgattgtttttcgtaggttatagttagttcggttttaggagagagattcgtggagttttatgttttagtaggtaaggtagggggacggggtaggggtagggaggttttcgagtgttggttaggggaggaatttgtagtggttgtcggttaaggagggtttgttttggtttttggggtatggaggttttatagttaggttttatttttagtttttgggatttgttggttttttaggagacgggggaggttgggtttgatttttttgtaggtggtgttattgtagggttatattgtattgtgttggttgttgtttagggtgggtagatagagggatgtggacggtgggagttaggggaagggtagaaggggatattgggttattttggagaagttaggttagggttggtttagtaggatgggggttttttgtttttatggttagtatttttagttgagtttttaattttgtagttaggaagtttcgtagtgtgaaggatggggatatcgcgatgttttggttttgagtttattaggtggttttagggttttattttgtttggttttttttgtatgggtttggggtgatgggggtttatttgaggtttagtgttgtttatttcgaatttttaaattttaaattggattagttgtgtttagaaagtagtaaagttgttatatttgagtaaaggtttagtagattattttgggttaagagggtgtttgtttgtgtgagggggatttgaggaggaaaaattgtattaaataagtgtttattgaaaagaaatttgggggattatttgagttagtcgggttttttatttgttttataatattttttttagtatgggtttttgttgttgttgggataattaagtaggagtggacggggttaggttataggttattgggtttaaggttaggaaggggcgtttaggattgtttatgggagaagggcgtggtgtcgatacgaggttatttggagtttttgggattggttttttatttcgtgatttagtcgttattcggtggtttttttagaagtttagggtttagtatataggaagttttatgagtgtttattattatatatattttagaggttgagaatattttggaggtttggggtttgttggttagattttgttttgggttttgaatataggttgggtttggaagggatagtgaggggggttagagtttatgtttgtttagtgtagtaagtttaggtatttggtgggtgggttttgtagttagggaggtttttgtattttattttttttagttttgttttgggtatcgtgtgttatattttagagtttatttatggggtt

SEQ ID NO: 1831 - DNA, 2371 bp, Artificial Sequence
  chemically treated genomic DNA (Homo sapiens)
tttttttagtttggagttatttttgaggtttttgttgttttttgaggaggaagaaaatggatttttttttttaggtttttaggttttatgttttaggtttttttatttttttttttttttttttttttttttttttttttttttgagatggagttttgttttgttatttaggttggagtgtagtggcgcgatttcggtttattggaatttttgtttttcgtgtttaagtagtttttttattttagttttttaagtagttggggttataggcgtgtattattatttttggttaattttttgtatttttagtagagatggggtttcgttatgttggttaggttggttttgaatttttgattttaggtgatttgtttttttggttttttaaattgttgggattataggtatgagttatcgcgtttagttttaggtttttttatttttgttttttttttgattttttttttttaaagaggttttttattttaagaagcgtttggtttattggttttggtttcgttttgttgatagttagttattttttgagtttagttaggagattgaaaagttttattgtatttttttaagggttttatagttaggaaaattagtaaaggggaatatagtgtttgtagatcggtgaggtttagggtcgttttataaaaatggatttttggaaaaatataaattagtaatttattttgtgaattttattggtttaaaaaaaaaaaaaaggttattttatttgaataatgaagagagataaattatttttagttttttttttattagtgaataaggatataaatatttaatagaaatggaatatttatataaagttttaggtttgatttattagttattttagttttataaaatttagtatttttattaaaataaaatgatgtttaaaaggtttgtttgtttttaagaaaattgtatttaatatagggtaagattttgttatggtttatttatttatttatttattttttaaataaagtttaaatttttttgattttacgtttgttattatagttggagggaaatcgattttagaatttatttgatatgtcggatttttttgtggtatttattttatcgtttagtagttagttatgatgttataagtttattagattttcggtagggggaaaacgttggggaattggaaagaatggatgttttttattcgttaggaaggtaggggaaggagttgggtatgtttgggaggagaagtcgcgtggttggtgggggataggagtaggtttaatgtttgtgatattaaatgttaggtagaaatttgaaaattttagttatttagatgtttttttaatatttagatgtttggtattgagtagattatgttttcgttttttaggaggtgtttagtatttgggttttgattttaggttttcgggtgagcgtatattgttaggagttgtatattttcgcggttgtttatttttgggtttgggattttttttttaaatttttatatatagatgataggagtaattaggtttagatttttaaaagttgttgaagtagtgatttgagaagtttagtttttggaacgttatgtaagttaaaaaggaggaaaaaaaaaaaaaaatttttagttaatatatatataaatatatgtgatttttaagttataggatttaagaatttaaaataaaattagtaagtttgagaattagggttggagatcgatattgagaagcgttgagtttttttttaggagtacgtttttttttaaattagaaaaatatcgtatagttttgttttttttgataaagttttttgtttttagggagtcgatagttgttaataaaagtatagggtggaatttatttatacgtaggttgggttttaaggagttattaagtgtagaaatggaaatggttttgtttaggagttttgtttttttgcgattggtaatggggatttttggagtttgggggagtttcgtaggttatagatggagtagggttttggttttttggtgtttggttaagtatttgttttacggaagttattatttaggtttgtgatattatagttaattgtttttgataatgagttaggaattgtaggttttttagggttgtaagtttgagattttatagggagtcgggaggagaggtagttggggaggggttatcgttaattaaaatttagtgtttagataataagaaagaagtggttgagggggatagtatcgtttttggtggggagagggtaggaggaagtgggtgtgcggaaggggttgagggtggggtatttgtgtttttattttttattataatttttatttttagtttttatagatgaggatattgaggttaggggtggttgagtggtttgt

SEQ ID NO: 1832 - DNA, 2371 bp, Artificial Sequence
  chemically treated genomic DNA (Homo sapiens)
gtaggttatttagttatttttggttttaatgtttttatttgtaaaggttgggggtggggattgtggtaggagatgagggtataaatattttatttttagtttttttcgtatatttatttttttttgttttttttttattagagacgatattgttttttttaattattttttttttgttatttgagtattgggttttaattggcgatggtttttttttagttgttttttttttcggttttttgtgaagttttaggtttgtagttttgaggggtttgtagtttttggtttattgttaggggtaattagttgtgatgttataagtttaggtggtgattttcgtggggtagatgtttagttaggtattaggaggttaggattttgttttatttgtgatttgcggggtttttttaggttttaggggtttttattattagtcgtagggaggtagggtttttaggtaaagttatttttatttttgtatttgatggttttttgaagtttagtttgcgtgtaaatgagttttattttgtgtttttgttggtaattgtcggttttttggaagtaaggggttttgttaggaagaataaagttgtgcggtgtttttttgatttgggggaaagcgtgtttttgggggagggtttagcgttttttagtgtcggtttttagttttggtttttagatttgttggttttgttttgggtttttaagttttatggtttaagagttatatatgtttgtgtgtgtgttggttgagggtttttttttttttttttttttttttggtttatatagcgttttagagattgaattttttaaattattgttttaatagtttttaaaaatttggatttagttatttttgttatttatgtgtaaagatttagaaaaaaaattttaaatttaagggtgggtagtcgcgaggatgtatagtttttggtagtgtgcgtttattcggagatttgaggttaaagtttaaatgttgagtattttttgggaggcgggagtatggtttgtttagtgttagatatttggatattgagaaaatatttgggtagttggggtttttaggtttttgtttgatatttaatattataaatattgagtttgtttttgttttttattagttacgcggtttttttttttaaatatatttagtttttttttttgtttttttgacgggtaagaaatatttattttttttaattttttagcgttttttttttatcggaaatttgatgggtttatgatattatggttggttgttgagcgatgaagtggatgttataaagaaattcgatatattagatagattttgaaatcggtttttttttagttgtagtaataggcgtgaagttaggagaatttgagttttgtttaaaaaataaataaataaataaataaattataataaagttttgttttgtattaaatgtaatttttttaaaaataagtaaattttttggatattattttattttaatagaaatgttgagttttatgaaattaaagtggttaataaattagatttgaagttttgtgtgagtgttttatttttgttgagtgtttgtgtttttatttattaataaaagaggagttaggaatggtttatttttttttattatttaaatgagatagttttttttttttttttaggttaataaaatttatagggtaaattgttggtttatgtttttttaggaatttatttttatggagcgattttggattttatcggtttgtagatattatatttttttttgttggtttttttggttgtgaagtttttaagagaatgtagtaaagttttttagttttttggttgggtttaggggataattggttgttagtagggcgggattaagattagtgggttaggcgttttttggaatgagaagtttttttgaaaggagagagttaagagaggaatagaagtaaagggatttggggttgggcgcggtggtttatgtttatagttttagtaatttgggaggttaagagggtagattatttgaggttaggagtttaagattagtttggttaatatggcgaaattttatttttattaaaaatataaaaaattagttaggagtggtggtgtacgtttgtaattttagttatttgggaggttgagataggagaattgtttgaatacgggaggtagaggttttagtgagtcgagatcgcgttattgtattttagtttgggtgatagagtaagattttattttaaaaaaaaaaaaaaaaagaagaagaagaagaagaaaaagtaaagggatttgggatatgaagtttaggggtttgggagggggaatttattttttttttttttaaaagatagtaaggattttagaaataattttaggttgaggggg

SEQ ID NO: 1833 - DNA, 2467 bp, Artificial Sequence
  chemically treated genomic DNA (Homo sapiens)
aggttttgtttgttattttggttgtttttcgtttaaggttttgtttgttattttggttgtttttcgtttaggtacgtttgttttttattttagtttttttggtaggttgcggatgtttttatatttttttgttttggtatttgtgtttttatttgaatgttttttttttttgtttgaatgttgttaatttattttttaggttttagtttaaataatttttttttggaagttttttttgattttagttgggtaggagttttttttgtgtttttattgtttttgtatttttttatttatgttagtttttattattgtttgtttttttcgagaatgttttttttttatttttatgtattttttttttaattttacgtttggtacgtatttggtgtttagaaagtgttattgagtgattgaatgagtgaaggaatagtgaatgaattagtttttgttttgttatgattattgttatttttttgggtaagttattgtttttttgagttttagtttttttatttttaaaatatttttgcggtttcgtttgtttttagattgtaagttattgtatatatttttgaagttattaatattaacgttgtagggtatgtttgtaggtttgttagttgggtttgtgtttttaaaattgtgcggtggtcgttagggattttggttagtgaacgtagaaaggggagagattttgtttttgagagtagtagtaggaagagtaggggttttggaggtagttagttttgggttttaatttttgttttagttttttttggttgtgtgatttatagtaatatgtttttgagttttggtttttttatttataaaatagggttatagtattcgttcgtagggttgttgggtggattatatgaagttaagtttttttaaaatttagtttggatgtggaaagtgttagtaattaagagttttttatttttgtagtttaaggaatagtaggtggagtttgtacgtgggtagtggcgttttagatttgtttttttgttttatatataacgtttttttagaaggaagggaagagttaggaggggaggggtaggggtttataggtcgtattaaatggtggttttttatcgtaaaatttagtttaatttgaattttagtattagagggtttatggggtggagtttcgggatttttagtttcgtttttttttaggttaggtgttacggcgtagattcgtacggttttttttcgtttttcgtcgtaagttttcgttgtttatcgttttcgcgtaaggcgttttagttcgtaatttagtagtgtaggtcgggttcgaagaagtgggagcgcgcgggtaggtagacggggcgtacggcggtcgagcgtattatcgggtggtcgagttgtagtagcgttacgtcgtagttatggttgtttttttcgtggtacgggtgtaggagtaggcggtttattttgaaggatatttttttaggttagcgcgagttttgttatattttgtttaggaatacggtttatagtatcgtggaggttatgttggggtggggtggggtggggtggggtggggtgaggtgaggtgggaggaagttgtttttttttatttagggatttttaagatagttagattttcgttcgggatagtgttttttatatttagtttttttttttttttttgaaggtcgtttagttggtggtatagcgtttagtttttatttattcggtttgtttgggttttacgttttagttttatttttttttagatatgggtgtgtttttttaagtttttgttattttatttgtaaatgggaatggtattttttattcgaatgtttttgagagaatttaataagatcgtgtatttaaaaaatgtagtatagtgttaggttttcgatatagatttttttttttttgtgtgttttatagatttaggttgttttgaattttttgaggttggtgggttttagtggggagcgggtgggagttgagcgtggaggaattggattgcggtagttagttgtttgggtggtagatgggtagttttcgggtttttattttttatttgagggtagtggggagtttgagatggggttaaagagagttaggtggttagagcgttttgcgttttagagaggatataaaaggggatttttgtgtagggtttgggggcgggatttggagtttagatttgtttgggggtggattgggggaggttttagtttattaagtagatgggaaagatggttatgaggtttgatgagatgttttttgggggttttttagttttatttgttatttcgtgttatatttcggggagtgttatagtttatgattaggttgggtagttttgttttttattgaatttttagtatttagtatagttttggtatatagtaggagtataagtgttgttgaatgagtgaatgagatgaatgaatgaattattggtttaatttaaagtaagatattaaaagtagatggt

SEQ ID NO: 1834 - DNA, 2467 bp, Artificial Sequence
  chemically treated genomic DNA (Homo sapiens)
gttatttatttttggtattttgttttaagttgggttagtaatttatttatttattttatttatttatttagtaatatttgtgtttttattatgtgttagggttgtgttagatgttggggatttagtaaaggatagaattgtttaatttggttataagttatgatatttttcgaggtgtgatacgaggtagtaggtggggttggggagtttttaggggatattttattaggttttatggttattttttttatttgtttggtgggttgaaattttttttaatttatttttagatagatttgggttttagatttcgtttttaggttttgtatagggatttttttttgtattttttttgggacgtagggcgttttgattatttagttttttttaattttattttaggttttttattgtttttaggtagagggtagagattcgaaggttgtttatttgttatttaggtagttgattgtcgtagtttaatttttttacgtttaatttttattcgttttttattaggatttattagttttagggaatttagagtagtttgggtttgtaaagtatataggaaaaaagaaatttgtgtcgggggtttggtattgtgttatattttttagatatacggttttattggatttttttaagaatattcgagtagaaaatgttatttttatttgtagatgaggtggtagaggtttagagaggtatatttatgtttagggagggatgaagttggggcgtggaatttaggtaggtcgagtgggtgaaggttgaacgttgtattattagttaggcgatttttagggagggaagggagggttgggtgtggagggtattgtttcgggcggggatttggttattttgagggtttttggatggggagaggtagtttttttttattttattttattttattttattttattttattttattttagtatggtttttacggtgttgtggatcgtgtttttgggtaaggtgtggtagaattcgcgttggtttggagaggtgttttttaaggtgagtcgtttgtttttgtattcgtattacgaagaggatagttatgattacgacgtggcgttgttgtagttcgattattcggtggtgcgttcggtcgtcgtgcgtttcgtttgtttgttcgcgcgtttttattttttcgagttcggtttgtattgttggattacgggttggggcgttttgcgcgagggcggtgagtagcggggatttgcggcgggaggcggagggagatcgtgcggatttgcgtcgtaatatttggtttggagaagggcggggttgggggtttcggggttttattttataggttttttagtgttgggatttaaattgggttgaattttacggtagaaaattattatttaatgcggtttgtaggtttttgtttttttttttttagttttttttttttttttggaagggcgttatgtgtggggtaaaggggtaggtttgggacgttattgtttacgtgtaagttttatttgttgttttttgggttgtaagggtggaaggtttttaattattagtattttttatatttaggttggattttaggggaatttgattttatataatttatttaatagttttacgggcggatgttgtggttttattttatggatggagaaattaaggtttagagatatgttgttgtaagttatatagttagagaggattggagtaaagattagaatttagggttggttgtttttagagtttttgttttttttgttattgtttttagaaatagggttttttttttttttacgtttattgattagagtttttggcggttatcgtatagttttggggatatagatttagttggtaaatttatagatatgttttgtagcgttagtgttggtggttttaaaaatgtgtatagtgatttataatttggaagtaggcggggtcgtagagatattttaaggatggggaaattgaggtttagaggaatagtgatttatttaaggggatggtagtggttatggtaaagtaaaggttggtttatttattatttttttatttatttagttatttaatgatattttttgagtattaagtacgtattaggcgtggggttaggggaagggtatataaggatgaagagagaatattttcgggggagatagatagtggtaagagttgatatggatggggagatgtaggaatagtggagatatagaggaggtttttgtttagttagggttaggggaggtttttaggggagggttgtttaagttgaggtttggaagatgagttggtaatatttagataaaggggaaagatatttaggtgaagatataggtgttaagataggaagatgtgagaatattcgtagtttgttagaggggttgaggtggggggtaggcgtgtttgggcgaggagtaattagaatggtagatagggttttgggcgaggagtaattagaatggtagatagggttt

SEQ ID NO: 1835 - DNA, 2340 bp, Artificial Sequence
  chemically treated genomic DNA (Homo sapiens)
gatggcggcgatcggcggcgttgaggcgggattcgggcgagtcgagtgaaggtagcggcgagcggagattttaggagatcgggttgggtttttattttgaggcggtagtagtttcgtttcgtcgttattcgtcgttttgggttcgcgatattatttttggggtgttttaggtttttcgcggtttagtttaggggtcgagtcggggattggagtagcggtcgtagtcgtttttaggaaggggttggagcgggtagaaggaggagggcgggcgggagttgtttaaacggggaaggcgggaaagttgcggggtcgggagggggcgtgcggtcgtttcgggggtttgcggattcgggtcgtttttttttttgttcgggtcgttttcgttttcgggggcgtcgtgaggtcgtcggagacgcgggaattcgggtttaggtcgagttgtgcggttcggaattcgcgatgcgggggtttttcgggttgttagggggaaagggttcgtggtcgcggttacgggagggttggggttgcggttggtaggagaaagtacgaggagtttttttttttttttttttatagagttttgttgagttagttgttgtcgtaaaattgtcgggagaattttattggtttgttttggggattataaaaatggtggttttgggggttgtttgtgtaaattatttggtattttgtgtgttttttgcgtgtaattcggtttggtcgtgttttcgtggtgggcgttttttttatgtaggtttattttttttttattaattattatttgtagatttattttatagcgtgtaaaagcggagaaatatttttgtttttttttttggagggttaagttggtggttgattatatttttttttaatagaataaagtaaaaaattgaattttaaataaagtttgttgattggataaggttttttaaaattcgattgttggttttatggaatgtgtgttgttagttaatttgtgcggtggtcgtggtttcgtttaattgtattgtaatgagaggatttaatttttattttcgattgtcgggatttttgtagtttttagagttggtaggggttgggagtgttgtttaggtaggtttttggagaagggagtggtaagaggattcggagttatcgtgttcggagattggaagaaatttggacgaagttgagaaggtattatttgtttgtatcgtagaagtaataagaaaattttagaaattggtaatcggcggatgtgtatttttttttatttgtattgattggtattttgagtttttgaaaggagtggttggaagaagagaatgtagaattttggatatggtttttattttggaatagatttggagtttagaattttttttattgttcgtgtgacggggtttattttgttttttttttttcgatatttatttatattatggggtgaagaaggttgttgattgtaggagtttaagttattttaaaaaaagtttgaaatttgttttttaattgtaatttgaagttttaaaatgataaagtgttatatttgaggattttttttttttgattattttggttattttaaaggtttatgtttgaatataatttgtatgtttatttattagggaaagagtaattttgttttttttttttttatattttgaagaaaagttttcgaagagttatttaataatttgtgtattttataagtatatatttttatggtattagttttttatttgtattaatagtatgaaatagtgaatttttatttatgttgttatattttagtatattgagataaataaaattatttttgttttttggagttgataatattgaattttataaatttttaaattattgaattgagattgggttttaatatttgttttatatttgttaatatttaatgtaattatgattttttttttttaatgtgaaaattaaatttaatatttatttttattaatttttataatttattttttatttttgaattttgaatttttatagattgtatttaagatttggaaggaatattaggggtttatttgattttatataaatgttgtttgaattttgttttttttttatattgttgtttgagatttatttggtatttttttaaaattaaattttgagttgtaataatattttgattttaaagaacgtagaaatttagggtttatcggtttgtttaagttgtggttgatatagttcgttgtgtttaattttagttttttaagtttttggttgttttagttttttagtgaattggacgtgtttttaggttttatttttttttttttttttaggttatttaatttagtaatttataaaatgttttttagt

SEQ ID NO: 1836 - DNA, 2340 bp, Artificial Sequence
  chemically treated genomic DNA (Homo sapiens)
attgaagagtattttataaattattggattaaataatttgaagaaaaaagaaggaatgaggtttgaagatacgtttaatttattgaagaattggggtagttaagagtttgaaaaattaaaattaaatataacggattgtattagttatagtttgggtagatcgatgggttttgaatttttacgttttttaaaattaggatattattgtagtttagggtttagttttggaaagatattagataaattttaagtaatagtgtgaaagaaaggtagagtttaggtaatatttatataagattagatgaatttttgatattttttttaggttttgaatataatttgtgaaaatttagagtttaggggtagagagtagattgtgaggattaatgaaaatgaatattaggtttgatttttatattagaaaagggaggttataattatattaaatgttggtaaatgtgaaataggtgttaaaatttagttttaatttaataatttgggagtttataaaatttaatgttgttaattttaagaggtaagaataattttgtttgttttagtgtgttaagatatgataatataagtaaaagtttattattttatattgttgatataagtaaaaaattggtattataaaaatgtatatttatgaaatgtataaattgttaaatagtttttcggggatttttttttaggatatgaaaaaggagggggtagagttgttttttttttggtagataagtatataagttatgtttaggtataggtttttgggatgattaaagtaattaggaggaaaaagtttttagatatagtattttgttattttgaaattttaaattatagttaaaaaataggttttagattttttttgaggtaatttgagtttttgtaattaataattttttttattttataatgtaaatgagtatcgaaaaaaaggaaataaagtaagtttcgttatacggatagtaagagaaattttgaattttaggtttgttttaggatgagagttatgtttaagattttgtattttttttttttaattattttttttaagaatttaaaatgttagttagtgtaggtaaaggaagatgtatattcgtcggttgttaatttttgaaatttttttgttatttttacgatatagataagtgatgtttttttaatttcgtttaggttttttttaattttcgaatacggtgatttcgaatttttttgttatttttttttttagggatttatttaggtagtatttttagtttttgttagttttggaagttgtagagatttcgatagtcggggatggggattgaatttttttattgtagtgtaattaagcggaattacgattatcgtatagattggttgataatatatattttataagattagtaatcgaattttgagaagttttgtttaattaataggttttatttgggatttagttttttattttgttttattaggaggaaatataattagttattagtttagttttttaaaagaggggatagagatgttttttcgtttttgtacgttataaagtgaatttataagtagtagttggtggagggaaaatgggtttgtatggagaaggcgtttattacgaaggtacggttaagtcgggttgtacgtaagaaatatataaaatattaggtgatttatataaatagtttttaggattattatttttgtggtttttaaggtaaattagtgggattttttcggtagttttgcggtaatagttagtttaataaagttttgtgaagaggaaaagaagaaagtttttcgtatttttttttgttagtcgtagttttagttttttcgtggtcgcggttacgagttttttttttttgatagttcgagggattttcgtatcgcgggtttcgagtcgtatagttcgatttgaattcgggttttcgcgttttcggcggttttacggcgttttcgagggcggagacggttcgggtagggggaggggcggttcgggttcgtaggttttcggggcggtcgtacgttttttttcggtttcgtagttttttcgtttttttcgtttgaatagttttcgttcgtttttttttttttgttcgttttagtttttttttgggggcggttgcggtcgttattttagttttcggttcggtttttgggttaggtcgcgaagggtttggggtattttagaggtgatgtcgcgggtttagggcggcgggtggcgacggggcggggttgttgtcgttttagggtgggggtttagttcggttttttggggttttcgttcgtcgttatttttattcggttcgttcggatttcgttttaacgtcgtcgatcgtcgttatt

SEQ ID NO: 1837 - DNA, 2468 bp, Artificial Sequence
  chemically treated genomic DNA (Homo sapiens)
acgtttatttcgtagaatggtttatatttaaatagatgatttttgtttttgagatggaatttcgttcgttatttaggttggagtgtaggggcgcgatttcggtttattataattttcgtttttcgggtttaagcgatttttttgttttagtttttttagtagttgggattatagatatgtattattaatgtttagttaattttgtatttttagtagagatggggtttttttatgttggttagattggtttcgtatttttgattttaggtgatttgttcgtttcggttttttaaagtgttgggattataggtgtgagttattatatttagtttataggtgattttttaaattaatattgagattatagtattatgttttttttaaagtagtttggtgaggataattttttatttttattttaaaaaggaataaagaaaattgtagtatgaataaaattagaatggagaatgggttattttttggagtggtttgagttaagagggagttgttttttgttcgtgtttgtttttttgagggttttttgggtatagttgataaattatttaagtttgaaagatatacgttattttattaatatagttatttttttttattgttttagtggtgaaggtgtttgtattgtaatatggaggggtattaaatgttttgcgggttttagttcgttgttataggttaggtttgtttgtagttaagaaggttgtttaaattttagatgttatttggaggtatgaggatttgagtttagaggtggtagtgttttatttagggaagttaatagatcgtgttttaggttttagttttgggttgggttaggattaaattttggttttttttttttggtattaaggggattagtgtttggttgtttgtagggggttagagtagggagggttttaggaagggttttagagtgggtttataggggatttttttttttggttttttggagtttaggtcgtcgagggcgtaaagttgtacgttattttgggtaagttgggttcgtagcgtgggcgcggtgaggacgcgtagtttatgtagtcgtttttaagagtaagagaaagcgtcggggtttttatcgtagtcgtcggtgggaggtatattggggtagtcggggtgcgttattagttcggttgttagggtgtggttcgttagggtattttttaggattcgcgttagggtttcggatacgcggtgagcggatatgtgtcggtcgtaagtgtttaggtttacgaaggcgtttgtttatttgtggggggcgggatattagaggtgggattaggtcgggttatggttaagggttaggtaggttagggaagggacggcggggtgggagggggtaattggggtggcggtagcggtcgacgttagattcgttttcgggttgagaaacggatatagttagttaggtgaatagttagtgcggagggatagaggtagttatggtaggagacggggcggggagttttatcgtaggtcgtggcgggagaaggggtttacggcggttcgggcgtcgcgttttacggcgtaggcgaaggtacgcgcgggggtttttagttaagtgtagttatttatatcgcgttttagcggtagtcgcgtaaagcgtattttataggtttgtagcgtttcggcgaatatttggtatacgtttgcgggcggagcgggttagggaggagtacgtttttttatttgggggtatcgaattttttttatttttttagtttcgtttgggagtaacgttttttaaattgggattattaattacgtatttgggagtacgtgtacgtgttggtgttcgttcgcgtgcgtgggggttttgtttagtagttttcggaagtagtttagttgggtttcgagtttttttcgtatttagagggcgagcgagagatattttgagcgatcgggagtagttgtcgaggatatttttttcgtgttttcgtgtgatggttttagtgtttgaatgcggaagttatttatcgttagtttttaacggttttatagtatttttcgggcggagttttgggggttttcgcgagtatttttttgtagttgcggtttcgtatttgaggtaaatttacgttttcggtcgttatcgtttttcggaattttattttgttaaggaagaagtttttcgggtcgagtagcgatgaggcgttacggcgggtcggatttacggggcggttttcggataggttggcgtggaggttcgtggggatgttgtgtttgagggcggagcgcgagttggagtattagcggtcgcggagtcgcgcgttttaagtcgatcgtcgttttgttagaggttttttttttatttgcgggttagtttcgtcgcgtttttcgtggtcgtatcgttgattagtagggatacgttggttatagtttcggttagaaaggtttttacgatatttttatcgcgtcgcgggtagtaattaaagtcgttcgcggtgatt

SEQ ID NO: 1838 - DNA, 2468 bp, Artificial Sequence
  chemically treated genomic DNA (Homo sapiens)
ggttatcgcggacgattttggttattgttcgcgacgcgatgagggtatcgtggaggtttttttggtcggggttgtgattagcgtgtttttgttggttaacggtgcggttacggagagcgcggcggagttggttcgtaggtgaggggagggtttttagtagggcggcgatcggtttggggcgcgcggtttcgcggtcgttagtgttttagttcgcgtttcgtttttaggtatagtatttttacgggtttttacgttaatttgttcgagggtcgtttcgtgggttcggttcgtcgtggcgttttatcgttgttcggttcggaaggttttttttttggtaagatgggatttcgggaggcggtggcggtcggagacgtggatttgttttaggtgcggagtcgtagttataggaggatgttcgcgaggatttttagagtttcgttcggagggtattgtgaggtcgttaggagttggcggtggatgattttcgtatttaaatattggagttattatacggaagtacgaggagggtattttcggtagttattttcggtcgtttaaggtgtttttcgttcgttttttaggtgcgggaggagttcgaggtttaattaagttgttttcgggagttgttgggtagggtttttacgtacgcggacgggtattagtacgtgtacgtgtttttaggtgcgtggttagtgattttagtttggagggcgttatttttaggcggggttgggggagtaggggaagttcgatgtttttaggtgaaaggacgtgtttttttttgattcgtttcgttcgtaggcgtgtgttaggtgttcgtcgaggcgttgtaggtttatggggtgcgttttacgcgattgtcgttggagcgcggtgtgggtggttgtatttggttggaggttttcgcgcgtgttttcgtttgcgtcgtggagcgcgacgttcgggtcgtcgtgggttttttttttcgttacggtttgcggtgaggtttttcgtttcgttttttattatagttgtttttgttttttcgtattggttgtttatttggttagttgtgttcgttttttaattcggaagcgagtttggcgtcgatcgttgtcgttattttagttatttttttttatttcgtcgttttttttttagtttatttagtttttggttatggttcggtttggttttatttttgatgtttcgttttttataggtggatagacgttttcgtgggtttgagtatttgcggtcggtatatgttcgtttatcgcgtgttcggggttttggcgcgggttttggaaggtattttagcgggttatattttgatagtcgagttgatggcgtatttcggttattttagtgtgttttttatcggcggttgcggtgaaggtttcgacgtttttttttgtttttgggagcggttgtatgagttgcgcgtttttatcgcgtttacgttgcgggtttagtttgtttaggatggcgtgtagttttgcgttttcgacgatttggattttaagaggttaggggaggaggttttttgtgagtttattttggaattttttttggaattttttttattttgattttttatagataattaagtattaatttttttagtattaagaaaggggagttaggatttagttttggtttagtttagagttgggatttggagtacgatttgttgatttttttgggtaggatattgttatttttgggtttaggtttttatgtttttaaatggtatttagagtttgagtagtttttttggttgtaggtaggtttagtttgtggtagcgggttagggttcgtagagtatttggtgtttttttatgttgtaatgtaaatatttttattattggggtagtggggagagatggttatattaataaaataacgtgtgttttttaaatttgggtggtttattagttgtgtttaggagatttttagagaaataagtacggataaagagtagtttttttttggtttaaattattttaggaaatggtttattttttattttggttttgtttatgttgtaattttttttatttttttttagggtgggagtgggagattgtttttattaggttgttttggaagaggtataatattataattttagtattgatttaagaagttatttgtaggttgagtgtggtggtttatatttgtaattttagtattttgggaggtcgaggcgggtagattatttgaggttaggagtgcgagattagtttgattaatatggagaaattttatttttattaaaaatataaaattagttgggtattggtggtgtatgtttgtaattttagttattggagaggttgaggtaggagaatcgtttgaattcgggaggcggaggttgtggtgagtcgaggtcgcgtttttgtattttagtttgggtaacgagcgaaattttattttaaaaataaaagttatttgtttagatgtaagttattttacgggataggcgt

SEQ ID NO: 1839 - DNA, 2782 bp, Artificial Sequence
  chemically treated genomic DNA (Homo sapiens)
tttttttttttttttaggtggtagaaatttagttttagttaaagatatatagaatttttgtagtttgattttttttttgtttttttttttttgttttgtttaattttggtagtttaagttttaagatagaggagagatagatatgttttttttttaagatggggggttttgaaagattgatgtttattagagggttgaaaaggggggttgttttcggagtagagtaaagcgaggatttagtggggttatggagtaatagggggttaggttttgttttttttattaatttagtattaattgttttttgtattaatagttattgattgtttatagggttttgggtattgttttaaaagtggggattaggaggaaagttttttaatggggttgatattttagtagagaaagtaggtaataaataatgaaataaattagaatataggaagagttgttatagaagaggttttttaatgtggggaggggaagataagacgtggagaggtatttacgaggtttatgataaatattttattatttttgtttagttagttttttttttttttttttttagatgcgtatatatatatatatatatattttttttttttttttttttttggtttttgtattagattttttaaattttgtttgatttgtttttgtatatttttagggttttgggattttagtagttggttttttgttttttagggttattagtaaagttagaggaagttggatggtaaagggtagtggggttttttattttttttcggaagaagtgtgttgaggttagacgcgttacgtgatagtgggattcgtttttttggaagttagtttagttggtggagatggtattttagaggtttcggtaggttttttatttagttttgttttacggttgtttgtcgtttgttgaaagattagttcgagtacgattaggacgtggatagttttaaggttatttttattagtaggtttgttttgatttttttagtattggttattatagtttttttttggattgatttttgcgtggttttatttttatgtaggtttttttttttagggttagtttgaggtttatttaggtttagtagtaaagtgttttataaattgtaaagtgttatatatatcgcgtttgtggttatgtgtttaagaatgttgtgattaaagtgaggagaaaggtagtttttgtgttatagtttttattttagatatacgagttcgtggagttgtgggaaagaaggaggaggtgttggacgaagttggaaatggtaaggggaggttggggaaatatttagttgttagcggttttttcggggtacgttgggattagttaagagaatgtaatagttaggggtgggagtttttttcgcggttgtatacgttaggtttttttagttttgtaggtttaaatgaaggtttatgtgaagggggaatcgttttggatagtttagtgttttttagagttatattattattattttttattacgcggaggtggttgaaaaaaaggagttatagatgggtaaggtttgaggggcgtcgggttgacgaggtaaaaaaaaaagtaggtgttgtggtgttgatgggaggtttttttttttttataggacgttaggaaggaaatggggtcgttatagaggtggtgaggtgttagggtttacggagggtttatttgttgcgcgggggcgagtattaggcgttgggtgtacgggggttcgtgcgtgtttgtgtacgtgcgtgggtgtgcgcgtacgtgtgtttaggtcgcgcgtgtaggggtcgtgcgtgcgtttgtgtgcggtgcgcgcgcgtgtgtttcgcgtgtgtacgggcgtggtagaggcgggcgcgcgatttggtcgcggtagtgcgtgttcgtcgttttgcgcgttcgttcgtcggagcgtagtatcgttttcggttaggagtgtgtatgcgtggggtgagtgagcgagtcgggggttcgggcggggtgggttgcggagagtagttacggggcgtcgtcgtttttaggacgttttggtatcgggtttagtttttaggttttacggcgaggcgaggcggtagttggggtcggtcggttattttttttttaatagttggtcgcggttcggggggttgcgggagaggcggagagggggcgtcgggaggggtttgaaggcggttcggtcgagtttcgcgttttttttttcgggtgcgggtcgcggggggcggtcgcggaagggcggggttttcgggcgggcggtttgcggttttcgaggagtttcgagaataaaaggagacggcgacggttttttcgtggttaaaataatttgcgttggcggtagtttaaggtcgggtcgcggttttcgagtttttcgttttaattttttcgtcgtcgttgttttttttttgcgtttggttggaggtcgtaggggtcgatttttttcgggagtcggcgaggtgcgggcgaggtgcggattttcggtcgtagtcgggcggaggtgggacggtatttagttacgtcgcgttttcggttgttttttttttttttttatcgcgcgcgtcgttttgtttcgtttttttttttatttggatttcgggtagatttgttaatttacggttacgtgaggttgggaggggtggggacggtttcgattttagcgtttttttagatgtttttatattttatttttcgtgtagttaggtttttgtaggcggcgcgtttcgtattttgtatgcgggggagagaggtgtttttttttgtagggcgcgggtataggtacggtaaggt

SEQ ID NO: 1840 - DNA, 2782 bp, Artificial Sequence
  chemically treated genomic DNA (Homo sapiens)
gttttgtcgtatttgtgttcgcgttttgtaggaggaagtatttttttttttcgtatgtagggtgcggagcgcgtcgtttgtaaaagtttagttgtacgggagatggggtataaaaatatttgagggagcgttggggtcggagtcgtttttattttttttagttttacgtagtcgtgagttggtaagtttattcggaatttaggtgggaaagggggcggggtaggacgacgcgcgcggtggaggggaggagagggtagtcgggagcgcggcgtgattgggtatcgttttattttcgttcggttgcggtcgggagttcgtatttcgttcgtatttcgtcggttttcggggagggtcggtttttgcggtttttagttaggcgtaggaaggaggtagcggcggcgaaggggttaaggcggagggttcggaggtcgcggttcggttttgggttgtcgttagcgtaggttgttttgattacggaggagtcgtcgtcgtttttttttgttttcggggtttttcgagggtcgtaggtcgttcgttcgggggtttcgttttttcgcggtcgtttttcgcggttcgtattcgggagggaggacgcggggttcggtcgggtcgtttttaggtttttttcgacgtttttttttcgtttttttcgtagtttttcgggtcgcggttagttgttggggagggggtggtcggtcggttttagttgtcgtttcgtttcgtcgtgggatttgggggttgggttcggtgttagggcgttttgggaacggcggcgtttcgtggttgtttttcgtagtttatttcgttcgggttttcgattcgtttatttattttacgtatgtatatttttggtcggaggcgatgttgcgtttcggcgggcgggcgcgtagagcgacgggtacgtattatcgcggttaggtcgcgcgttcgtttttgttacgttcgtgtatacgcgggatatacgcgcgcgtatcgtatataaacgtacgtacggtttttgtacgcgcggtttgagtatacgtgcgcgtatatttacgtacgtatataggtacgtacgggttttcgtgtatttagcgtttggtgttcgttttcgcgtaataggtgggtttttcgtgggttttggtattttattatttttgtagcggttttattttttttttggcgttttgtgagggagggagaattttttattagtattatagtatttatttttttttttgtttcgttagttcgacgttttttaaattttatttatttgtgattttttttttttaattattttcgcgtggtggaaaatggtggtgatgtgattttgaggggtattgagttgtttagagcgattttttttttatataagtttttatttgaatttgtaagattggagggatttggcgtgtgtaatcgcggagggggtttttatttttggttgttgtatttttttggttgattttagcgtgtttcggggaggtcgttgatagttggatgtttttttagtttttttttattatttttagtttcgtttagtatttttttttttttttttatagttttacgggttcgtgtatttggggtggaggttgtggtatagaaattgtttttttttttattttagttatagtatttttgaatatatggttataggcgcgatgtatgtggtattttgtagtttatgaagtattttgttgttaagtttgagtgagttttaggttggttttgggggaggggatttgtatggggatggaattacgtaggggttagtttaggaaggagttgtaatggttagtgttgggagagttagggtaggtttgttggtggaggtggttttggagttgtttacgttttggtcgtgttcggattaattttttagtagacggtaggtagtcgtgaggtagggttgggtggagggtttgtcgaggtttttgaggtgttatttttattagttgagttggtttttaggagggcgagttttattgttacgtgacgcgtttggttttagtatatttttttcgggaaagagtgaagggttttattgttttttgttatttagttttttttggttttgttaatggttttagggggtaggagattaattgttggaattttagagttttggaggtgtgtaagggtaggttaaatagaatttggaggatttggtgtaagagttaggaagagagagagagagagagtgtgtgtgtgtgtgtgtgtgcgtatttgagagagagagagagagagattgattgagtaggaatggtgagatgtttattatgggtttcgtaagtatttttttacgttttgtttttttttttttatattgaggagttttttttgtgataattttttttatgttttggtttattttattgtttattatttgttttttttattggagtgttaattttattagagagttttttttttggtttttatttttagaatagtgtttagagttttgtggataattagtaattattagtgtaaagaatagttagtgttgggttggtggggagggtaggatttggttttttgttgttttatggttttattgagttttcgttttgttttgtttcgagggtagtttttttttttagttttttggtaggtattagttttttaaagttttttattttgagagagaagtatgtttgttttttttttgttttgggatttgggttattaggattagataggatagaggagaagaaatagaaagaaaattagattgtaaaggttttgtgtatttttagttggggttaagtttttgttatttaaaaaaaaaaagaga

SEQ ID NO: 1841 - DNA, 2377 bp, Artificial Sequence
  chemically treated genomic DNA (Homo sapiens)
tattttagggaggttagttgggggtaggttttggatttgttttaggtatttgaagtttaaagaataggatatattggttttgttatttttttttatttttcgtttatttattttttaggttagattattgtatttttgtttttattattgtgtgatttgttcggtaattattttttttttttttttgaaatggagttttgttttgttatttaggttggagtgtagtggcgcgattttggtttattgtaatttttgtttttcgggtttaagtaatttttttgttttagtttttcgagtagttgggattataggtgtatgttgttatgtttggttaatttttttgtattttaatagagatagggttttattgtgttgtttaggttggttttgaatttttgagtttaggtaatttgtttattttagtttttcgaagtgttaggattataggtatgagttatcgtgtttggttttggtaattattttttttttttttttttgtttggtgttttgagatagagttttgtttttatttaggttgaagtgtaatggtatgagtttagtttattgtaattttcgttttttgggtttaagtgatttttttattttatttatttcggtttttaaagttttgggattataggtatgaggtattgtatgtggtttttggtaagtatttaaaagtttgttttgtgatagtttatgatattagatttatttaagtggagggttggatagagttttcgatatattcgttggtatggaggtttagtttaggagtataggagttttgaggaggtttttgatttatcgttttatggttttaaatagttagtggggttttttggtgaaaggtatttttatgttatgaaattgcgttattttcgtggtaatggttgttgataatattggttttcgaagtttttgagtttttaatggtcgattttgtatttaggaagttattagggtggtgatggggttggggtaggagtgggaagggttggggtaatgaggggaagttagggttttgggggaaattttttatttggggtgagggatgtggaggtagatattgggtattggggtagggttagggggtggaggtgttttggggaggagagggtaggattgggttcgtattgggatgtattgttttagtcggttttttgggaagatttcgtatagttggggttttagcgatcgtttcgtaagtatggcgaatattacgttttttagtattagggagtttacgttttgaaaaaggatggatagtaaaggggttaaggtaaagtggtatagggatatatatgagggttcgttttttttttattagagttgcgatttttgatttaattgtttggaggttttggagtataggttttagcgttggtttatttttatttagagatgggggttttattatgttgtttaggttggtttcgaatttttgtgtttaagtgattttttcgttttagttttttaaagttttgggaatataggtttaggtttcggtgtaatgaggtgttatttagatcgtgaatttcggtgtttttaattgcgtaacgggaataatattattcgtatcgcgtaagcgataggttttaaagttattggtgttgcggcgtttatattttttttatttgtaagatggtttcgtatagtcgtagaagtatttttcggggtttttcgttaacgttgggtaggtggttcgggagcgagtagcggaagagtaggttgttgaggttttcgttgtagatttatattaggcgcgtttagttcgcggtcggttttatttgtcgcggtttcggttttttttcggttaggtcggtttcgtttcgttttaggcgcgggcgtaagaggggggcgaaaatatggagtattttgagggtttcgcggttgatttttgatttcgattcgcgtatcggagaggttgatttttgattttttattttacggggtaaatttttagtttttcgggttgtattcggcgttaggtttcgtttaagtattttcggtattattggtaggttcggcgttcggcgttacgcgatagcgacgaggcgcgtcgtcgttttggggtagtgttcgggtatttagattgttgtaagtcgtttttggttaggtagtcgttaatagtttcgttttcggttatagttgtcgtttcggtcgttatggcgcgggttcgatcgggttttaggttaggttgcgtttcgtttttttcggacgggttcggtttttttcggtcgcgttcggtttttttttcggtcggtttgggttttttcggttatattcgggttttttcggttttattcggtttacggttgcggcgttcggtttttttcgtgtttcggttcgggggtttttttcgaaggtcgaattt

SEQ ID NO: 1842 - DNA, 2377 bp, Artificial Sequence
  chemically treated genomic DNA (Homo sapiens)
gaattcggttttcggaaagagttttcgggtcggggtacggagagagtcgagcgtcgtagtcgtgagtcgaatagagtcggagagattcgagtatgatcggagaagtttaggtcggtcggaagaggagtcgagcgcggtcggaaggaatcgagttcgttcgaagggagcggagcgtagtttggtttggggttcggtcgagttcgcgttatggcggtcgaggcgatagttgtggtcggaagcggggttgttggcggttgtttggttaaagacggtttgtagtagtttaagtgttcggatattattttaaaacggcggcgcgtttcgtcgttgtcgcgtgacgtcgagcgtcgagtttattaatggtgtcgggagtatttgggcggggtttggcgtcgagtgtagttcgaggagttgagggtttatttcgtgaggtgggaggttaggggttagttttttcggtgcgcggatcggggttaggggttagtcgcggggtttttaggatgttttatgttttcgttttttttttgcgttcgcgtttggggcggggcggggtcggtttggtcgggagggggtcggggtcgcggtaggtagggtcggtcgcgggttgagcgcgtttggtgtgggtttgtagcggaggttttagtaatttgttttttcgttgttcgttttcggattatttgtttagcgttggcgaggagtttcgggaggtgtttttgcggttgtacggagttattttgtaggtgaggggggtgtgagcgtcgtagtattagtggttttagggtttgtcgtttacgcgatgcgggtagtattgttttcgttgcgtagttgaggatatcgaggtttacggtttgagtaatattttattatatcgaagtttgggtttgtatttttagagttttgggaggttgaggcgagaggattatttgagtataggagttcgagattagtttggataatatagtgagatttttatttttaaataaaaatagattaacgttaaagtttgtgttttagagtttttaggtaattggattagaagtcgtagttttggtgggaggaaggcgagtttttatgtgtgtttttgtgttattttgttttggtttttttgttgtttatttttttttagggcgtggattttttggtgttagaaagcgtgatgttcgttatatttgcggagcggtcgttggggttttagttgtacggagtttttttagagggtcggttggaatagtatattttagtacgggtttagttttatttttttttttttaaggtatttttattttttaattttattttagtgtttaatgtttgtttttatattttttattttaagtagggaattttttttaaaattttgatttttttttattgttttagttttttttatttttgttttagttttattattattttgatagttttttgggtgtagagtcggttattgaaaatttaagagtttcgagagttagtgttgttagtagttattgttacgaagatggcgtaattttatggtatggagatgttttttattaaggagttttattggttgtttgggattatggagcggtgagttaggagtttttttagggtttttgtatttttgagttgaatttttatgttagcggatgtgtcgggggttttatttagttttttatttgagtggatttgatgttatgggttgttatagaataggtttttaaatgtttgttagaggttatatgtagtgttttatgtttgtaattttagaattttgggagtcgaggtgggtgaggtgggaggattatttgagtttaggaggcggaggttgtagtgagttgagtttatgttattgtattttagtttgggtgagagtaagattttgttttaaaatattaaataaaaaaagaaaaaagaaatgattgttaaggttaggtacggtggtttatgtttgtaattttagtatttcgggaggttgaggtgagtagattgtttgagtttaggagtttaaaattagtttggataatatagtgaaattttgtttttattaaaatataaaaaaattagttaggtatggtagtatgtatttgtagttttagttattcgggaggttgaggtaggagaattgtttgaattcgggaggtagaggttgtagtgagttaagatcgcgttattgtattttagtttgggtgatagagtaagattttattttaaaagaaaaaaagaaatgattgtcggataagttatatagtgataggagtaggggtgtagtagtttggtttgaggggtagataggcgaggggtgggaaagaatagtagagttagtgtattttattttttgggttttaggtatttaaaatagatttaggatttgtttttaattggtttttttgagatg

SEQ ID NO: 1843 - DNA, 3534 bp, Artificial Sequence
  chemically treated genomic DNA (Homo sapiens)
agtaaatggttatattatgagttatgaatatagagtgatttatttataatagttatgtaatatgtgggatttaaaaggaattggtatatttatttttattgatattaaaattttttaaatttattattgattgaggaaaataatttggttagatttagtgtttaatatggtagtatttatgaaaaatattaaattaagaatagaaaaattgtatataaagttagagatagattttaaatttttttttttttttttttagatggagttttgtttttgttatttaggttttggagtgtaatggcgtgattatggtttattgtaattttcgttttttgggtttaagtaatttttttgttttagtcggtatagttgggattataggtatgcgttattatatttagttaatttttgtatttttagtagagatagggttttattatgttggttaggttggtttcgaatttttgattttgtgatttgtttatttcggttttttaaagtgttgggattataggcgtgagttattgtattggtcgattttaaatttttatgtttggagattagtaaagggtatggaataatgaaggggaatttttattttattttgtttttgagatagggttttagtttgttgtttaggttggggcgtagtggtgtaattatggtttattgtagttttaatttcgaggttttaagtgatttttttattttagttttttaagtagttgggattataagtatatggtattatatttggttaatttttaaattttttgtagagatggggttttattatgttgtttaagttggttttaaatttttgggtttaagtgatttttttgttttagtttttgaaggtgttgggattataggcgtgagttattacgtttggtttaattttatttattaaatatgttagaattaagtgtttttttttgagatttgtgagtttttttagtgaaaaaatatttaaaaggtttgttagtatgtttataaaaaagaagataggaggggagggataggatttaggagggtagtttatagtttgtttttttcgttttgttttggggcggagtttgtattgcgagttgagttttttttaaggcgtatgttatttttggagttaagtttagtagtgtagtcgtatagttagggtggggtgggttaggcggagaagtaggttgtagagggggtagggtggtggtttggggattttagggaagggttatgggagtacggcggtgtttttagtgttggggtttttaggggttttggtatcgcgagttgatttttgggggtaggaggttattttatgtaggggtagtaggtgttggttattatattgtttagtaaggtggtagtagaggttttttaggttttttttttaggaaaggagtttgggttgttttgatgagttttttgtttttttttttttcgtaggatgaagatgagacgttataagtttttttttatgttttgtatggtcggtttgtgttttattttttttttgtatttttttaagattttgttttatgttattttttttcgagaattggttttttttagttttaatttggtgtttagttttttttggaataatgtttcggttacgttttaggttagtttcgagttaggaggttttgatttgttgcgtattttattttatttttattcgtttttgttgtagtcgttgtcgtttagtaaggcggtcgaggagttttatcgggtggatttggtgttgttcgaggatattatcgagtatttcgtgcgtattaaggtcggcggcgtttgttttaaattcggtattaagatgttggagaggtcgttttcgggacggtcggaggagaagtttgagggggttaacggtttttcggttcggcggttatttcggtattttttgagcgttcgggagcgtacggggggtcgaggcgttcggcgtaagtgggtggagtgcgtgtgtttgttcggttggtacggatttagttgcggcgtgtttattgtggtgtagtattttaatttgtttattaaggagcggttggtgtttagggaggtgtcgcgtcgcgttattaacgttattaacgttaattacgagttcgatttgttggacgtgcgtttttacgagttgggcgacgtggtggacgtttttgtggtgtgcgagtttaattttacggtttatggggagtcgcggtcgtttaagtttcgggagatgttgattaatggtattttcgagtatattcgttataaggtgttttatgtttttttggattatttttcgttcggcggtcggtaggacggttggatcgtcgacgattatttgcgtattttttttatttaggacggcgtttcgcggttgcgtaatttgcggttcgacgacgtttttattattgacgatgcggacgagatttcggttcgtgacggcgtttttttttttaagttttacgatggttggatcgagtttttcgttttttatatgcgtaagtcgttttacggttttttttggaagtagtcgggtattttggaggtggtgttaggttgtacggtggatatgttgtaggtagtgtatgggttggacggtattcgtttgcgtcgtcgttagtattatattatgtttaattttagatagtatgagaatcgtatcggttatattttggtgtagtggtcgttgggtagttttttgtatttcgtcggttggtattgtttttggtgttttacgttcgagggtatttattttaagttcgtgttcgtttagaatggcgattttttacgttggggtgattacgaggataagcgggatttgaattatattcgcggtttgattcgtatcgggggttggttcgacggtacgtagtaggagtattcgtttgtagattttagcgagtatatgtatgcgtttaagtatttgttgaagaattacgatcggttttattatttgttggataatttttattaggagtttaggagtacggcggcgggcgggtggcgttataggggtttcgagggaaggtcgttcgttcggggtaaattggacgaggcggaagtttagagttgtatgatttgatagggtttgtgatagggcgggggtggcggcggtttttagcgttatttttttgttttttgtcggttttttggtttttgaggggattaggagtgggtggggagtgggggtgggggtagggtttttttattgaagtttttgtgaattaagggttaggtttttgagtttagaaaatattttttttgttgggagagggcgtaggtcgtgacgtttgggtggtttttatgattgttaagattgttgtggttaggaggtgttattggagtgtgcgtggtggtttttgggtagcgggggagggtaggtaggattggggaagagagtttgtaggattttattaggtagtttttggggggtggttaggtcgggaaaaagtttattatttggtatttttgggttttgggtttcgtgtgggagatcggtttgttaggaggatttagggttttgtaagtagatgtatttgggtttaggaggaagcgtgg

SEQ ID NO: 1844 - DNA, 3534 bp, Artificial Sequence
  chemically treated genomic DNA (Homo sapiens)
ttacgtttttttttggatttaaatgtatttatttatagagttttgggtttttttggtaggtcggttttttatacggagtttaaggtttagggatgttaaatggtgggttttttttcggtttggttattttttagaggttgtttggtgagattttgtaggtttttttttttaattttgtttattttttttcgttatttagggattattacgtatattttagtggtattttttggttatagtagttttggtagttataagggttatttagacgttacggtttgcgtttttttttaataggagggatattttttgagtttaaaggtttgatttttgatttataagggttttagtagggaaattttatttttatttttattttttatttatttttggtttttttaagaattaaggagtcggtaggaggtagggagatagcgttaggggtcgtcgttattttcgttttgttataaattttattagattatgtagttttagattttcgtttcgtttagtttgtttcgggcgggcggttttttttcgggatttttgtggcgttattcgttcgtcgtcgtgtttttgggtttttggtaggggttgtttagtaggtagtggaatcggtcgtagttttttagtaggtatttgggcgtatatatgtgttcgttggggtttgtaggcgggtatttttgttgcgtgtcgtcgaattagttttcggtgcggattaggtcgcggatgtagtttaggtttcgtttgttttcgtagttattttagcgtgggaagtcgttattttgggcggatacgagtttgaagtagatgttttcgggcgtgaagtattaggagtagtgttagtcggcgaagtgtagggggttgtttagcgattattgtattaggatgtggtcggtgcggtttttatattgtttgaagttgggtatggtgtagtattggcggcggcgtaggcggatgtcgtttagtttatatattgtttgtagtatgtttatcgtgtagtttgatattatttttagggtgttcggttgtttttagaagaagtcgtagagcgatttgcgtatgtggaaggcgaagggttcggtttagttatcgtagagtttgaggaaaaggacgtcgttacgggtcgggatttcgttcgtatcgttaatgatgaagacgtcgtcgggtcgtaggttgcgtagtcgcgagacgtcgttttgggtgaggaaggtgcgtaggtagtcgtcggcgatttagtcgttttgtcggtcgtcgggcgggaagtggtttaggaagatatagagtattttgtggcggatgtattcgaaggtgttattggttagtatttttcggaatttgagcggtcgcggttttttataagtcgtgaagttggattcgtatattataaaggcgtttattacgtcgtttagttcgtggaagcgtacgtttagtaggtcgaattcgtggttgacgttgatggcgttgatgacgcggcgcggtatttttttgggtattagtcgttttttggtgggtaggttggagtattgtattatagtgggtacgtcgtagttgggttcgtgttagtcgggtaggtatacgtattttatttatttgcgtcgggcgtttcggtttttcgtgcgttttcgggcgtttaggaggtatcggggtggtcgtcgggtcgaggagtcgttggtttttttaggtttttttttcggtcgtttcgggggcggtttttttagtattttggtgtcgggtttgaagtagacgtcgtcggttttggtgcgtacgaaatattcggtggtgttttcgggtagtattaagtttattcggtggagtttttcggtcgttttgttgggcggtagcggttgtagtaggggcgagtgggagtagagtggggtacgtagtaggttagggttttttggttcggggttggtttggggcgtgatcggggtattgttttagaaaaagttggatattaggttagggttgagggaggttagttttcgggggaaggtgatataggatagggttttgaagaagtgtaggaaggagatgaggtataggtcggttatatagaatatgagaaagagtttgtagcgttttatttttattttgcgggagagagagagataggagatttattagggtagtttaggttttttttttaggaaggggatttaggaggtttttgttgttattttgttggataatgtggtggttagtatttgttgtttttgtatggagtgattttttgtttttaagagttaattcgcggtattaaggtttttgaaagttttagtattgaggatatcgtcgtgtttttatagtttttttttgagatttttaggttattattttgttttttttgtagtttgttttttcgtttggtttattttattttgattgtgcggttgtattgttaggtttggttttaggagtaatatgcgttttgggaaaagtttaattcgtagtatagatttcgttttaggatagaacggggagagtaggttgtaggttgtttttttgggttttgtttttttttttttatttttttttttatggatatattgataaattttttgaatatttttttattgaaaaaatttataggttttaagggaaaatatttaattttaatatatttaatgaataaaattaggttaggcgtggtggtttacgtttgtaattttaatatttttagaggttgaggtaggaggattatttgagtttaggagtttgagattagtttggataatatagtgagattttatttttatagaaaatttaaaaattagttaggtgtggtgttatgtgtttgtggttttagttatttaggaggttgaggtgggaggattatttgagatttcgaggttgaggttgtagtgagttatgattgtattattgcgttttagtttggataatagattgagattttattttaaaaataaaataaaataaaagtttttttttattattttatgttttttattaatttttaggtataaaaatttgaggtcggttagtgtagtggtttacgtttataattttagtattttgggaggtcgaggtgggtagattataaggttaggagttcgagattagtttggttaatatggtgaaattttgtttttattaaaaatataaaagttagttgagtgtagtggcgtatgtttataattttagttatatcggttgaggtaggagaattatttgaatttagggggcggaagttgtagtgagttatgattacgttattgtattttagaatttgggtgataagagtaagattttatttaaaaaaaaaaaaaaaaaaatttgaggtttatttttggttttatatgtaatttttttatttttgatttaatattttttataaatattattatattggatattaagtttaattaagttgttttttttaattaatgatagatttaaaagattttggtattagtagaaataaatgtattagttttttttaaattttatatattatatggttattgtgaataaattattttgtatttatgatttatgatgtaattatttgtt

SEQ ID NO: 1845 - DNA, 2484 bp, Artificial Sequence
  chemically treated genomic DNA (Homo sapiens)
tttagtagttgagattataggcgtgcgttaataagattggttaagttgtgtatttttagtagagacgaggttttattatgttgggtaggttgattttaaatttttgattttaggtgatttattcgtttcggttttttaaagtgttgggattataggcgtgagttatcgcgtttagtcgggaaatatttattagggataataaaggtttagaagaattttttggggaaattttgtgaggagtataattttagagggtttatagtagttatagttttttggcgtgatattaggtatattgtcggttgtataggttgttgggtataggtaggtatagttagtttggaagagtagttcgttttaaatttttggtttttttttaattaggagtaaatattggtagaaagagttagggtatatttattttttatatttagaatttttatttattattgaattatttggtttgtatagtgttttttgataatgtggtttataaaaattattattaaagttgtttttttatttgatttgggtggggttaaacgaggaaacgagaagttttttgtatgttttaaaatataaattaatgttaggaaattttgaaaatggatgttgtttgttaaatatgaaattattaagggagtttttgtaaaatttattcggtagtatgaggaacggtgtttatagcgtgttttaaacggttacggtttcgttttttatagattaaagtttaagtcgtatatttttatattttaaataaaattacgttatagatattatttacgtgggtacggatatatattaaataaggacgtagtatataattgaggggtgtttcggggagcgcggtaggaatgtttttcgggaagaattttttggtcgtcggagttttcgcgttgtagaggaaattagcgatttatcgtggtttcgaggtaaaagatagatattcgagacgtagtttatattattttggtttaaaaggataagatgtttaataaatatagagaatttagtgtgaagaaaagataaggataaatttggattacgtgtatagattttaggttttgttttagaggagttttgcgggagtttaggatcggttttttttttacggatggttagtttttttttgattgtttttaagttcggttgtgttaagtatttcgcgtcgatataaagtattggtatttgatattttaatagtaataaatttgttagtgttttatatattgttagtttttagagtttattattcgtgtttttagaatagacgttaaggttatgtttttagtcggattgtcgtagtttcgtcgtcgtgatgaggtaggtgtggaggttttagtagttttttcggcgttggcgtggaggtttttttcgcggattatttgaagtagggttacgttgtattgtagttgtatagtattgtaaggattaagtagcgatgttttaatcgtaaacgaagaggaaggtgaaatgaaggtaaagagaattaattattttttaaaatttggttataaatcgttatagaataagttttgtaaagtggattaaagtgatttattgttattttaggtttagatggtgtgatttgcgtggaaattatataatgtttttaatattattgtaatagagttattaacgggttattttttaaattatattgttgatatcgttaaaatttaagaggttagtgtttttaagtgagtagttgtattcgttgagagtaagcggcgtgggttgtaattcgtagatgcgtatagaattgaaaatgttaaatatgtatataaaattgttgataaaagggtttttttttaaaattaagatttaattattaaaaataaatttttatatttaaatgtatatattaatataattggtttgtaataattattttaaatagtttttatatttttttagtttgtgagtaggacgtcggttttttagttgtgtgagtttggtttcggattttttttaatttttcgtgtaaagagtcgaattagttggtagtggattttgtagagataagcggttacgtgtaaattttacgtgttttttatttaaagttggtttgagttttatttttggataggggttgtagtaaattttacgtgttttttatttaaagttggttttgagtatcgtttttggataggggttgaagtgggggtttattttttatggaacggttagacgttatcgtgggttgtaggagtttagtttataatgacgggttttgggcgtggaataatttatttagattttcgggatgtcgagtttgtaaaggggttgttaatggttaggtgggaaatttgggtatcggtagatttgattcgaattttagtatttttatggaaagtagagcgttcgttttagtgtttgtttattttatttatttatttatttttatttttttagtagtattgagcgcgtaaggtttgcgaggagtttgtgcggggcgatttaatgcgtgtaagagatgtgtga

SEQ ID NO: 1846 - DNA, 2484 bp, Artificial Sequence
  chemically treated genomic DNA (Homo sapiens)
ttatatattttttatacgtattgagtcgtttcgtatagatttttcgtaggttttgcgcgtttagtattgttgagaaaatggaggtgggtgggtgggtggagtgggtagatattggagcggacgttttgttttttatgggggtgttggagttcgagttaggtttatcgatgtttagattttttatttggttattggtaatttttttataaattcggtatttcgggagtttaagtgaattattttacgtttagggttcgttattgtgggttggatttttatagtttacggtgacgtttgatcgttttatgggggatggatttttattttagtttttgtttaagagcggtgtttagggttagttttgagtgagggatacgtggggtttattgtagtttttgtttaggagtggggtttaggttagttttgagtgagggatacgtggggtttatacgtggtcgtttgtttttgtagagtttattgttagttggttcgattttttgtacgaggaattgaagagaattcgaagttagatttatatagttgagaagtcggcgttttgtttataaattgggaaagtgtgaaaattatttaagataattattatagattaattatgttgatatatatatttaaatgtagaaatttatttttgatagttaaattttgattttagaagaaaatttttttgttaataattttgtgtatatatttggtatttttagttttgtacgtatttgcgggttgtagtttacgtcgtttatttttagcggatgtagttgtttatttgggggtattggttttttaggttttaacgatgttaatagtgtagtttagaaaatggttcgttagtggttttattgtaataatgttagggatattatatgatttttacgtaggttatattatttgggtttgaggtagtagtgggttattttgatttattttgtaggatttattttgtaacggtttgtggttaagttttgggaagtggttgattttttttgtttttattttattttttttttcgtttacggttaggatatcgttgtttgatttttataatattgtgtaattgtaatgtaacgtggttttgttttaggtgattcgcgggaggggtttttacgttagcgtcgggaaggttgttggggtttttatatttgttttattacggcggcgaggttacgataattcggttgggagtatgattttggcgtttgttttgggagtacggatgataagttttggaagttggtagtgtgtaaagtattggtaagtttgttattgttaaaatgttaaatattaatgttttatatcgacgcgaagtgtttaatatagtcgggtttgggggtagttaggaggaagttggttattcgtggaggaggggtcggttttggattttcgtaggatttttttgaggtagggtttgaagtttgtatacgtggtttagatttgtttttgttttttttttatattgagttttttatatttattgaatattttgtttttttaagttagagtagtgtaaattgcgtttcggatgtttgttttttgtttcgaagttacgatggatcgttggttttttttgtagcgcgagggtttcggcgattagaggatttttttcggaaggtatttttgtcgcgtttttcggggtattttttaattgtgtattacgtttttgtttagtgtgtattcgtgtttacgtagatgatgtttgtaacgtagttttgtttgaaatatgagaatatgcggtttaaattttgatttgtaaggagcggggtcgtggtcgtttggagtacgttgtagatatcgttttttatgttgtcgggtgggttttgtagaagtttttttagtgattttatgtttaataggtagtatttatttttagaattttttggtattgatttatattttgaagtatataggaaatttttcgttttttcgtttagttttatttagattaggtgaaagggtagttttaatggtggtttttatggattatattattagagagtattgtgtaagttaaatggtttaataatgaatgaaaattttgggtgtaaagagtaaatatgttttggttttttttattaatgtttgtttttggttggaaagaaattaaagatttaagacgggttgtttttttagattggttgtgtttgtttgtgtttagtaatttgtgtagtcggtagtgtgtttggtgttacgttaggaggttgtggttgttgtgggttttttggaattgtgttttttataaagtttttttaaaaggtttttttaagtttttattgtttttggtaaatgtttttcggttgggcgcggtggtttacgtttgtaattttagtattttgggaggtcgaggcgggtggattatttaaggttaggagtttgagattagtttgtttaatatggtgaaatttcgtttttattaaaaatatataatttagttagttttgttggcgtacgtttgtaattttagttattagg

SEQ ID NO: 1847 - DNA, 2482 bp, Artificial Sequence
  chemically treated genomic DNA (Homo sapiens)
gtggggggttcgagagtaattgtttttataggggttgttatgtttagatttatggatttggtatgtgttttattagttaggtttaacgacgttagttattaagtatgttttatttgtgcggttggggggttaggggtatttgatattggagttgtttttggttaaggttgttttatttgtggtgttaggtaattttttttttttgggggttttgtgatgggggagaggttgttcgtttagtatttatttttgttttttatcgtttatagtattttagtttgagaggttatagtttaagaaaagagttttttattttacgtcgttcgatatttttatataagtaaaataaaatgtatatttttatatatcgcgatttgggtgggaggcggcgttttggaataaacgttgtcgtcgaattttgtaaatatgatggggtggagatgggggtggcgggcggtaggcgtttattagggaggatttggtttggtttgttttacgggtcggtcgttcggttggtttggcggcgtggagagagatttcgtatgtatatatatttggttgttgagtacgtttttgtgttcgttgggggttagtagggtttaagtattgtttatagtattagcgttaggtttaggggggtgaggttgtaggtgaggttgggtagggtatttgagttttttgagttattagtttcgttattttcgttgtttgtttggtttagacggtagtggttgcgggtgcggtttttgcgtgaatagtttggttttcggcgagggttcgaggtggggaattttggtggttcggagttttcgggtcgtattgtagtgagcgggggtttagtagagttaggtagagttttaaagggtgagttattgatgtgtcgtgggttagagtcgttgttcggcgggttgttatcgggcggtacgcgtttttttagcgtattgtttgtcgaagttggttttttaggttttagtattgaggttttgttagcggtatttggttggtagtatttgggaagttttagcggttttttatcggtggttttgtcggtttagatgggatggtaagggtcggtggttatagcgtagttttgtaggttattggtagttaggcgtttgaggttacggttagttaggcgttgcgggaggttgtagggtatttcggaggaggagtcgcggaatttttgtagttaggtttagagtgggcgtgttcggtagttatatatttaggggttgtcgttgagttttaggtattgtagggtacgtaggggggttagggttttagtgggtagcgttgatagattgttggtaaatagatagagtgttatgaggcggttaaggttacggaaggtatgcgggtgtatatgggttacgcggttttggtgtagtaggagacggtcgaggttgtgtagtttacggaaggcgcgttcgggtacgttggagatgcggttgtcgtgtaggaagaggtgtgtgaggttgtttaggtcgcggaaggtgttattaggtagtgtttgtagcgcgttgttttgtaggtagaggtattgtagggtagttaggtcgcggaatagtttcgggtttagtttttgtaggtcgtagcggtttaggtgtagcgtgtgtaggcggtttaggtcgtggaatgtggtagggtttatagatcggagttgtgtattatcgttgaggtttagttgttttaggagggttaggttagtgaaggtagtcgtattaattcgggttagtatattcgagtgtagttataggatggtgaggttgcggtaggtacggaagttggtagttggtatatgcgagatgcggttgtcgtgtaggaagatgcgttggttggtagtagggatgtttacgggtatagtttgtaggttttgttgggggtagtttgtcgttattttgggtttattgtagtatacgtaggtatttgggtatggggttgttatttgttaggtttgtagttatagtatttatgttagtagtcggttttttgtgggtagaagatagagtggttagtaggaagggtaggggtattggagaagttggaggttttgttagagttaggtgggtttcggagattgggttttaggaggatttggggttgggtttaagatgtggttattattttcgggaatcgtagtgttgggatttttgttttataggttttatggacgatgttgggttagaatatgttttggagttatgtattttattttggaagttatatttgtagattttttatattatatttaggagtagtttattgggttattaggggtatttatttgaaggttttttggaatggatattggtgattgtaggtatttttttaggattttagtgaatatagagttcgtattgtaggagttttcggggggttttagtgggggttttatttatagggtttaggaaatattgtaatggggttggggtttttttgggtacgtttattttaaaaacgggcgtttggatgttcgagggcg

SEQ ID NO: 1848 - DNA, 2482 bp, Artificial Sequence
  chemically treated genomic DNA (Homo sapiens)
cgttttcgggtatttaggcgttcgtttttgagatagacgtgtttagagggattttagttttattgtagtgttttttaggttttgtgggtggaatttttattgggatttttcggggatttttgtaatgcgggttttgtgtttattggagttttgaggaggtatttgtagttattagtgtttattttaggaggtttttaagtgagtgtttttggtgatttagtgggttgtttttgggtgtggtatggggagtttgtagatgtggtttttagggtggagtgtatggttttaaggtatgttttagtttagtatcgtttatgaggtttgtgaagtagggattttaatattgcgattttcgggggtggtggttatattttggatttagttttaggtttttttgagatttaattttcggggtttatttggttttagtaaaatttttagtttttttagtatttttgttttttttgttaattattttgttttttgtttatagggagtcggttgttggtatgggtgttgtggttgtaggtttggtaggtggtagttttatgtttaggtgtttgcgtatgttataatgagtttaaggtgacgataagttgtttttagtagggtttgtaggttgtgttcgtgggtatttttgttgttagttagcgtatttttttgtacggtaatcgtatttcgtatgtgttagttgttagttttcgtgtttgtcgtaattttattattttgtggttgtattcgaatgtgttggttcgaattgatgcggttgtttttattggtttggtttttttggagtagttggattttagcgataatgtatagtttcggtttgtggattttgttatattttacggtttgggtcgtttatatacgttgtatttggatcgttgcggtttgtaggagttgggttcggggttgtttcgcggtttggttgttttgtagtatttttatttgtaggataacgcgttgtaggtattgtttgatgatatttttcgcgatttgggtaattttatatatttttttttgtacggtaatcgtatttttagcgtgttcgagcgcgtttttcgtgggttgtatagtttcgatcgttttttattgtattagaatcgcgtggtttatgtgtattcgtatgtttttcgtgattttggtcgttttatgatattttatttgtttgttaataatttattagcgttgtttattgaggttttggtttttttgcgtgttttgtagtatttgaggtttaacgataatttttgggtgtgtgattgtcgggtacgtttattttgggtttggttgtagaagtttcgcggtttttttttcgaggtgttttgtagtttttcgtaacgtttggttggtcgtgattttaaacgtttagttgttaatgatttgtagggttgcgttgtggttatcggtttttattattttatttggatcggtagggttatcgatgaggagtcgttggggttttttaagtgttgttagttagatgtcgttgataaggttttagtattggagtttggaagattagtttcggtaggtaatgcgttgaagggacgcgtgtcgttcggtgatagttcgtcgggtaacggttttggtttacggtatattaatgatttattttttgggattttgtttggttttgttgagttttcgtttattgtagtgcggttcgagggtttcgagttattagggttttttatttcgggttttcgtcggaggttaggttgtttacgtaagaatcgtattcgtagttattgtcgtttgggttaggtaggtagcgggggtggcgggattggtgatttagaaggtttaggtgttttatttagttttatttgtagttttatttttttgggtttggcgttggtgttgtggatagtgtttgggttttgttgatttttagcggatataagagcgtgtttagtagttaggtgtgtgtatatacggggtttttttttacgtcgttaagttagtcgggcggtcgattcgtggggtaggttaggttaggttttttttgatggacgtttgtcgttcgttatttttatttttattttattatgtttatagggttcggcggtagcgtttgttttagaacgtcgttttttatttagatcgcggtatatagagatatgtattttattttatttgtgtaaaaatatcggacgacgtggaataaagagttttttttttaagttgtggttttttaggttagggtgttgtgggcggtgagaagtaggggtgggtgttggacgggtagttttttttttattataaggtttttagaggaagggagttgtttggtattataggtgggatagttttggttaagggtagttttaatgttaggtgtttttggttttttagtcgtatagatggagtatgtttggtggttgacgtcgttgagtttggttgatggagtatatgttaggtttatgggtttggatatagtagtttttgtggggatagttgttttcgggttttttat

SEQ ID NO: 1849 - DNA, 2395 bp, Artificial Sequence
  chemically treated genomic DNA (Homo sapiens)
tataggttgatatattttattcgtttttttattttagggttttgcgatttattggtaagggtggagtttcgtttatttggttaaaacgaagacgttaaggagggaggtagttgtggttaggcggtattaggtggtgttagtttattagtagagaagtttgaagagtcggtttggaagaatgattattaagtcgaaggttttatatggtgtttgggggtatcgtttttttgtttcgtttgtcgttttttttgtttttattttatttttatttgttagtatgtttttgttttgttttatcgggatttaggtttttggattttatttgtttatattttttgttttgttttgtagttatttttttttttttacgtaagggggtttttatagttttgggtttttagtgattattttagaatgatttttttttaatggttttatagtttttttgtatgggtaggatgtttaattgtagagagatgggtaagaaagtattattattaagaatggaagtaattgggtacgggttgtagtttatttggcgaagtggttattatttagagtaaggagttcgttcgtgagacggcgtttcggagtcgcgagttggaattttgttggtttatattcgagtagtttgcggggaacgaggatattggtttagtttttgttattttcgagtttttttttttattgttttttgtgagttaagattataagttatttatttttttttatatttttatagttttatataggttcggtgtgtagtaaggaatgaaatgggagttttttgatattttgttttttttgatagttttttgtttgtatttttttttttattagttattttttaagttgttgtttagaattaggtgttggggtttgatatgtatattatttagaatgattgagtatttattatgtgtgagttttataggaaagtgttggaatgggtttgaatgtaaggatgttggttttaggttgttatagattcgtggggtggggaggatagataagtgaagggtagttatagtttagggtattaggggttatcgtaggttaggttggggcgtatttagggtcgggtatgggaggggcgttgtgtttgttatatgttgttttttttttagtttttcggggttttttgtttagtttttttgaggttttttagtagtttcggatttgtttaggagggaggaagtatcgtttatttacgtagtcgtttttagaggagtagttcgaggaagagtttaggaagttttcggtggttttgcgttttataagttcgttggttttgttgttttttgagttattcgtgttttttttttttcgtattcgtaggtttttatttgtgtagggaagaattaggggtttttttgggtttttaagagtttttgaaaagtggggtttgggtagagaggtgttttgaggagggaatttcggggattgtaggggatattgtgaggagtatttcgcgggaggtcgaggaagtaaagtttcgggacggagggttttatatttattttagttggcgttattatgtagtttttttagggagtttttgggtgggaattaggattcgtggattagcgatttattgtagtaggaggtgtgtgtattagaggacgggtttagttgtggcgttggggataggcgttttatgttgttggattttttttttaaggttttgtgggataattatgagggtagaggtagggagtagggaggtgagtttagttaggagtatgaaggaaagttatagtttgcggttttgtttagtgtagggtgtgggtttttttgttgttaggtaattcgtagttgttatttttttgatttttttaatgttggtacgtttttttttgttttttttgaattttattagtagatgggtaagacgggtagcggtagttagggatggagttatatttaaattttataatttattgaaattagatagatttgatttggttttagagttagttaaagttttagggtttgttttttgggttttatgtttgtgagtcgggtaggacgattaggtagttgttgttatagtttattttttagtggtttgaggattgcgtttgtttttagttatgtcgttggttagttgttgaggtcggataggtggtgagatatgtaggcgtggggttaggaaggatggtaaggttgatacgttcgtttagagtagggggggtttttgtgagtttagtttgtagttttggggttttcggtttggtttatggttgaagttgtttttttttattttttgtttttttttttttttttttttttttttgagattgagatggagttttatttttgttaatttaggttggagtgtaatgttatgatttcgtttattgtaatttttgtttgttaggtttaagcgattttt

SEQ ID NO: 1850 - DNA, 2395 bp, Artificial Sequence
  chemically treated genomic DNA (Homo sapiens)
gagaatcgtttgaatttggtaggtagaggttgtagtgagcgagattatggtattgtattttagtttgggttgataagagtgaaattttattttaattttaaaaagaaaaaaaggaaagaaagaaaataggaagtggagagaggtagttttaattataagttaggtcggaaattttaaaattgtaggttgggtttataggaattttttttgttttggacgggcgtgttagttttattattttttttggttttacgtttgtatgttttattatttgttcggttttagtagttggttagcgatatggttgagaataggcgtagtttttaggttattgggaaatgggttgtggtagtagttgtttggtcgttttgttcggtttataggtatggggtttagaagataggttttgaggttttggttagttttgaggttaggttaggtttgtttggttttagtgggttgtaaagtttgaatgtggttttatttttagttgtcgttgttcgttttgtttatttgttggtgagatttagagagaataggagaggacgtgttagtattgggagagttaggggaatggtagttgcgagttgtttagtaataagggaatttatattttgtattaggtagggtcgtaggttgtggtttttttttatgtttttggttgggtttatttttttgttttttatttttgtttttatggttgttttataggattttgaagaggaaatttagtaatatgaagcgtttgtttttagcgttatagttgggttcgttttttgatgtatatattttttattatagtgagtcgttggtttacgagttttggtttttatttaggagttttttggaggaattgtatggtgacgttaattggggtgagtgtggagtttttcgtttcggggttttgttttttcggtttttcgcgagatattttttatagtgttttttgtagttttcgggattttttttttagagtatttttttgtttagattttattttttagaagtttttggaggtttagaagagtttttggtttttttttgtataggtgaggatttgcgggtgcggaggaggagaggtacgggtggtttagagagtagtagggttagcgggtttgtggggcgtaaggttatcgaggattttttgggttttttttcgggttatttttttgaggacgattacgtgggtaggcgatgtttttttttttttgagtagattcgaggttgttgggaggttttaggaaggttgggtagggagtttcggggagttggagagagggtagtatgtggtaggtatagcgttttttttatgttcggttttgggtgcgttttagtttggtttgcggtggtttttggtgttttgggttgtgattgttttttatttgtttgttttttttattttacgagtttatggtaatttaaggttaatatttttgtatttaggtttattttagtatttttttgtggggtttatatatggtgggtgtttagttattttgagtggtgtgtatgttagattttagtatttagttttgaatagtagtttgaggggtggttggtgaggagagggatgtaaataggaagttgttagaagaaatagaatgttaaagagtttttattttattttttattgtatatcgggtttgtgtggggttgtggggatgtgaaggagggtgggtgatttgtggttttggtttatagaagatagtgaaggaagaggttcgaaagtgatagagattgagttagtgttttcgtttttcgtaggttattcggatgtggattagtagagttttagttcgcggtttcgaagcgtcgttttacgggcgggttttttattttggatggtggttatttcgttaggtgggttgtaattcgtgtttagttatttttatttttggtgatagtgtttttttatttatttttttgtagttgggtattttgtttatgtagagagattgtaggattattggggaaaggttattttagaataattattgggagtttagagttgtggggatttttttgcgtggaagggaaggagtagttgtagagtaggatagagggtgtgggtaggtgggatttaaggatttgggtttcggtagggtaggatagaggtatattggtaggtgggggtggggtaggggtagggaggacggtagacgggataaaggagcggtgtttttaaatattatatggagttttcggtttgatggttatttttttaggtcggttttttagatttttttattggtgggttggtattatttggtatcgtttgattatagttgtttttttttttgacgttttcgttttaattaggtgagcgagattttatttttgttaataaatcgtaaggttttggggtgaagggacgggtaaagtgtgttaatttgta

SEQ ID NO: 1851 - DNA, 2390 bp, Artificial Sequence
  chemically treated genomic DNA (Homo sapiens)
ttagcgggggttaagtggagttagtttggtgttgttttaagggggttcggttgggatcgtttttaggagggtgacgggttttaataagaatgaatagttaggaattggggttgtaggaggagtgaggggggattatttgtgagaagtagtttgtaggtgagatagcgttattgatggggtggggaggggtattttagaggcgtttatggggtattagtcggatttatttagtaggtgtggagtgggttacgatagattttagtaaatacgttgtatttttggtttcggtttttttttttcgaagattgtgagaggaggtgttattttaaattaagtttagaattttgataattatttagggttgggtattttaatatttgaaatcgtgaatatttttgtgattaaaggagtttaaaagaatttttgttatttgagagagaaaagagaagtttaggaatttgttttagattttatttaagcggtggaaaaaacgggtttttttagggtgtatagggataggttggagggtaaaggaaatggcgtttttttttttaatagttatttttattttgttgggtgtacgtgtgtatttaaaaatttttttagaaaaaagttggtagaaaaaggaatgtattatttttaagatagtagtttaagttatgaatgtattaagaatttgttttgagacgatttttggtagttggtaaaagtgtaattttgagaagaggtcgtgaaatatttttaacgaaatagaaggatttttaaattgaagaacgttgtagaaggtattaagcgcggtgttttcgttttatagatgagtagtttggggtttagcgggtgaagcggtttagttggttggtgtagagtttagtttagtatttagattttttgatttgggaagagttattttttttcgaggttagttgggatgtgcgaaggaaattaggtttcgtggagaaagttatttggattttttagtaagggaaagtttaagtaaagaaaatagttggttaagaggaaagatagtggtggtaatgttgagagagtgtcgaggaaagagtggagagtttgtagttaagacgaatatttatagtaagtttttaatagttaaggatttgaaagttattatcgtttagttggatacgagagtaagaatttagtatattttgtcgggttttgttagttgtgtagagtataaggttttaggtaagttagtgtcggggtaaaatattgttttcgtcgaaagtagagttaagaatggaatggaaaaagattgaggtttgtatagcgtacgtacggggattttaaaatggattcgaaaatattttataatgtaattttgggagatcgtaatataaaaaggaaggaatttaatgtaggtgagttttaatagatattacggcgtgtttttgaaatagatgaaaattgaattgttttttaaatattttgagagggttattaatgataggaattttttcgtttgattattaattattatttcgtttatatagttaggatagttgtggagtaggtcggtttagagggatttttagggtaggtttaggttagtgtttagtttggttttgaattgtgttttgtagagttttatagtaggtttcgtaggaggttagggtattttttttagaaaatttaagttttttagttggataggtttgatttttagttttgtttttagttttcgtttaattatgtaattagggtaagttatataatttttttgagtttgttatttatataatataggagtgttattttgtagggttgttatgaagtttaaataaataatgtgtgtaaaatatttagtatatagtaggtttttattaaacgttatttttttatttttcgtttgtttgggagggtagtgattagcgcggattgtttttgtatttgtttgtagggattttttttgggtaggtaggatggttattgcggtgtttaggtagaagagaggaggagatgagtttggcgttagtttttggttgcgttttaagttgcgtttgtttatattttttttttaattatagtttttttaatcgagttgttagcggtgtttttgtgagttttaatttaggggggattagttaatttgtatagataatagtaagtgtttattgtagtttttttaagagtagtttatatttatttatttattttaatattttaatagagtttaattcgtagtttattggtttttggtgatttttgttttggaggttggggtgggttttaatttttgagttttattaagcgttttagggaatatggaatattggggtgtagggataattttataaatgaatggaggaagggagaatattgaaattttgtttgttagggtattatcgtttattgttttgtataaaggtgtg

SEQ ID NO: 1852 - DNA, 2390 bp, Artificial Sequence
  chemically treated genomic DNA (Homo sapiens)
tatatttttgtgtaaagtagtaggcggtagtgttttagtaaataggattttagtattttttttttttttatttatttgtgaaattgtttttgtattttaatattttatattttttagaacgtttgatagaatttagaaattaaaatttattttaatttttaaaataggagttattaaaggttagtgggttacgggttaaattttgttgaggtgttgaagtgggtgggtgggtgtgaattatttttgaagaggttgtagtaagtatttgttattatttgtgtaagttaattagttttttttgagttgaggtttatagaagtatcgttggtagttcggttaagaaagttgtaattaaaaaggaaatataagtaaacgtagtttgagacgtagttaagggttggcgttaagtttattttttttttttttttgtttaaatatcgtagtgattattttgtttatttaaaggaggtttttataaataagtgtaagaataattcgcgttgattattgtttttttaggtaagcgaggagtggggaagtaacgtttgatgagggtttattgtgtgttaggtgttttgtatatattatttgtttaggttttataatagttttataaggtaatatttttgtgttgtatagatgatagatttagaaaggttgtgtagtttgttttggttgtatagttaaacgagggttagaaataggattaggagttaggtttgtttagttggaaaatttgggttttttagaaggggtattttggttttttgcggagtttgttgtgggattttgtagaatataatttaaggttagattgaatattagtttgaatttgttttgagaatttttttaagtcgatttattttatagttgttttgattgtgtaagcgagatgatgattagtgattagacgaaaggatttttgttattggtaatttttttaaagtatttggaaaatagtttaatttttatttattttagaagtacgtcgtggtgtttattgaggtttatttgtattgaatttttttttttttatgttgcgattttttaagattgtattgtggagtgttttcgaatttattttgaaattttcgtgcgtgcgttatgtaggttttagtttttttttattttatttttaattttattttcgacggaagtagtgttttatttcgatattggtttgtttaggattttgtgttttgtataattagtagggttcggtaggatgtattgaatttttgttttcgtgtttagttggacggtgatggtttttaagtttttggttgttgggagtttattataaatgttcgttttggttataaattttttatttttttttcggtatttttttagtattgttattattgtttttttttttggttaattgttttttttatttaggtttttttttgttagaaagtttaggtaattttttttacgggatttggtttttttcgtatattttagttggtttcgaggaaaggtagttttttttaaattagagaatttggatgttgggttgggttttgtattaattagttgggtcgttttattcgttgggttttaaattatttatttgtgaagcgaaggtatcgcgtttgatgttttttgtaacgttttttagtttggaaatttttttgtttcgttggggatattttacggtttttttttaaggttgtatttttgttagttgttagggatcgttttaaaataggtttttagtgtatttatagtttgagttgttgttttgaaagtagtatatttttttttttgttaatttttttttgagaaagtttttgaatgtatacgtgtatttaatagagtgagagtggttgttaagagagagggcgttattttttttgttttttagtttgtttttgtgtattttggaggggttcgttttttttatcgtttagataaaatttagggtaagtttttgaatttttttttttttttttaggtaataaaaatttttttgggtttttttagttataaagatatttacgattttaggtattaaagtgtttagttttgggtgattgttaaaattttgaatttgatttaaagtggtatttttttttatagttttcgggagggagagatcggagttaggagtgtagcgtgtttgttggggtttgtcgtggtttattttatatttgttgggtggattcggttggtgttttatgggcgtttttgagatgtttttttttattttattagtggcgttgttttatttgtaggttgttttttataggtggtttttttttattttttttgtagttttagtttttggttgtttatttttattgggattcgttatttttttggaggcggttttagtcgagtttttttaagatagtattaggttggttttatttggttttcgttgg

SEQ ID NO: 1853 - DNA, 2444 bp, Artificial Sequence
  chemically treated genomic DNA (Homo sapiens)
tgaggttatgaatataaatttagttttatatgtttcggaattgtatttgaagatgtggttttaaggtagttttatatttagtgttttgggcggggcgggggggtagttttatatttagtgttcggggttgggggggtagttttatatttagtgttttggggtggggggggtagttttacgtttagcgttttgggaggggtagtttcgtgtttagtgttttgggagaggttgttttagttagtgtttttaaagttgtcgttagttgggagaggatggtaggtttttttttgggtttcgggaggttgaattagttaaatgggagaatggggagatgggggagaagggggagatgggggagatgggggagaagggggagatgggggagatgggggagatgggagtaatgggagtaataggagtaatgggagggttttattattttgattttatttttaatcggtttgttttggatatattgtttaatttttagtagttattttattagtttattttattagggggttttagggagatattttttaatagatatagaagcgtaggaggagaacgagggttttcgttttaattttaggtttaaggttattttgtttaggtattgggttacggtattttaagggtgtttttgttgatatattagtttcgaagggttagttattttttagaaataacgttttcgaggtggggagggttttaagttagtatcgtatttgttagatacggaatagagtaggaatcgaagtagggaacgtaggtttaagttatgttagagataggttttttgttttagattgtggtttcggttaggaaaggaggcgcgagcgtgtggttggagaattttatattaaatattttggttttttgagtggaaattatattggtttaggaaaaggaagggggtgagaaggttggttggttggatggttgttttaagtaatgcgaaaagtaaatttacgaaattattttttgaaaataaagtgcgagggttgtgttattttggttgtagtagggtcgtatttgtttttttaattaatgtattattttttttagaaatagaataaagataaaagcggatgtataataaattattttagtttgttagcgttttgagagatgaaaaatttcgtttagagataggattgtgggtttataaaaaaattataaagtttaggtattttgttaagtttttagaacgttgtcgggtcgttttttttttttttatgtttagtcgtgcgtggttgtcgggatagcgtttatttcggtaggcgacgagttagtgtgggaatttaggggtcgttttagtttcgttggggtgttgagttgtagggagtggtttgtatcgattttttttttttttatttacgttatttaaaagtatattagaggggttttgagatgaaattcgtatattttttagagtttttttagattaatgcgcggatgagaacgtgtttattgcggggatgcgttcggttgcggatgtgaagaaattttttcgtaggagtagcgattttgttatatgggtttcgtatacggagttttcgttagttcggggtttcggtttcgggaagtatttgggaggcggcggggaaggttggttttggttggtttgatatacgtttcggggttcgttttttatgggttaggtttggtgttttatttattattgttgggaagttatggaggttttttaagggtgatttgcgaggtgggggtgtttgtttttttttttgaggtaagaggggtttggttttatcgtttgtcgtaaaaaaggaggagtagtttaggtttgtacgtggttttgagtagttcgtcggaaggttttagtttggtttttttatttcgtttttttttttagggtcggtttagttttatagatatcgtttttatttacgagttggaggcggtttttttggtttatgcgttatattttttttggtttttgtaggtgttttattttatttagattttgttttttaatgggtggtatttttaattatttatttttttttttggagacgttaaatttttttgattttttttttttgtttgttttataatcggttggttttgtttttttttttttttcgtgtttagtgttttggttttagttttgggtttttattttattttttaggtttgcgtattattagattgttttgattttttgttcgtcgtttatttgttgttaggtttttttttttttttttttttttttgagatagggttttattttattgtttaggttagagtgtagtggtattattttagtttattgtaatttttgtttttcgggtttaagcgatttttatgttttagttttttaagtagttgggattataggtgcgtattattatgtttagttaatttttgtatttttagtaaagatagggttttattatgttggttaggttggtttcgaattt

SEQ ID NO: 1854 - DNA, 2444 bp, Artificial Sequence
  chemically treated genomic DNA (Homo sapiens)
gagttcgaggttaatttggttaatatggtgaaattttgtttttattaaaaatataaagattagttgggtatagtggtacgtatttgtaattttagttatttgggaggttgaaatatgagaatcgtttgaattcgggaggtagaggttgtagtgagttgagatggtgttattgtattttggtttggataatagagtgagattttgttttaaaaaaaaaaaaaaaaaaaaaagagtttggtagtaggtggacgacgggtagaagattagagtagtttgataatgcgtaggtttgggaggtggggtggagatttagaattgaagttagggtattgggtacggggagaaaggagggataggattaatcggttatggagtaggtaggaaggaggagttaggggagtttgacgtttttagaagggagaatgagtagttgaaggtattatttattgagaggtagggtttgggtgagatgggatatttgtagaggttaaggaaggtgtggcgtatgagttagggaggtcgtttttaattcgtgggtggagacggtgtttgtggggttggatcggttttgggaagggaaacggaataaaaagattaggttggaatttttcggcgagttgtttagggttacgtgtagatttgagttgtttttttttttttacggtaagcggtgggattagattttttttattttaagagggaaggtaggtatttttatttcgtaggttatttttgagaagtttttatggttttttagtagtggtaggtggagtattaggtttggtttatgaaggacgagtttcgaggcgtgtgttagattagttagggttaatttttttcgtcgttttttaggtgtttttcgaggtcgaggtttcgggttggcgggggtttcgtgtgcggggtttatatggtagggtcgttgtttttgcggaggggtttttttatattcgtagtcgggcgtattttcgtaatgggtacgtttttattcgcgtattggtttgggaaggttttgagaagtgtgcggattttattttaaaatttttttagtgtgtttttgagtggcgtgaatgggggagaggggagtcggtgtaggttattttttgtaatttaatattttagcgaaattgaggcggtttttgggtttttatattgattcgtcgtttgtcggagtgagcgttgtttcggtagttacgtacggttgagtatggagaaggaaagggcgattcggtagcgttttaggggtttggtagagtgtttgggttttatggtttttttgtaaatttataattttatttttgggcgaggttttttattttttagagcgttggtaggttgaaatgatttattatgtattcgtttttgtttttgttttatttttggaaaaggtggtatattggttagggaagtaggtacgattttgttgtagttaggatggtatagttttcgtattttgtttttaaaaggtggtttcgtgggtttatttttcgtattatttgaagtagttatttagttaattaatttttttattttttttttttttttgagttagtgtgatttttatttaggaaattagggtgtttggtgtagagttttttagttatacgttcgcgtttttttttttgatcgaggttatagtttgaggtaaagggtttgtttttggtataatttgagtttgcgttttttgtttcggtttttgttttgtttcgtatttgatagatgcgatgttgatttggggttttttttatttcgggggcgttgtttttggagggtggttggtttttcgaggttgatgtgttagtaggggtatttttagggtgtcgtgatttagtgtttgagtaaagtggttttaagtttggggttgaggcgggggttttcgttttttttttacgtttttgtgtttgttaaagggtatttttttgggattttttggtagggtggattgatgggatggttgttgaggattagatagtgtgtttagagtaggtcggttgggggtggggttagggtggtgggatttttttattgtttttattgtttttattgtttttattttttttattttttttatttttttttttttttttattttttttatttttttttttttttttatttttttatttttttatttggttggtttagtttttcgggatttagaggggagtttgttatttttttttagttggcggtagttttgggagtattggttggggtagttttttttagagtattgggtacgaagttgttttttttagagcgttgggcgtgaagttgttttttttattttagagtattgggtgtgaagttgtttttttaatttcgagtattgggtgtgaagttgttttttcgtttcgtttagagtattgggtgtgaagttgttttggggttatatttttaagtgtagtttcggggtatgtgggattgggtttgtgtttatggtttta

SEQ ID NO: 1855 - DNA, 2346 bp, Artificial Sequence
  chemically treated genomic DNA (Homo sapiens)
tttttttttttatagtaggatttgagttatatgtgagttgggaagaggattgttttgttagtggtatggaagtgagaggggttaattttttagattattagttttattattataggttttatcggttttagtatttagttttattatttaatttgttagttttaaaattaatttttttagtattttttgagtatttatttgttttaatgttaagttaaggatagatttggttttcggttttttaggattttgtttttattgggaaggttggatagtggggagtcggtagtttttagtaggtggggttcggaattttttttgtaattttaaaggaggtttaagagaggttgtttttgggaaatttgaaatttagttatatggggttaagttattaggttgtttttttttattgtggttttttgatttatttgttagagtttggatttttttttagggttaaagttttttttttagtttttttttttattgttttttagggggttttattttgagttagaaaaggtgttcgagatagaggttattttttttttatttgtttttgagtatggttttttttgagaggttttgggtttgtgtgatatttttatggatatattgggaaagttagttgttttttcgtttttatttaggaggttggggttatagtagttggggttttagttttttggttttttggttttttttttatttgtttttttggtaggatttagtatgttttgggatagagtttatttgatatgggatagtaggaggttgtttttgttaaaattgggtgaaagtggtgttttcggtatggtttttttagttagaggggttatggtggtttttgtttttggtggagttttcggagtttgaaagagatggaagtttgggggtaaggatggagtttagagagaggtaggtaaatatattatttagaaaaggtaaagtttattttagtgttgatagagagagggtgagttttgtatagtaattttaaaaatatgttattttttttatttaagaggtaagaatcggttgtaagttatggggttattaaatcggtcgtagttatagtaagtagaagaggttacggtttaggtttttttagattttttttgggatatacggttttttgggggggttcggcgaaattattcggattaggagttatcgtatacggttatattaggtttgtcgtagaggtaggtagttaaggttacgtggtaggcggtgatttttttgcggtacgtggtaatgagaggttgcgagagatttatttttttggtttggaatagagtacggagtttttttgggtttttttcgaagttatttttagttaggaagtttatgaaaggtatgttgacggtattacggatatggttcgagtttagttttgggtagggtagaggatatagtttaggggatgtatgaggggtggggattaatggggtttggaggattttattagttatagttggaaggatagatagttttgtaaataaaaataatatttttgttttgtttggagtttaatttatttttagttttatttattattattttttatgatttaagatgtttgtaattttttttttaatatttgttttgaagtagagatgtttaaaattatatttgtttgagaagatagcggtatgagttttagttttattaatttttattttgggtaaattattttatttttttgaattttagtttttttatttgtaaaatgggtttagtggtatatatttattttatagttatgttgagaagagtaaatgggataatttattgtaaatgttatgtgttgagaatatagcggtgaaaggtagagatatagttaggttttttgggagattttagtttaataagaaaggtagatgttaaatagataattatataattaattagatatgtttttattttatagatgaattcgttgagttttggtaaaataatacggtttatttaaggttatatagaaagatgaaggtagatttaggattatatcggggtttttggttttttgttaagtatatagttgtagaaagagtaagtgatttggtgttagatgtgaggttaaattttattggagtaagttatgttagttttttgagttttagtttttttataggaaaaatggaaatgagagtatttattgtgtattggttgttgtacgaagcgggtggtataaggaaagcgttggttttggaggttggtttatttattttgttatgttgcgtttttagttattttattatttatggagggggtagggggagaatagggatagtgtgggtttttttggttttttttaagaatttggatggaagtagagtggag

SEQ ID NO: 1856 - DNA, 2346 bp, Artificial Sequence
  chemically treated genomic DNA (Homo sapiens)
ttttattttgtttttatttaagtttttggaggggattaaaaaggtttatattgtttttattttttttttattttttttatgggtggtgaagtggttgggggcgtagtatggtagggtgggtgggttagtttttaaagttagcgttttttttgtgttattcgtttcgtgtagtagttaatatatagtggatatttttatttttattttttttatggagaaattgaggtttagagagttgatataatttgttttagtgggatttgattttatatttgatattaggttatttgttttttttgtaattgtgtgtttaatagaaaattagaggtttcgatgtaattttgggtttgtttttatttttttgtgtggttttaggtgagtcgtgttgttttgttaagatttagcggatttatttgtaaaatggggatatatttgattagttatgtggttatttgtttagtatttgttttttttgttagattggaattttttagagggtttggttgtgtttttgttttttatcgttgtgtttttagtatatagtatttgtaataagttgttttatttgttttttttaatatggttgtgagataggtatgtattattgagtttattttatagatgagaaaattgaggtttagagaagtgaaatgatttgtttaaggtaaaggttagtggagttgagatttatgtcgttgtttttttaagtaggtgtgattttgggtatttttattttaagataggtgttaggagaggagttgtaggtattttaagttatgagaaatgataataggtggggttgggaataaattgagttttaagtagagtaaagatgttatttttatttgtaaagttatttatttttttagttatagttgatggaattttttaggttttattagtttttattttttatatattttttaagttgtgttttttgttttgtttaggattggattcgggttatattcgtggtgtcgttaatatgttttttatggattttttgattgaggatggtttcgagaagggtttagaagagtttcgtgttttgttttagattaagaaggtggatttttcgtagttttttattgttacgtgtcgtaagggagttatcgtttgttacgtggttttggttgtttatttttgcggtaagtttgatgtggtcgtgtacgatggtttttggttcgagtggtttcgtcgggtttttttagagagtcgtgtgttttagggaaagtttgagaaggtttgagtcgtgattttttttgtttattgtaattgcggtcggtttagtgattttatgatttatagtcggtttttattttttaggtgaaggagatgatatgtttttagaattgttgtgtaaggtttattttttttttgttaatattggaataaattttgttttttttgagtagtgtgtttgtttgtttttttttgggttttatttttgtttttaaatttttattttttttaaatttcggagattttattaaggatagagattattatagtttttttggttggggaagttatatcgaggatattatttttatttagttttggtagaaatagttttttgttgttttatgttaggtggattttgttttagagtatgttgggttttattaggaagataggtgggaagggaattagaaagttagagagttgaagttttagttgttgtagttttagttttttgggtaggggcggagggatagttggtttttttaatatgtttatagaggtgttatatagatttagggttttttagaagaggttatgtttaggagtaggtgaaaggaaggtggtttttgtttcgagtattttttttggtttagagtaagattttttggggagtagtggagggaggggttggagaaagagttttggttttgggagaaggtttaggttttggtaggtgaattaggaagttatagtagaagaaagtaatttgatagtttggttttatgtggttggattttaagttttttagaaatagttttttttagattttttttggggttgtaagaagaatttcgggttttatttattggggattatcggttttttattatttagtttttttagtgaagataggattttggagggtcggagattaagtttgtttttggtttggtattggggtaaataggtgtttaggagatgttgaggaggttggttttggggttggtaggttgggtgatggggttgaatgttgaggtcggtgggatttgtagtggtgggattggtagtttggagggttgattttttttatttttatgttattaataaaatagttttttttttagtttatatgtggtttagattttattgtgggaagaagaa

SEQ ID NO: 1857 - DNA, 2400 bp, Artificial Sequence
  chemically treated genomic DNA (Homo sapiens)
ttattttaaatttatgttttagttgttttttatttaaaatggaaataataatatttattaaataataatatgtataaaatatttagtagatagaagatatttaataaatagtaggtttgtttttattattttttgtaagagttttttgttaattatttggtttatttgtatgtgtaggttaaattttttatgataaattggatcgtgttttgtttttattgttattgttttatatagttttattttgtttgatattatttggggtttagaaattttttttggttgggcgcgatggtttatgtttgtaatgttaacgttttgggaggttgaggtgggcggattatttgaggttaggagtttgagattagtttggttaatatggtgaaattttgtttttattaaaaatataaaaaaaaaattagtcgggtgtggtggtgcgtgtttgtaattttagttatttaggaggttgaggtagtagaatcgtttgaatttaggaggtggaggttgtagtgagtcgagatcgtgttattgtattttagtttgggtaataagagtaaaattttattttaaaaagaaaaaaaaaaaaaaaggttaggtatggtggtttatgtttgtaattttagtatttttggaggttgaggtaggcggattataaggttaggagttcgagattagtttgattaatatggtgaaatttcgtttttattaaaaatataaaaattagttaggtttggtggcgtatatttgtaattttagttatttaggaggttgaggtaggagaatcgtttgaatttgggaagcggaggttgtagtgagttgagatcgtgttattgtattttagtttgggtaatagagcgagattatattttaaaaaaaaaaaaaagaaatttttttgtgtgtaggattttgatgttgtaaagagataaagattgatgttgttaatttttggtttgagtgggtagtgtgtatagttgtagtgttttaatagtttgtttttttttttttgtttttttagttgtttttgggatattttagtatgtggacgagtagtttttgttacgtttttttttatttgtggttttggtgattatgttttggtttttgattgtttaatgttgggtttttgtttatattcgtggtagggttttggattggtgacgtgttattttaatttttggtgtttggttttttggttaattttgatttttggaattagtgggattagtaatatattaaggagttttgtttttttattagagttttggaattcgagattagttggcgatgatttttgaatatcgttatcgttgtaaatattttataattttaggttttggtattgagttattttttatgggtgatattatgaaattttgttttagttagttttgtaggttttgattttgtagagggaagaggtagaaagagagaaattgttagagtataattttatttgagtttaatattatagaaataaagggatgtattaaatggtatttttggaaatttttatgtttttaaatattttttggtaagttgtttttgaagttagtgggggttttttagatagagaggttttttttttaaattttagtgtcgttttgttttttttttttttttttttatttttttttttttttttttgtagagatgtaagaaattgttgttttataaaaattataattgtagtagttaaagttggggttatttcgtgaatttattagagatttaaagattttttattggttttgggttgtgtttagtgtttttggttttagagaataatttgaatgattttttggttttttggtataaattatttttggtgagatatgtggtttaatttataggttttttattagttttttttttaaaattatgtttatttgtttttttttgttagagaatatatagtcgagaatattgtcgaagttgagattgattattgtgtattaggaaagatttggagttaggattttggtgggatttggagtttcgaggtagtaataattgaataagtagttttgttttttaggttgtagaagtttgaatgtatttttttttagaatttgttataggaaattgggggttttgttaggttagtttaattgtatgtaaaagattattatttttagaagttaagttgttttttatgaagaggtaaggaaaggggaaatttatatgtgattttgattttggtatggtttgatagagttttttgaaaattttttgtatgtgtgttaaaattagggaagtatgtgattgttaagtaggtaatttttgatgatttgtaaagttaggtggtagggttttggggagttttagtataatgatattgtgtggtttttttttttgtggaatcgaggggaaattattttttttaatattttgatttgattt

SEQ ID NO: 1858 - DNA, 2400 bp, Artificial Sequence
  chemically treated genomic DNA (Homo sapiens)
aaattaaattaaggtattgggaagaataattttttttcgattttataggagggaagattatataatattattgtgttggggttttttaaggttttgttatttggttttataaattattaggggttgtttgtttggtagttatatgtttttttggttttagtatatatataaggagtttttagggaattttattaagttatattaaaattagggttatatgtgggttttttttttttttgtttttttataaaagataatttggtttttgaggatggtggttttttgtatgtagttgggttgatttgataaagtttttagttttttgtggtaggttttgggagaggatgtatttaagtttttgtagtttaggggatagggttgtttgtttagttattattgtttcggagttttaaattttattaaagttttgattttaggttttttttaatgtatagtagttagttttagtttcggtagtattttcggttgtatgttttttggtagagagaggtagatgaatatagttttagggagaaagttgatgggaaatttgtgagttaagttatatgttttattaggaataatttatgttaggaaattaggaagttatttaagttgttttttgaggttaaagatattgagtatagtttagagttaataaaagatttttgagtttttggtgaatttacgaagtgattttagttttagttattgtaattatgatttttatgggatagtaattttttgtatttttatagaggaagaagagggggagtgggaggggaaggaaagagaatagagcggtattgggatttgaaaggggaatttttttatttgaggagtttttattggttttagaagtaatttattaaggggtatttaaagatatgaaaatttttagaaatattatttggtgtatttttttgtttttgtaatattaaatttaggtgaaattatattttgatagtttttttttttttgttttttttttttgtagagttaggatttgtagaattggttgaaataagattttatggtgttatttatgagagatgatttaatgttaaggtttgaagttatagagtgtttatagcggtggcgatatttaggggttatcgttaattggtttcgagttttaaagttttgatgaagaaataagattttttgatgtgttattgattttattgattttaggagttaagattagttaggaagttaaatattaggagttggggtggtacgttattagtttagagttttgttacggatgtaggtaggagtttagtattaggtaattaggagttagaatatgattattagggttataaataggaagaggcgtgataggaattgttcgtttatatattggggtgttttagggatagttggagagatagaaaggagaaaataggttattagaatattgtagttatgtatattgtttatttaggttagaagttgatagtattaatttttatttttttataatattagaattttatatataaaaagattttttttttttttttttgaaatgtagtttcgttttgttgtttaggttagagtgtagtggtacgattttagtttattgtaattttcgttttttaggtttaagcgatttttttgttttagttttttaagtagttgggattataggtgtgcgttattaagtttggttaatttttgtatttttagtagagacggggttttattatgttggttaggttggtttcgaatttttgattttgtgattcgtttgttttagtttttaaaagtgttgggattataggtatgagttattatgtttggtttttttttttttttttttttttgaggtggagttttgtttttgttgtttaggttggagtgtaatggtacgatttcggtttattgtaatttttattttttaggtttaagcgattttgttgttttagttttttgagtagttgggattataggtacgtattattatattcggttaattttttttttgtatttttagtaggaatagggttttattatgttagttaggttggttttaaatttttgattttagatgattcgtttattttagttttttaaagcgttggtattataggtatgagttatcgcgtttagttaaaaaaaatttttaaattttaaataatattaggtaaaatgaaattatgtggaataataataataaggataagatacggtttaatttattataaaaggtttggtttgtatatgtaaataaattaggtgattaataggaaatttttgtaggaaataatgaaagtaagtttattatttgttaagtattttttatttgttaagtgttttgtatatgttattatttggtggatattattatttttattttgagtaggaagtagttgaaatataggtttgaggtga

SEQ ID NO: 1859 - DNA, 2500 bp, Artificial Sequence
  chemically treated genomic DNA (Homo sapiens)
aataggggtttttgggttttttaataggaagtattagattaggtagttagtagataattatcggtggattatagggttattagagtgagatttatttatagataaagattggttagtgatgaagtttatttgggtgtaaaggtcgagttgagaggtttttattaattggagtgtgttagtgagggtgagtagaaggtggtttttagggagaatatgggtagggtttggagttagtatttttttagggttggaggaagtagatttaggatttgtttgattgggatggggtttttttttgttattttcgtttttatttgtttagttttgttttttcgtttcgagagatgtttttaggtttgggtagatgaagttaggggttttttgtttttttggaaggtttttttttgtttggagtttatgaaagattagtaggtaatgcggtaataaaaaagattttggggtagaggggcgttacgagaggcgggtttggcgttgatatttaatttcgtgttttttttttgtaggatgttggtggattgtgtgtttttggtggaggtggacgatatgatgattatgggtaagaagtttgattttaagtgtgtttttatttatgtgtagtcgttttataattatttgcgacgttacgaattgcgtttgcgcggtaagaatgtttagtttgttcgttcgtatggttagttagtggtaagttgtcgtttttatttttcgggtatcgttttttgtttgtgcgttcgtttatcgttgttttgtttgttgcgatatttttttttttatatatatacgtagcgttttgataaattattggtttttaacgattttgatttttttttgcgttttttgggggtggggagggggtttgaatcgaaggtagtttcgtaaggtttttaattttagtagggatttttagaggtttttttttcgattttttattttattcgttcgtagtaacgaaggagtcgagttttagttaaggtaggagggaatttagtggagttggggaaggaagaaagtggggttgggagaatttttttaattttatttttgttggttcggggacgggtatcggtttttagtaagagaagtattttcgggatgttgagcgttttattttgtttttaggatttaggtaggtaggttttagtttcgtcgcgttttcggatttataggttagcgtggttcgaagttttttttgggggtttcgcgggcgtttatacgtattcggggggtatttgcgcgtcgggcgtcgttttgcggtagaagtcgagtttttgtattagcgtattgattttttcgcgggttattttattgagtgggatgcgttgaggcggaggaggggcggggttagtaggttgggtttcgtttttggtttcgtttttagtttattttttacggttttatttttagtttttcgtagcggcggtttagtagtacgagtttagggtcggttttagggaggtgttttattattaggttgtgattggaggtggtgttaaggagcggggtggtgggtagagggaggtggtggttttcgtagttttattgatgggaatagtattgttttttttgtttagagtttattttgtgttcgggaggggttagggttttcgtttatacgtgagaaaattagggtttaaagaagtaaagggtttttttttttattttgtggtagttattattagttaattttttttgtttatttaatatggagattattttagaattttttgggagttattattaattaatttaatttgttagttgaaaattatttgttatttttttttgaagttacgtggagatttttttaggtgtttattttatttttttttttttagaatagaaggatattagaatggaatgttttgcgtgacgaaagtttttatttggggaggaattagagtattagagattatgattttagtttattcgaggtatagacgagatattgaagtttagtgaggttataaagtaagttaggtgtaggttagatttttagtttaggttagatttttagtttagggatttttttttttttttcgttttagttattgggattatgttgtttattttttaagaggtttagggggaatagagttagggatttttttttttaaatttattttttttaggcggtttagttgttatttttcgtaggtttggagggggataaaatgggataggttaggagttttttacgtttattttagttatatttttaaagttatatttttttatttttgagttgggtcgggttgtgagttattttcggattagtagtttttaaggtttgaaggaaatgttggatttttgtgggtagaagggggaattgtgtatataggtggggagatttaggtttagagatattaggggaaaagagtaaggttagagatttatagtgtgtttgttagttttggggtttgtatattttattggttgtggattgatttttaatgtttaggggaaatgattattttgttttttt

SEQ ID NO: 1860 - DNA, 2500 bp, Artificial Sequence
  chemically treated genomic DNA (Homo sapiens)
agaggagtagggtgattattttttttgggtattgggagttagtttatagttagtaggatgtataggttttaaggttggtaggtatattgtgggtttttggttttgttttttttttttggtgtttttaggtttgagtttttttatttgtatatatagtttttttttttgtttataagggtttagtattttttttagattttgggaattgttgattcggggataatttatagttcgatttaatttagggataaggaagtatggttttggggatgtgattggaataaacgtgaaggatttttgatttattttattttatttttttttagatttgcgggggatgatagttgaatcgtttaaaggaggtgagtttgaaggaagaggtttttagttttgttttttttgagttttttggggagtgggtaatatggttttaatgattggggcggggaggggggaaggatttttaggttgagagtttagtttaggttgagagtttagtttgtatttgatttgttttatgattttattgggttttagtgtttcgtttgtatttcgagtagattgaggttatggtttttgatgttttggtttttttttaggtgaaggttttcgttacgtaggatattttattttagtatttttttgttttgggggaggggaaatgggatgggtatttgggagaatttttacgtaattttagaaaggggtggtagatggtttttaattgataagttgaattgattggtagtggtttttagaggattttgaggtggtttttatgttgggtgggtaagagagattgattagtgatgattgttatagaatggagaggagggttttttatttttttgaattttaatttttttacgtataagcggagattttggtttttttcgggtatagagtaagttttgagtaaaggaggtaatgttgtttttattagtaaggttgcggaaattattatttttttttgtttattatttcgttttttaatattatttttagttataatttggtgatgaaatatttttttggggtcgattttgagttcgtgttgttgggtcgtcgttacgaggaattagaggtgaggtcgtgggaggtgggttgggggcgaggttagaggcgaggtttagtttgttgatttcgtttttttttcgttttagcgtattttatttagtgaaatgattcgcgaagagattaatgcgttagtgtaggagttcggtttttatcgtaaggcggcgttcgacgcgtaggtgtttttcgagtacgtgtgggcgttcgcgaagtttttagaggaaatttcggattacgttgatttgtaggttcgggggcgcggcggagttgggatttatttgtttgagttttggagatagaatgaagcgtttagtatttcgggaatattttttttgttgagagtcgatgttcgttttcgggttagtagggatggggttggggaggtttttttaattttatttttttttttttttagttttattaaatttttttttgttttaattgaggttcgattttttcgttgttgcgggcgggtggggtgggaggtcggaagaagaatttttgaggatttttgttggagttggagattttgcggagttgttttcggtttaaattttttttttatttttaggagacgtagagaggagttaggatcgttgaaaattaataatttattaaaacgttgcgtgtgtatgtgggggggagggtgtcgtaatagatagggtagcggtgggcggacgtataggtaggagacggtgttcggagagtgggggcggtagtttgttattggttggttatgcgggcgggtaggttagatatttttgtcgcgtaggcgtagttcgtggcgtcgtaggtggttgtagagcgattgtatataggtgaagatatatttggggttaggttttttgtttatgattattatgtcgtttatttttattaggggtatatagtttattagtattttgtagggagggggtacggggttggatgttagcgttagattcgtttttcgtggcgtttttttattttaaggttttttttattgtcgtattgtttgttggttttttataaattttagatagggaaaagttttttaggaaggtaggaagtttttggttttatttatttaagtttggaggtatttttcggggcgggggagtagagttaggtaggtggaggcggagatggtagaagagagttttattttagttaggtaggttttgggtttgttttttttaattttggggaggtgttggttttaaattttgtttatgttttttttggagattattttttgtttatttttattggtatattttagttggtagaagttttttagttcggtttttgtatttagatgggttttattattggttaatttttatttatggataggttttattttagtggttttgtggtttatcgatgattgtttgttagttgtttgatttggtattttttgttgagaggtttagggatttttatt

SEQ ID NO: 1861 - DNA, 2470 bp, Artificial Sequence
  chemically treated genomic DNA (Homo sapiens)
gttttttgttttacgaatgttagaagtaagtaaaaatgtttttatttaaattatttttttttttataaaaataagaaaattatgtaattaaaataattttttgtttttttaatgagtttattatttgatttagtaattttttaatatttttatttgttttattgtaagtagttttagtgtatgttggttagatggtttttgggtttatattagtttaattgaattaggagaggagttttagaaggtgtattggatagttatgttagaggtcgtgtgtaattttaggttagattagtggttttttgttttatttgaattttaaaataattgcgaaatttttaaaaaatatattgttgttggggttttatttatatagattaaattatttttaggggtaggttttgggttcgagtttttttgtttttgtttttgtgttttttaatttttttagttgtttttttcgtgagcgaaggttgagaagtatagttgtttttgtgaggaatttagtttttagagagagtttgttcgtcgttttttattttttagagaggttgtagggtgtttagattttgtaggtattgttgtttttcgttaagtttgatgttgttatttaattaatatttgtttatattaattagttgttatatgtattgaaggggagtggttttttttgaagtttttagttgttgattatataagatttggtttgaagtgggatttttggaaatttaattaagataacgatttttaggtttttttaaaagtttattttttaggtataggtaggtaatgaaataatttaattgcggttttttttataatattttttattttatagtatcgatggagtaggagggtgtggataggtttttttgggtttttggtgttttttgttaggtgttaaaataaagaggattattgtgttttttggaattggtttaaacgtttatgtttaagattaagatttagggaaatgtattttcgtttgatatttattagtttttgattgtgaaaagggtattaatttgtgtaatggcgtcgcgattcggtcgcggattttagtttttaaagtcgggtatttttaattaggagaaattaagtggggttgttatatattttgagaataagtaatattatttaaatttaggtagttttaattattaatttaatcgttgaattttcgttgttatatgttttttaaatagattagtataattttaattaggatttaaaatgtattattttcgtttcggaatttagaatttgtagtcgacgggagtttttggaggtttaatgattttaattatggcgagaaatattttttttcggtggggaggggcgcggtcggtggcgaggagggtattttttcgggtcggagaaggtcggatggtagttcgtttcgaaagtttcggttcgttggattgggggttcgggggtggggggaatatagagaagtagggttggtggaggggaggagggattttgtagggcggtatacgacgggtgggagtggggaggaggagggtttttggcgcggggaggagtcgcgggaggggggatgttggtcgtagggtttcggagttttgagttgtgtttgtggttttagcgttttgattttttgttagggaaatttggaaggttaggtcgggttgtagttaagttttggagcgaggagtcggcgggtggagttggtagtattgcgttatttatttttattttttaattttttaagtagtgaagttcgtttggtcgttttggtttttcgttttcgtttttgtcgttgtttttgtttttgtttttttttattttttgtgtgttggttttttgtaggtcgtagattaaggggttttaagttttgaaagtaagttagttaaatgttttgtaagtttggtttagtaaaattatgtatgttgtatatattttaaaagaaattagatatttttttaaagttgtgtgcgttttttttttttattttttttatttttattttagtataaattatttaagaattataggtgattttttttgttggttcgtgagtgttagggtttagtttgtttttttttttttattattattattattttcgtttttggtattaggatttttttatcggttattcgtgtgtttttggtgtgtgattttattttttatggaatgaaaagtttttgtcggaaaatagggtttttggtgaggtaggttttgggagtttttttgtttagcgagaatgttttgtgttatgtagtgatttatgttttagagaatagtagttgattagaatgtttaagagtttggtgtttgggtggttattattaagtgaagaattcgaggaggaggaaaggaaaaagtgaggagtaaggatttaaaatttatttagtggtttttagagggagggggataataggatttaaagagtttgggttttttggtttggggtaggattcgttaagagggatttgtgggcgttagg

SEQ ID NO: 1862 - DNA, 2470 bp, Artificial Sequence
  chemically treated genomic DNA (Homo sapiens)
tttgacgtttataggttttttttggcgggttttattttaggttagagagtttaggttttttgagttttgttatttttttttttttggaggttattaagtggattttaaatttttattttttattttttttttttttttttttcgagttttttatttagtagtgattatttaggtattaggtttttgaatattttggttagttgttgttttttgaagtatgagttattgtatgatataggatattttcgttgggtaagggggtttttaaggtttgttttattaagggttttgtttttcgatagaaattttttattttataggaaatgaggttatatattaagagtatacgggtaatcggtgagaaaattttggtgttaggaacgggggtggtggtggtggtagaagaggagaggtaaattagattttaatatttacgaattagtagggggaattatttgtggtttttgggtaatttgtattagggtggggatgaggagggtggaggaaagggacgtatatagttttaaaaaaatatttggttttttttaaagtatatataatatatatgattttattaagttaaatttgtagggtatttggttagtttatttttaagatttggagttttttaatttacggtttataggagattaatatataggaggtaaagaggggtaggggtaggggtagcggtaggagcgggggcgagaggttagggcggttaggcgggttttattgtttggggggttgggaggtgagggtgggtggcgtagtgttgttagttttattcgtcggtttttcgttttagggtttggttgtagttcggtttgattttttaggtttttttggtaggagattaaagcgttgaagttataaatatagtttagaatttcgaggttttgcggttaatattttttttttcgcggttttttttcgcgttaggagttttttttttttttatttttattcgtcgtgtatcgttttgtagggtttttttttttttttattagttttgtttttttatgttttttttattttcgaatttttaatttagcgggtcgggattttcggggcgggttgttattcggtttttttcgattcgggaaagtgtttttttcgttatcggtcgcgtttttttttatcgggagaagatatttttcgttataattaaagttattaagtttttaaaggttttcgtcggttgtaggttttgagtttcggaacgaagatgatgtattttaagttttagttaagattatgttgatttatttaggagatatgtagtagcgagaatttagcggttaagttagtggttaaggttgtttaagtttaaatagtgttatttatttttaaaatatgtagtagttttatttaattttttttaattaaaggtattcgattttagaggttggagttcgcggtcgggtcgcggcgttattgtataggttggtattttttttataattagaaattagtgggtgttaaacggaaatgtatttttttagattttaattttaaatatagacgtttaggttagttttaagaaatataatgattttttttgttttaatatttgataaggagtattaaaaatttaggaaagtttgtttatatttttttgttttatcgatattgtggggtgaaagatgttatggaaaaaatcgtagttgggttgttttattatttgtttatgtttggaagataagtttttggaagaatttggaagtcgttattttggttgagtttttagaagttttattttaggttaaattttatatagttagtaattagaaattttaaaaaggattatttttttttaatgtatatggtaattaattaatataaataagtgttaattaggtggtagtattaggtttaacgaggaataatagtgtttgtaaagtttggatattttatagtttttttggaggatgagaggcggcgggtaggttttttttgaaggttgagttttttataggggtagttatgttttttaattttcgtttacggaggaggtaattggggagattaaaaaatataaaaataaaaataaaaaaattcgagtttaggatttatttttagagatgatttgatttatatagataaaattttagtagtaatatattttttagaagtttcgtagttattttaaaatttagatagggtagagaattattgatttaatttaaaattgtatacggtttttggtatgattgtttagtgtattttttggagttttttttttgatttagttggattgatgtagatttagaggttatttaattagtatgtattgggattatttataatgaggtaaatgaaggtgttagaaaattgttgaattaggtggtaaatttattgagaaggtagaagattattttgattatatgatttttttatttttatgaagaggaaggtaatttggatgaaagtatttttgtttgtttttaatattcgtgggataggggat

SEQ ID NO: 1863 - DNA, 2491 bp, Artificial Sequence
  chemically treated genomic DNA (Homo sapiens)
aatgtaaaaatgttttgaagaaagagatattgagtattggaattaagtattttacgtttttttttttgtaatattggggattaaggattattatttgtatttttggtgaagaaattgaggtatagagaagataaattatggtttttcggttataaagtaagtagtagagtttagagtttgaagttaggtttgatatttaagtttcgtagtaaattttttattgaggtaggtaagtttcgttttgtagagagtggtaaattagggaaaaaagaattaaatgtgtttgagtttaatagaatatatatattatatttaaagagaaagatattttttttataaaaagtttgaggataaatgagattttatgtgatgcgttttgtattaaaaaaaaaaagttagattatataagttagattggcgttgattaaagaagagtaaggtaataaatacgtataagaagaaggaagtggttggttttattttgggtattatttaagttataggtaggggaggggataggttttgtatggggatagttttttgatttgtttttttttttttttatttttttttttttattatttttttttttaaaatttaaaaaattttaagtaggaaaaaagggagttaattaaaaaagagaaaaatatttttgagattaatgaagtttttataatttatagtgatagatagggatttgtagaatagtaatttgattaaataaggatataagggatttaaaaggattttttagttgtgtaaagtgtgtttatacgtttgaaaaatatcgtatttatttggtttttaaatttgaaaattttttgacgggggagattgtttttatttggaaattaggaagaaattataaggtaaggttatggggttttggtagggttggggattttatgttgggtggaaattttaagaagttagttaagggtttgtaggaggggttttggtagagagaagtattagaatgtaagggtaggtaaagttatttttatagaaggtgattgtgggttgagtttgaggttttttttagatggggaagagagaatagtatattttttttgtttacgtttcggtattttatttaagaattagttgttcgttagttatttgttatcggagatagttttgttggcggtttttagaaaaagcgaagtagttagaggatgaatcgttattcggggaatatatttgtatataggataggaatggatgggagtggggagcgttttggggttattgtttaaacgttatttttatggtttttaagatttgtattagtagtttagtcgttgatgaattataattttcggataagttgtagaggtttttttcgttttatgtgtttatttttgtcgtttatattgggggatttatgttttttggggttaggaggagaaaataatgagttattggggataagagaaaaataaaaatgttttgtatgtgtaaaattatttaaaatggaggtttttagaggatatttaaattttagttaattagttagaaagggttttgttgggggtatattttatgtgtttttgttatttttggatgtagtaaagttagaaatgtttatattttttggagggattatttgtgtaaataggataggtttttttgagaaggttgtttgtttttttgggatttcgaatttgagaagaaatggttttggtttggcgcggtggttcgcgtttgtaattttagtattttgggaggtcgaggtaggtagattataaggttaggagatcgagattattttggttaatacggtgaaattttatttttattaaaaatataaaaaattagtcgggcgtggtggtaggcgtttgtagttttagttatttaggaggttgaggtaggagaatagtatgaattcgggagttggagtttgtagtgagtggagattttgttattgtattttagtttgggggatagagtgagatttcgttttaaaaaaaaaaaaaaaaaaaaagaaatggttttgtatttttgatttgggaggtttaattaagtagaggaattgttggttgtaaattttttaaagtagaggattttttgggaggttgaggtaggtgattatttgaggttaggagtttaagattagtttggttagtatggcgaaattttatttttattaaaaatataaaaattagcggatcgtggtgggttgtatttgtaattttagttattcgggaagttgaggtatgagaattgtttgagtttgggaggtggaggttgtagtgagttgagattgtgttattgttttttagtttgggtgatagggtaattttattttaaagtaaataagtaaagtagaggattttgatggttatttttaagtttatagttatttgtatattttatgtggtgaagtattggtggggggtttaggaagttttgtatgagttggttgtagttgttatgattttaatttttacgttattttttgtatttagttatagagtcgtatttttagaga

SEQ ID NO: 1864 - DNA, 2491 bp, Artificial Sequence
  chemically treated genomic DNA (Homo sapiens)
tttttggagatgcggttttgtggttaggtgtagagggtggcgtgggagttggaattatggtagttataattaatttatgtagggttttttgggttttttattagtgttttattatataaagtgtgtaggtagttatgaatttgggggtggttattagggttttttgttttatttatttattttgagatggagttgttttgttatttaggttggagggtagtggtataattttagtttattgtaatttttattttttaggtttaagtaatttttatgttttagtttttcgagtagttgagattataggtatagtttattacggttcgttaatttttatatttttagtagagatggggtttcgttatgttggttaggttggttttgaatttttgattttagatgattatttgttttagttttttaaaggattttttgttttagaaggtttatagttaatagtttttttgtttaattggattttttaagttagagatgtaggattatttttttttttttttttttttttttgagacggagttttattttgttttttaggttggagtgtagtggtaagatttttatttattgtaagttttagttttcgggtttatgttatttttttgttttagttttttgagtagttgggattataggcgtttgttattacgttcggttaattttttgtatttttagtagagatggggttttatcgtgttggttaggatggtttcgattttttgattttgtgatttgtttgtttcggttttttaaagtgttgggattataggcgcgagttatcgcgttaggttaggattatttttttttaggttcgagattttaggagaataaatagtttttttaagaggatttgttttgtttgtataggtgatttttttaagagatataaatatttttggttttattgtatttaaagatagtaaagatatataaaatatatttttagtaaaattttttttggttagttggttgggatttgagtgttttttaaaagtttttattttaggtggttttgtatatatagggtatttttgttttttttttgtttttagtgatttattattttttttttttagttttaggaagtataaattttttagtatgagcggtaggggtgaatatatggaacgaggggggtttttgtagtttgttcgagaattataatttattagcggttgagttgttgatgtaagttttggagattatgaggatggcgtttgaatagtagttttagggcgttttttatttttatttatttttgttttgtgtgtaggtgtgtttttcgaataacgatttattttttggttgtttcgttttttttgaaagtcgttaatagagttgttttcgatgataggtgattaacgggtagttgatttttgagtgagatatcgaggcgtgggtaggagaggtgtgttgtttttttttttttatttgggaagggttttaggtttagtttatagttattttttgtgagggtggttttatttgtttttgtattttaatgtttttttttgttagggttttttttgtagatttttggttggttttttggggtttttatttaatatgggatttttagttttgttagaattttatggttttgttttgtgatttttttttagtttttaaatgggaataatttttttcgttagaaggtttttaggtttgggagttaaataaatacggtattttttagacgtatggatatattttatataattggagagtttttttaaattttttatatttttatttaattaaattgttgttttgtaggtttttgtttgttattgtggattatggagattttattggttttaaggatgttttttttttttttaattagttttttttttttttgtttaaggttttttgggttttggagggaggggtagtgaagggagggaagtagagaaggaagaagataagttaggagattgtttttatgtagggtttatttttttttttgtttgtaatttgggtgatgtttaaggtagagttagttatttttttttttttatgcgtatttattattttgtttttttttaattaacgttagtttggtttatataatttaattttttttttttagtgtaagacgtattatatgaagttttatttgtttttaaattttttgtaagaaaagtatttttttttttaagtataatgtatatgttttgttaaatttaagtatatttgatttttttttttttaatttgttattttttgtaaggcgaggtttgtttattttagtgggaggtttattacgggatttaggtgttagatttggttttaaattttaggttttgttgtttattttgtagtcggagaattatagtttattttttttgtgttttagtttttttattagaaatgtagataataatttttagtttttagtgttgtagggaagaggacgtagaatatttggttttaatgtttaatgtttttttttttaaagtatttttgtatt

SEQ ID NO: 1865 - DNA, 2478 bp, Artificial Sequence
  chemically treated genomic DNA (Homo sapiens)
tttttgtagttaggtatgttttggtttgagaagttaagtaagaatgttatgtagaatatttaggaagttttttttaaaggagaggggtatgttttttttttttttgtttttttatttgttgtttggaatatggttgtgatgttggggttttagtagttattttggattatgaggtggtttagaggaaggaagttaggagttgagaatagtagagtaaaaatgtggtttttgatgattgtttagttattatattagttttgatttttttatttttggattttttttatgtgggagtgaaataaatttttattttaagttgttatttttttcgttttattatgtgaagttgaaataaattttgatagatttttatagtatataaagatgaggttatatattttttatttatatttgcgttataatttgtttttaggaggagattggaaagtagggttagatggtttagaggttttatggggttgaggttagtaggtttggttattgggttttatgggatgaaggtagaaaaggaagttgagtttggtgtttgagacggttttttaattacgttatttgatttgtgattttgtggagggtaaggttttttttgttatttttttagtattacgttcgaatttttgggaagttgtcggaagggaataatagaatttgttttattttttttttttttttgtatgagggatagggagaatttttgattgagatttatatttaatttcgaaggaaagaggaacgtgaatgtggattggaaaattattgcggggtgtttgttaggttttgggggtgggatatggagggtatttagggatattagggtagatgtttaatggtggagtttcgttgtgtattgtaggggtagggtttattttgtaggttttttggaaggtttaatataggttagagatgttttttagagtttgtaggagagtttaggtgtggggagagggttcggagtagtagtagtagtgatggtagtgttttaaggaatttgggtttaggtattgattttgaggagttggcgatgtaggtatggggtatttacgtagggttttagtaatttttgggaaggagaattcggggtttgaaggtgaggcgagtggatttaggattggataatttgggggttttagggaagtgagatttgaagtagttaggttatatcgggttttcggtagtaggtagagggtttttcgtgggaagtttttggtcgttggtatttggtagttgttttttgtagaggtattgggcgtagagttgtgtttatcgttttgaaatttgcgacgtttagtagttttgttttagttttattatagtttttgaacgtgcgtcgtattggtttttagtagtgtataattttgggttgaatacgtagtagagtagagtaaaaagatggcgttttcgcgtcggtttttttttagatataagataagaaggggtgaggagggagtttttgaatacgagggttggggtgggttttttttcgtttcgttttcgtttcgtttagttttgtttcggttttattttttaatttgtttcgttggttttgaatcgaggagggagtttgttagaattcgttataaagatgcgtattcgttttttgattattgtgtgggttgtttaaaaacgtgtattatattagttattttatttatatttttttattggtaattcggaaagaaggtaggtttttatttttattttatagattaggaagtggagattcggggaggtaaagtgatttgggttttgattttaatatattttaggttatattattttttagggaatgtaacgagatggtcgggtagatatgggttaatttgaaaatagtttgaggaaaaaaagagattttagtttgtgttttttagtaagttattataatgaatagtgttaaaaaaaatttataaggttgtaattatatttagtaattagaatattatattgtgattattttatttaggtgttattagattgaaaataagatatttgaatatgatttagttttaatgtgtttgaatattataaaggtgaacggtaggtaataatgcgtaatatattttgggaaagttgaattttaatataatattatgtaagatagatgagtatagggttaagttgtttttattttttttttatattatttggtacgtatgatgtgtgttttttaggtatttaagattttatgagttgttaatttgtttaattagttgatttataggtggggaagagagggtgtggggtttatatgattttttatattatatattatagggtaggattattagttcggttagagtttttatttttgatttattttgtagggaggggcggtatttaagttgttttttttcgaggatatttttttgttgtttaatggggtggagaaagtttttaaattattagaaaatgaagttttttttttagtttttttgtagggagatatttgatttgattttt

SEQ ID NO: 1866 - DNA, 2478 bp, Artificial Sequence
  chemically treated genomic DNA (Homo sapiens)
ggaggttaggttaaatgtttttttgtagaggagttaaaaaggggattttattttttggtgatttgggagttttttttattttattaggtagtagaaagatgttttcgggggaaggtagtttgggtgtcgtttttttttgtaaggtgggttagaggtgggggttttggtcgggttggtggttttgttttgtgatgtgtggtgtgggaggttatgtgagttttatatttttttttttttatttgtggattagttgattgggtaaattggtagtttatgaagttttgggtatttggggagtatatattatacgtgttaaatgatgtaaaaaaaaaatgaaagtagtttaattttgtgtttatttgttttatatagtgttatgttaaaatttaatttttttaagatgtgttacgtattgttgtttatcgtttatttttgtgatatttaaatatattggggttaaattatgtttaaatgttttgtttttaatttaatagtatttaaatgaagtaattatagtgtagtgttttaattattagatataattataattttgtgaattttttttaatattgtttattataataatttattagaaaatatagattgaaatttttttttttttttaaattatttttaaattggtttatatttgttcggttatttcgttgtattttttgggaggtggtgtggtttgaagtgtgttggggttaaagtttaagttattttattttttcgagtttttattttttaatttgtgaagtggggatagagatttgtttttttttcgggttgttagtggggaggtgtaaatgagatggttgatgtaatatacgtttttaaatagtttatataatggttagggggcgggtgcgtatttttgtgacgagttttggtaggtttttttttcgatttagagttagcggagtaggttgggaggtgaagtcggagtagggttgggcgaggcgggggcgaggcgaggaggagtttattttaattttcgtgtttaaaagttttttttttatttttttttgttttgtgtttagaaagaagtcggcgcggagacgttatttttttattttgttttgttgcgtatttagtttaaaattgtgtattgttggaggttaatgcggcgtacgtttaaaagttatgatgaggttggaatagggttgttaagcgtcgtagattttaggacggtgagtatagttttgcgtttagtgtttttgtagggagtagttgttaaatgttagcggttagaaattttttacggggagttttttatttgttgtcgaaggttcggtgtgatttggttgttttagattttatttttttgggatttttaagttatttagttttgggtttattcgttttatttttagatttcgggtttttttttttaaaggttgttggagttttgcgtggatgttttatatttgtatcgttagttttttagggttagtgtttgagtttaggttttttaaggtattgttattattgttgttgttgtttcgagttttttttttatatttgggtttttttgtaggttttgaagagtatttttgatttatgttggattttttaaggggtttgtaaagtgagttttgtttttgtagtatatagcggggttttattattgggtatttgttttgatgtttttgggtgttttttatgttttatttttagagtttaataaatatttcgtagtggttttttaatttatatttacgtttttttttttttcggggttaagtataaattttagttagggattttttttattttttatgtaaagaaaggaaggaagtagggtaggttttgttattttttttcggtaattttttaggaattcgggcgtggtgttgggaaggtggtaaaagaaattttgttttttatagagttatagattagatggcgtaattgaggggtcgttttagatattaggtttagtttttttttttgtttttattttatggggtttaatggttaggtttgttgattttagttttataggatttttgggttatttagttttgttttttagtttttttttagaaataagttataacgtaaatgtggataggaaatgtatggttttatttttatatattatgagggtttgttaggatttgttttagttttatataatggggcggggaaaatagtagtttaaggtgaaagtttattttatttttatataaaagaagtttagaggtaggaaggttagagttggtgtggtggttggataattattagggattatatttttgttttgttgtttttaatttttggttttttttttttaggttattttatgatttaaggtggttgttggagttttagtattatagttatattttaggtagtaggtggaaaaataggagagaaaagggtatgttttttttttttaaaggaggttttttggatgttttatataatatttttatttagttttttaggttagaatatatttagttgtaagag

SEQ ID NO: 1867 - DNA, 2292 bp, Artificial Sequence
  chemically treated genomic DNA (Homo sapiens)
aaggggttgtagttttggtttttggtgagaggattgtagtgtcggggttggttaataagtattttttattttgtaggaggtcggcgtagtatttgtgagtatttgtgttgaattttttcgtggattagatattgtgtttttttgtttagagttaggttggaaaaggaaaatttgtcgtcggtgtgtatgtgttttaaatttttagtttgggtaagggtacgggcgtcgtgaataaaggagttatttttgttggttttttttagaaattgtttatagtttgtaaaaaggttgtgttttttggtttcggttgcggttgtgtaggagtttgaatattattttttttagaagttgaggtttttaggttaggtttattttgttttaaatgggtagtattggttttgttttatgtataggttttaggcggatagagttgttgtaggtatgttgttagggggataggttgttttttagttgtgtatggtagtgtgtcggaaagaataaggtttgtgggtgtttttgagtcgggtttggagttttgttttgttattttttagtcgtgtgattggagtttttttgtttttttttgaaaatgggtttggtggtttgtttttaggtttttaattattgtgtggagttatatttgtagaaggttagtttataatagatatggtaattaatgtgatttttgtattttttttttttggggttaggagtaggtttaagaggtggttaggttaaatttttgtagggttgtgggtattgttggttttttaagtttcgggattttttgggggtcgggcggattttaagttttgtttatttgttttttttttatttttattatttattttgttttttcggttttttttttttttgtttcgttttttatcggttttttgtttttttcgttcggagaggggaacgtgaaggaggtgaggagggagtagtgtaggaggatttgggttttttttttttttttttttttatttttcgagggtttaattagttggtgaaggtttttaattagtaaaggaggaagtagtcggggtcggtgagggtgaggtcggtagttaggtaggaaggtagtaggaggaggaggaagcggaggcggtattttttgagaggcgtatgtttagtgagtcgtgaagatggtagggttggcggagcggtcgtcgtatttgattttttttttttttttaggatatgtgatggcgtttagtttggagttgggataaggtttttgtagtcgatatttttataggagaagttttgggattggggtagtagtaaggcgtttatgttatatatcgtttttcgaggaaacgcggtttagcgattttttgattgcggattttgtgggaaatttcgttaataaatgttaaagatatatttcgaggtagcgtggatgtggtttgtttttatttaatagtatggttcgcgtggttttttttcgggattattcgtgtttttatatattcgtttagtgtttgcgagttttcgtgtttggttttcgtgtattagatatgatgtatttagagttaggtagtaggagggagttttgttttagaggaagtttagttatgttgttacggagagggcgcgtttttttcgatgtattagtcgttgttagaggaggtttacggtagcgggcgtttggagttatagtgttcgagttatttgagtgtgtgagtggtaagggagaaatatttaaatcgtgtaatattagggatattgaagtaaagacggagtttggtgtttatagacgaatggtagtatgaatgagtgtgcgttttttggggttgttttaagttattataaacgtgggggtttaaaataatatatattaatttttttgtagtttggagattagagtttagaatgggttttgttgggttgcgtttttttggaggcgttaaggggaaattttttttttttgttagtagtgagaggtattatattttttggtcgacgttatttgtatttttaaagttagttatgtggtgttttttattttttttttttgttttttttgcgtttttgttgtttttgaaggatttttgtggtgatttcggatttgttcggggaatttaggggttttatttttaggttagtagatgagcgtttttaatttcgtttgtagatttagcgtttttttgttatgttatcgttacgtttatacgatttagggattaggaggtgtgcgttttcggttgggtgggagtgcgggatattattttgttttatataattagtatttttttaatatttgggggataattttaaattggttat

SEQ ID NO: 1868 - DNA, 2292 bp, Artificial Sequence
  chemically treated genomic DNA (Homo sapiens)
gtgattaatttaagattattttttaaatattagagagatattagttgtgtgagatagaataatgtttcgtatttttatttagtcgaagacgtatattttttaatttttggatcgtgtaaacgtgacgataatatgataagggggcgttaagtttgtagacggaattaaggacgtttatttgttgatttagaaataagatttttggatttttcgggtagattcgaggttattataggggttttttaaagatagtagagacgtagaggaggtaagagggagagatgggggatattatatggttggttttaaagatgtaggtgacgtcggttaaggaatgtggtgttttttattgttggtaaaggagggggatttttttttagcgtttttaggaggacgtagtttagtaagatttattttggattttgatttttagattataagaggattaatgtgtgttgttttaagtttttacgtttgtggtgatttagagtagttttagaaaacgtatatttatttatgttgttattcgtttgtagatattaggtttcgtttttgttttagtgtttttaatgttatacggtttgggtattttttttttgttatttatatatttaaatggttcgagtattgtggttttaagcgttcgttgtcgtgggttttttttgataacggttggtgtatcgaggggagcgcgtttttttcgtaatagtatggttgagttttttttggggtaaagtttttttttgttgtttggttttgaatatattatgtttggtatacgggaattaaatacggagattcgtagatattgggcgggtgtgtgagaatacgggtggtttcggggaaaggttacgcgggttatattgttgagtgaaagtaaattatatttacgttgtttcggagtgtgtttttaatatttattgacggggttttttatagggttcgtagttaaagaatcgttgaatcgcgttttttcgagagacggtgtgtggtatgggcgttttgttgttgttttagttttagagttttttttgtaggggtgtcggttataggaattttattttagttttaaattggacgttattatatattttaaaaaaaggggagagattagatgcggcggtcgtttcgttagttttgttatttttacgatttattgagtatgcgttttttagaaggtgtcgttttcgtttttttttttttttgttgtttttttgtttggttgtcggttttatttttatcggtttcggttgtttttttttttgttggttaagaatttttattagttggttaagttttcggagaatggaaaagggaaagaaggagagatttaaatttttttgtattattttttttttattttttttacgttttttttttcggacggagaggatagagggtcgatgagaggcggagtagggagggaaggagtcggaaggataaggtgggtagtgaggatggaggagaggtaggtggatagaatttaaggttcgttcggtttttagaaggtttcggggtttaggaaattagtagtatttatagttttataggggtttagtttgattattttttagatttgtttttgattttaggaaggaaggatgtaaaggttatattggttgttatatttgttatgagttgattttttgtaggtgtgattttatatagtggttaagaatttgggaataaattattagatttatttttagagaggagtaaagaggttttagttatacggttgagaagtggtaggataggattttagattcggtttaggggtatttataggttttgtttttttcgatatattgttatgtatagttggggggtagtttgtttttttgatagtatgtttgtagtagttttgttcgtttggagtttgtgtatggggtaaggttaatgttgtttatttgggataaggtgggtttaatttagggattttaatttttggggaaaatgatatttagatttttatatagtcgtagtcggggttagggaatatagtttttttgtaagttgtgggtaatttttagaaaaggttagtaagaatggtttttttatttacgacgttcgtgtttttgtttaagttgaggatttggagtatatgtatatcggcggtaagttttttttttttaatttgattttgagtaagaagatataatatttgatttacgaagagatttaatatagatatttataaatgttgcgtcggttttttgtaggatgaagggtgtttattaattagtttcggtattgtagtttttttattagaagttaggattgtagtttttt

SEQ ID NO: 1869 - DNA, 3056 bp, Artificial Sequence
  chemically treated genomic DNA (Homo sapiens)
gaagcgtatatatggggttatttttattttatagggttgtttttttgttatttagtagtcgtgatgaggatatcgtgatttttgcggataagtttggtaaaggttttcgaggtatttacgttttgagttattttagttttttcgttttcggtacgttttgaaggtttgattatgggggtgatagtttttgagaaggtggtttttgtggtatttggtagtggatcgtaatagtgttcgttattttattcgtttaataagtggttattaggaagttttggaataaagtttagaagaattgggataggggtcgttagggttgttagtggggatagggtggggtataggaagttgtaggatagatttagaatacggggttttgttgggtaagagggcgataggtagtagttttagtaaatcgaggaattttttatgggatttgaaagttgaagacgggtagggagttttgttttgatttttaagaggtcggtattttcgtatttatatcgcggttttgtgtttttcgcgtttttatcgcgtttttgtgtttttcgcgtttttatcgcggttttgagtttttcgcgtttttatcgcggttttgagtttttcgcgtttttatcgttgttttgagtttttcgtagttatatcgcggttttgtgtttttcgcgtttttatcgcgtttttgtgtttttcgcgtttttatcgcggttttgagttttttacgtttttatcgcggttttgagtttttcgcgtttttatcgttgttttgagtttttcgtagttatatcgcggttttgagtttttcgcgtttttatcgcgtttttgtgtttttcgcgtttttatcgcgtttttgtgtttttcgcgtttttatcgcggttttgagtttttcgcgtttttatcgcggttttgagtttttcgcgtttttatcgttgttttgagtttttcgtatttatatcgcgtttttgtgtttttcgcgtttttatcgcgtttttgtgtttttcgcgtttttatcgcggttttgagtttttcgcgtttttatcgttgttttgagtttttcgtagttatatcgcggttttgagtttttcgcgtttttatcgcgtttttgtgtttttcgcgtttttatcgcgtttttgtgtttttcgcgtttttatcgcggttttgagtttttcgcgtttttatcgcggttttgagtttttcgcgtttttatcgttgttttgagtttttcgtatttatatcgcggttttgtgtttttcgcgtttttatcgcgtttttgtgtttttcgcgtttttatcgcggttttgagtttttcgcgtttttatcgttgttttgagtttttcgtagttatatcgtagttttgagtttttcgcgtttttatcgtagttttgagttttttgcgtggtttgcgttgttttagagtttttggtgtggggtggggtatataggtagggattaatttatggagtttttagtttgttttgtagtgttttttataaaagttatggatttttttttgtttgttatatgtcgtgtttattattgtgacggttttttttacggggatttttatacgatagagagtaaggcgttagttaaggattattgggtagtcgggggttggcggtgttaagtagtaggaagtagtttagttggatgaggagcgttggttgtagagatttttttgttgggttttgttattcggtaggatttttacggaggagttgtatttatattttattaaaatttttaatttttgtagaataaagttgagttttagagaagggaagagatttgtttaagttattaataggttaataattatgggggtttagatagggaagtttaagtggttcgattgtagtttattatcggtagttaagtttaagtagatgagtttttggggtagaaggaagagttaaatggttttgtgaatacggaaggtaaagaaaaattttattttattttaaggaagtatgtagtaagatgttaaaaatagatatttcggtgatatggagttgtagggggaaatagtgtgaggattttggaaggagtaaggtatgaaggattgtacgtgtggttttgcgttgatgtgaggagtaagtgtacggagtttttatagtaggaggggggacgggaatgagttgtaggttgttgggtggagagtttttttatcggaatgtttgagaggaggcgaggacgtcgggtttttttacgtttttttttgggttttacgttgttttgtgaaagggaagggaattatttatttggaatatgaaggaagaataataaaattttattgtttattttagagaagatacggttatagaggttgtatgttatattgcgggtgttatagggagtttgtttatatagcgtttttatattgtaggtgttatagggattttgtttatatagcgtttttcgattgtaggtgttatagggattttgtttatatagcgttttttaattgtaggtgttatagggagtttgtttatatagcgttttttaattgtaggtgttatagggattttgtttatatagcgtttttatattgtaggtgttatagggattttgtttatatagcgttttttaattgtaggtgttatagggattttgtttatatagcgtttttatattgtaggtgttatagggattttgtttatatagcgtttttatattgtaggtgttatagggattttgtttatatagcgttttttaattgtaggtgttatagggagtttgtttatatagcgtttttatattgtaggtgttatagggattttgtttatatagcgttttttaattgtaggtgttatagggattttgtttatatagcgtttttatattgtaggtgttatagggattttgtttatatagcgttttttaattgtaggtgttatagggagtttgtttatatattaaattgaaggttttatagggatttagtttatatagtatttttatattgtaggtgttatagggattttgtttatatagcgtttttatattgtaggtgttatagggatttagtttatatagcgtttttatattgtaggtgttat

SEQ ID NO: 1870 - DNA, 3056 bp, Artificial Sequence
  chemically treated genomic DNA (Homo sapiens)
gtggtatttgtagtgtgaggacgttgtgtagattgggtttttgtggtatttgtagtgtgaggacgttgtgtagatagggtttttgtggtatttgtagtgtgaggatgttgtgtagattgggtttttgtggagtttttagtttgatgtgtagataggttttttgtggtatttgtagttggaggacgttgtgtagataggatttttgtggtatttgtagtgtgaggacgttgtgtagatagggtttttgtggtatttgtagttggaggacgttgtgtagataggatttttgtggtatttgtagtgtgaggacgttgtgtaggtaggttttttgtggtatttgtagttggaggacgttgtgtagataggatttttgtggtatttgtagtgtgaggacgttgtgtagatagggtttttgtggtatttgtagtgtgaggacgttgtgtagatagggtttttgtggtatttgtagttggaggacgttgtgtagatagggtttttgtggtatttgtagtgtgaggacgttgtgtagatagggtttttgtggtatttgtagttggaggacgttgtgtagataggttttttgtggtatttgtagttggaggacgttgtgtggatagggtttttgtggtatttgtagtcggaggacgttgtgtagatagggtttttgtggtatttgtagtgtgaggacgttgtgtagataggttttttgtggtattcgtagtgtggtatgtagtttttgtgatcgtgttttttttggggtggatagtgaggttttgttattttttttttatattttagatggatgattttttttttttttatagagtagcgtggagtttagggaaaagcgtggaggggttcggcgttttcgtttttttttaggtatttcggtgggaaggttttttatttagtaatttatagtttattttcgtttttttttttgttgtggggatttcgtgtatttgttttttatattagcgtaggattatacgtgtagttttttatgttttgttttttttagagtttttatattatttttttttgtaattttatgttatcgggatgtttgtttttgatattttgttatatgtttttttggaatgaagtggggtttttttttatttttcgtgtttatagggttatttgatttttttttttgttttagggatttatttgtttggatttagttatcgatgatgggttgtagtcgggttatttgggtttttttgtttgggtttttatgattattgatttgttggtgatttgggtaagtttttttttttttttgggatttagttttattttgtagaaattggaggttttggtgggatgtgggtgtagttttttcgtgggaattttgtcgggtggtagggtttagtagaggagtttttatagttagcgttttttatttagttgggttgttttttgttgtttagtatcgttagttttcgattgtttagtgatttttaattgacgttttgttttttgtcgtatggaggttttcgtggaagaaatcgttatagtggtgggtacggtatgtggtaggtaggggaggatttatagtttttataaagaatattgtaaagtaggttggagattttatgagttggtttttgtttgtgtgttttattttatattaagggttttgaggtagcgtaggttacgtaggaagtttagggttgcggtgggggcgcgggaagtttagggttgcggtgtggttgcgggaagtttagggtagcggtgggggcgcgggaagtttagggtcgcggtgggggcgcgggaagtatagggacgcggtgggggcgcgggaagtatagggtcgcggtgtgggtgcgggaagtttagggtagcggtgggggcgcgggaagtttagggtcgcggtgggggcgcgggaagtttagggtcgcggtgggggcgcgggaagtatagggacgcggtgggggcgcgggaagtatagggacgcggtgggggcgcgggaagtttagggtcgcggtgtggttgcgggaagtttagggtagcggtgggggcgcgggaagtttagggtcgcggtgggggcgcgggaagtatagggacgcggtgggggcgcgggaagtatagggacgcggtgtgggtgcgggaagtttagggtagcggtgggggcgcgggaagtttagggtcgcggtgggggcgcgggaagtttagggtcgcggtgggggcgcgggaagtatagggacgcggtgggggcgcgggaagtatagggacgcggtgggggcgcgggaagtttagggtcgcggtgtggttgcgggaagtttagggtagcggtgggggcgcgggaagtttagggtcgcggtgggggcgtgggaagtttagggtcgcggtgggggcgcgggaagtatagggacgcggtgggggcgcgggaagtatagggtcgcggtgtggttgcgggaagtttagggtagcggtgggggcgcgggaagtttagggtcgcggtgggggcgcgggaagtttagggtcgcggtgggggcgcgggaagtatagggacgcggtgggggcgcgggaagtatagggtcgcggtgtgggtgcgggagtgtcggttttttggaggttaggataggattttttgttcgtttttagtttttaggttttatggagagtttttcgatttattgaggttattgtttgtcgtttttttgtttagtagggtttcgtgttttggatttgttttatagttttttatattttattttgtttttattagtaattttagcggtttttgttttagtttttttgggttttgttttagggttttttggtgattatttgttaagcggataaagtaacgggtattgttgcggtttattgttaggtattatagggattatttttttagaggttgttatttttatggttaggtttttaaggcgtgtcgaaggcgggagggttgggatggtttaagacgtgagtgtttcgggggtttttgttagatttgttcgtagggattacgatgtttttattacggttgttgggtggtaggagggtagttttgtggggtggggatggttttatgtgtgcgtttt

SEQ ID NO: 1871 - DNA, 2500 bp, Artificial Sequence
  chemically treated genomic DNA (Homo sapiens)
ttgaggtaatttatgttgttaatgtagagtgaaggttagatattttataagaaatatgtaaatgtttttagatttagaaattttttttttattttatttgtttttttattttaagggaagttaatattttggaattttgtgtagatgttattaagaagaagaagaggggtttagaggtatgtagaatttagttgaaaaagaataatttatttatgtttgaagttttaaattagttttaattatttttgttaagagttgaggaagggatttaggagaaaggggattaaatttattttttttttttttacgaattttagtataatttgttttaagttaatttttattgaatgttgtgggttgattgttattttaagttatttgttttttttaaatattttaagaagtgttttgatttattttatagatgaagaaattgagatttaaagaggttaagtaattttttaagtggcgaatataggtggtagagaagattgaagatttaaattttggttgttagtttttaaaatttgaatttattattgatttttatggtattggtttggattagattatttttaatattttttttaattttgagattttaggattttttgatgttaggatattataaatttattataatttttttaaatttgttaaattaattttagatttttatgattatagatatgatatttttagaattaatatttaaattaaggtaggattattatatagaaaatataattgagtagaatttatttttgttatgttgttttttttagaattgattttaaaatatagcgttatgtttgttagagttagttatttgtaatgtgttagaatttcgattttaggtaagtgttaggagttaaaatgtaggtttttttaaatttttaagtagttgcggtgttaagttgatttcgatgagttgagtttttattgagtagtttaaatgattagattgtaattaggggttttatttttttatttacgaagtattagggtagttaaggggaaagattgacgtagaaggaatgaggtttttatgggttgggtttaaaagatttagagcgagtgtttagttgaaatatttgttaaaattttaaggaatatttatataaaaataagaagttgttcggtatagaagttagggtaggggatgtttttcgaaggttatattttatggtaggtatatagtagtacgtttaaatatggtttttgttaaggttagagaggtattatttatatagaagaagttattatcgtgattttatttatttcgcgtttttatcgcgtaattgaatgttgagtgtggacggtattttttttagtatttggttgcgttatcgtgtttagttggtaagttttgggggagaagagaggtttagaaggaagattatttgagtttattagaataatgtgtgtttttaataaggtaggggcgtttaaatttagtaggtttaatagattaagttatgttatgaaggttttgtggattatttattttcgttaattagttattatttaaaagatgagaaaacgttagtttataggttaaatgggaggtatttagaagagatattaatgaagagatgtttggttttgtattaattattgtaggtaaattaatattaaatgttaggaagtaaagtagaggtatttttttattataaatttttgggataagtttagagattattagtagtttagggtttgtgtacgttgagaattgaggggataatagaattgtgtaatattttggtgttttatcgttttcgttattaaattttatagtttatagtatcgttttggtatattgggtttgtgtaatatttatggatttgatttggaattataaagcggatttagtttttgttatatttatttattttagtgattttgggtatatattgtgtttttgaaggaggtatagtggttataaatggaaatagtatttgtttgtttttggggattttggttatagatttttgaggtttttttgggagttagtttaagataatgggtaagagtatggattttgaaggtagagttttttgtttggaattttagttttgttattttttaattgtgtggttttaataagttatttagtttgtttgtgatttaggttttttatttataaaatgggtataatagtttttattttatagggttgttatggtgattcgtgggttaatattaaaggagattttttaattttagtattattgatatttggggtcggataattttttgttttgggggttgttttgagtattatgggatgtttagtaatttttttattttttacgaattgttgtgataattaaaattgtttttagatattgttatatgttttaaatattttttaggggggtaaaattgtttttagttgagaattattgtattagattatgtcgtagatataaatagttaaatattagtaattttacgtggtttaatttaataattataaagtatttaatagttaaaattt

SEQ ID NO: 1872 - DNA, 2500 bp, Artificial Sequence
  chemically treated genomic DNA (Homo sapiens)
gagttttaattgttaaatattttataattgttagattgaattacgtgaaattgttgatatttggttatttgtatttacgatataatttaatatagtggtttttaattggaggtaattttgtttttttaggaaatatttgggatatgtggtaatgtttggagataattttggttgttataatagttcgtagagggtagggaggttgttaaatattttataatatttaggatagtttttagaataaagaattattcggttttaaatgttaatggtattgaggttgagaaattttttttaatattagtttacgaattattatgataattttatgaggtaggaattattatgtttattttatagatgaggagtttgagttataggtaggttaagtagtttgttaaggttatatagttgggaaatggtagggttaggattttaagtagaggattttgtttttagagtttatatttttatttattattttagattggtttttaggaaagttttagaagtttatgattaaggtttttagaagtaggtaaatgttatttttatttatggttattgtgttttttttagaggtatagtgtgtgtttagagttattggggtgaatgaatgtaatagaagttgagttcgttttgtgattttaggttaagtttatgagtattatataagtttagtgtgttaaggcgatattgtgaattgtgagatttggtaacgggggcggtggggtattaaggtgttgtataattttgttatttttttagtttttagcgtatataagttttggattgttggtggtttttgggtttgttttaagggtttataataggaaaatgtttttattttattttttggtatttggtattaatttatttatagtaattaatataaagttagatatttttttattggtgttttttttaaatgttttttatttggtttgtgagttggcgtttttttattttttaagtggtgattggttggcgggggtaggtggtttataagatttttatagtataatttggtttgttggatttattgagtttgggcgtttttgttttgttaaaagtatatattgttttgatggatttagatggttttttttttgaatttttttttttttttaaggtttgttaattgagtacggtaacgtagttaagtgttggaagaagtgtcgtttatatttagtatttaattacgcggtgggggcgcggggtgggtagagttacgatgatgattttttttatgtgaatggtgtttttttagttttaataggaattatgtttaagcgtgttgttgtatgtttgttatggagtgtggttttcgaagaatattttttattttgatttttgtgtcgagtaattttttatttttgtgtgggtgttttttgaggttttggtaaatgttttaattaagtattcgttttaggttttttggatttagtttatgggaattttattttttttgcgttagtttttttttttgattgttttagtgtttcgtgggtgagagaatgaagtttttggttatagtttggttatttgaattgtttagtaagaatttaatttatcgaaattagtttggtatcgtagttatttggaagtttgaaggaatttgtattttagtttttagtatttgtttagagtcgaaattttgatatattataaatgattggttttgataaatatagcgttgtgttttagggttaattttgaaaagaataatatggtaaaggtagattttatttagttgtgttttttgtgtaataattttattttgatttaaatattgattttaaaagtattatgtttgtaattatagagatttagaattggtttgataaatttaggagagttataataggtttataatgttttgatattagagaattttagaattttagagttggaaaagatgttaaaggtaatttaatttaaattaatgttatggagattagtggtaaatttaggttttggaggttgatagttagagtttgaatttttaattttttttgttatttgtgttcgttatttggaaagttatttaatttttttgggttttagtttttttatttgtaaaatgggttaaagtattttttagggtgtttgagagaagtaaatgatttagaatagtagttagtttataatatttaataaaagttagtttagaataagttatattgaaattcgtaaggagaggaggaatgagtttggtttttttttttttaagttttttttttagtttttaataagagtagttaaagttggtttagaattttagatataagtgggttgtttttttttagttgggttttgtatgtttttgggtttttttttttttttttggtagtatttatataaagttttaagatgttagttttttttggagtgaagggataaataaagtaaaaaagaagtttttgagtttggggatatttgtatattttttatgaaatgtttggtttttattttatattgatagtatgagttgttttaa

SEQ ID NO: 1873 - DNA, 2780 bp, Artificial Sequence
  chemically treated genomic DNA (Homo sapiens)
tacgtagtttaagattgttagtaattttttcgcgaaaggttttcgggattgtgattttgaggattggtgagtgttttttttcgagagagtgagcgtcgggcgtttggcgtaggcgtcgttttgattcgtttttcgttcgtaggtttcggaattatcggttcggcgtattgtcgtttatgagcgttttcgcgcgttcgcggaatttcgtggttttttcgacgtagtttagcggtacggagaaaggtagggtcggggtcgtgggattcgggtttcggttttgtgcgcgttttatttcgggtcggcggtttcgttcgatttcgtttgcgttttcggggcgttttaggttttcgcgtcggttgtataacggtcgcggcggcgggtaagcgcgtattcgttcgttcggttcgacggttgcgtttcgttcgtcgtcgtcgtcgttcgtagaggggcgcgggtttcggggagggttcggggcgtcggcgatttggggtttcgggtacgttggtatcgattggtcggggaatatcgagggcggttaagagtttttttttcgttagggtttcgtatggggcgtcggagtttttcggcggtttcggtcggtcgcgtttatttttcggtttttttcgtagacgcggttgaggttcggcgagaattttagcgcgacgcgggcgggttagtagtgttcggggattcggcgtatttttcgtagttgttggttcgggtgttaagtttttcgttgttcggggtcggcggcgtcggcggtttagtttcgttgttcggcgcgttcggaggtcggtttagtttttcgaatttcgagttgcgtttggaggcgttcggcgtatcggagtcgttgtattattatttttataaatattcggtcgtcgtttacgattattatttcggggttaagagtcggtcggcgttttattcgttgttcggtttgcgtggttacggttattattcgtacgcgtattcgtattattattattatttcgtgagtttagtcgtcgcggtcgtcgtcgtcgttgtcgtagttgtcgcggtcgttaatatgtattcgtcggtcggagtcgcgtcgttcggtttttacgattattgttttagataatacgggttttgtcgcgttttcgtttcggttttgtatagtttcgaagttcgtcgggttcggttattttgttttaagggtaagtaaggaatacgtttttttagttttaggggttatcgcggttttttttttttttagtttcgaagttatgggggttttttcgttatttttagttttttgggttatcgaagtattcggttttttagtttttggagttatcgcgggttttttttcggtttcgagggttaagggggttttcgttcgttagtgttaaagcgttcggtcggaggcggaaggaagtgatatttattgtttttttcgagatcgcgtcgttcgcggttcggtcggtagttgtagtgtagatagttcgagagtttcgtttgtaggcggtgtagatatatgtagatattgtagatattgtagatatcgtttcggcgtcgatttgataaacggtttcgttttttttggaagtcgtttgcgtgtttatttatttgtgtttagttagatcgcgttgggaattttcgggatagcgagttcggggtagtttagggtttttagggtttttttagttttaatttttgtcgattgtaggtcggtttcggttttatagcgttttgttcgttacgttttttgttttttgttcgttttataggggtttttattgtttttttttttttcgaggttttttttgttaggtttgtgtattttttttatttttttatcgtttcgttttattttaatttttttagggttggtggtatcgtttaggtgtgtattttgtttttttatttaaattttttttatttgtagttgtttttattttgggatttgggtttgcgttttggtttgttttcgggatagatgtttgtgtttttttatggaagttgggaagaagggttatgatagatattgtcggtcggtgttgggagggggagaagtttttgatcgggatggggttatggaaagataaaaataggtagtattgttttgttagtattttttttgtcggtttagtttaggttcgtatgttttttttttagtgattttatttgttgtgagtgtttttacggagtgatttggttagggggtataatgatagtagttatgagttattttgagatttgtgtatgaagtattttttttaggttaggtggttaagggattttttttcgttaatttaatattagggatggggcgagaggaattttttgatttttttttttttgagcgtaagtaggaagggttgatagtcggttagcgttaaggttgttgatttggatataagatgaacgggaagtgtacgtggtcgaggttttgttttttatttttcgtgtttgttttagtgtgtttgtggtaattgttgttttttaggttattcggtttattattttacgtggtagcggtagtttgagtgttattttttcgagggtatagttaggagtttttagatgtttattttcgcggatttgtttttcgtatatatgtttgttttggcggcgtgaagtgagtggggttttagtaattgaatggtaggaattatttttagaggttagtttagggtgggagggggtttttaggggttatttaaagttttaaagggtatttagtattagagagtgaggatttttgtagtatttgtttaggtttcgtgagtacggttttggagatgtatttg

SEQ ID NO: 1874 - DNA, 2780 bp, Artificial Sequence
  chemically treated genomic DNA (Homo sapiens)
taaatgtatttttaaagtcgtgtttacggagtttgggtagatgttgtagaggtttttattttttggtgttagatgttttttgaggttttggatggtttttggagatttttttttattttagattggtttttgggaatggtttttgttatttaattattaagattttatttattttacgtcgttagagtaaatatgtatacgaaaaataggttcgcgagggtggatatttggaaatttttggttgtgttttcggagaggtggtatttaggttgtcgttattacgtggggtgatgagtcgagtggtttagaaggtagtagttgttataaatatattgggataggtacgggaggtgggggatagagtttcggttacgtgtatttttcgtttattttgtgtttaagttagtagttttggcgttgatcggttgttagttttttttgtttgcgtttaggaagggagggattaaagagtttttttcgttttatttttggtgttgagttaacggggagaggttttttagttatttggtttgggaaaaatgttttatatataggttttaagatgatttatggttattgttattgtgttttttggttaggttatttcgtagggatatttatagtaaataaagttattaaggagggaatatgcgggtttgggttaggtcggtaggggaaatgttagtagaatagtgttgtttgtttttgtttttttatgattttatttcggttaggggttttttttttttttagtatcgatcggtagtgtttgttatgatttttttttttagtttttatggaaaagtataagtatttgtttcgaaaataggttagggcgtaggtttaagttttagaatagggataattgtaggtgggaggaatttaagtaaaaaggtaggatgtatatttgggcggtattattagttttggggaggttgggatgagacgggacggtgggaaggtggggggagtgtataggtttggtaggaggggtttcggagaggggaggggtagtgggagtttttatggggcgggtagagggtaggaggcgtggcggatagggcgttgtgggatcgggatcgatttatagtcggtagggattggggttggggaggttttgagggttttgagttatttcgggttcgttgtttcgaagatttttaacgcgatttaattgggtataaataaatggatacgtaggcggtttttaaaagaggcgaaatcgtttattaagtcggcgtcggggcggtatttatagtatttatagtatttatatgtatttatatcgtttgtaggcggggttttcgggttgtttatattgtaattgtcggtcgggtcgcgggcgacgcggtttcggggagaataataaatattattttttttcgttttcgatcgggcgttttggtattggcgggcggggatttttttggttttcggggtcggggaaggattcgcggtggttttagggattggggaatcggatatttcgatagtttaaggggttgggggtggcgagggggtttttatggtttcgaggttggggaaggggagagtcgcggtggtttttggggttgggggaacgtattttttgtttgtttttggggtagggtggtcgggttcggcgaatttcggggttgtgtaggatcggggcgggagcgcgatagggttcgtgttatttggggtaatagtcgtaggagtcgggcggcgcggtttcggtcgacgagtatatgttggcggtcgcggtagttgcggtagcggcggcggcggtcgcggcggttggatttacggggtggtggtggtggtgcggatgcgcgtgcgggtggtagtcgtggttacgtaggtcgggtagcgggtagggcgtcggtcggtttttggtttcgagatagtggtcgtaggcggcggtcggatatttgtaggggtggtggtgtagcggtttcgatgcgtcgggcgtttttaggcgtagttcggggttcgggggattgggtcggttttcgggcgcgtcgggtagcgggattaagtcgtcggcgtcgtcggtttcgggtagcgaggggtttagtattcgggttagtagttgcggaggatgcgtcgggttttcgagtattgttggttcgttcgcgtcgcgttggaattttcgtcgggttttagtcgcgtttgcggagagggtcgaggagtgagcgcggtcggtcggggtcgtcgaggagtttcgacgttttatgcgaggttttggcggagagaaggtttttggtcgttttcggtgtttttcgattagtcggtgttagcgtgttcgagattttaagtcgtcggcgtttcgagtttttttcggggttcgcgtttttttgcgggcggcggcggcggcgggcggggcgtagtcgtcgggtcgggcgggcgagtgcgcgtttgttcgtcgtcgcggtcgttgtgtaatcggcgcgaaagtttggagcgtttcgggggcgtaggcgaggtcgggcgaggtcgtcggttcggggtagagcgcgtatagggtcggaattcggattttacgatttcggttttattttttttcgtgtcgttgggttgcgtcggggaagttacggggtttcgcgagcgcgcgaaggcgtttatgagcggtagtgcgtcgggtcggtggtttcggggtttgcgggcgggaggcggattagggcggcgtttgcgttaggcgttcggcgtttattttttcgggggaggatatttattagtttttagggttatagtttcggaagtttttcgcgaagggattgttggtaattttgagttgcgtg

SEQ ID NO: 1875 - DNA, 2333 bp, Artificial Sequence
  chemically treated genomic DNA (Homo sapiens)
gcgtaaaaggaatcgttggagggttttaatgatttaaattgaaaataacgataaaaagtttttaaggtattttttatttatatagtttaaaaaataattatgaaaaggaataagataatttaatggtttgattaacgaggcgtcggttattgtgttgtgtgttggggtaggatggggttttatttggggtttgtatttttaagtttttatagagttttatattgattttaaggtggggtcggttggagggatatttaagtttagtaaatataaatgtaaattgtattttttcgtgaaaaagatttgaaaaatattgtagtatttttaagttgtaatttaaagattgacggggtatattagggttttcgagatttttacgagagagatggtagtgaggtatcggaggaggtttttgtaaaaggtttttttttttttattatttttgtttttatttgtattattatttttgagttagtgggtatgtgattatttatgtttgggaaaatttttttttagggtattattaaaagatatttttagatgaaatcgatgtcgagggaggaattttcgttcgtgttgtttttatttgtttaggtttgtaggggtgtgggcgtggggttatgtgggtgtgtttgggggtttgtggaggatgggggagggttgtaggagaattttttttgttttttaattttgaaaagtaaaatttaatttatttgtttataaaatattagttattgttttattttagtttattgttattttgtaggttcgggaggattttgttgaaggaaaaaaaaaatgttttaagtatttaaatacgttgagttatgtatgtattcgtttatagtgttgtgggttgttttttttttttttttttttttgttttttttttttttttttttttttttttattaaagtatatttattaaattgttgagttggaaagatttgtaatgagtttttgagttgtacgattgtgtttttttttttttttttttcgttttttttttttttttaaatttttatttgatattaaataaagtaaattttaaatagattaattgtcgtacggttttgtttcgtttttttagtttgtttttaggtttggcggggggtcgggttgcggtggcggtagcggtgggagatgtcggggcggtcggcggaggtttatgtggcgttttaggtgggatgttagcgttttgaaggcggaggttttggttttttttttttgcggtttgggtatggtatttttttagttttacgtgatggtcgttcggcggtattagtatagtcggtttattatcgaggtggacgagtatagttttaattttatttaggtttttattttttataatattaattagggtcgtttttagttatcgtatgtgtagatgtaagtgggatcggtggggtgggggtgggggcggtgacggttttttggggtgggtgtatggtttcgggtgttttttggttttgggggtattgtaataagtattgaatgtttgttgattgtaataattttggaattttaggattatcggggttttgagttgggagggatcggtaagaagttgtagatggatggtttgtgggtcgattttggtcgtagttttgttttatttggttaggagtatgttttataaatatttaaagatgaggtggatgtatagaaaattttagatttttggttttattttataaaatttaaaggtttggaaattttaggtttatatgtttttttggtagcgtttggcgggggttatattttcgattttttttttggtatttgggtggcgatttttggtttgatttacgttttttattgtatatatggggagatcgagttttagagaggggaaggggttcgttataagttttatggtaggttaggatattagttttgggttttttgttttttttttttgtttttttttttgtttagattttgtgttttttttgtgaaagtagagatgtttttttaaaaggattgggggattttgttgtttgtttttcggggtattgggggtgtttaagtagtgaggttttggggagtatatagatttaaggttttcgtgagtagtaggaggatttgttttgatgtttgtgtgcggggttagtttttttttttttggatttttcgaggatttggaaagttgtgggtagtttggggtggttttagaggtggtcgagtttttggttttgttttgggtggttttttgagtttttggagtttttttttttttttatttttattgttttttttatgagttttgtacgatagagtttatttggtgaggaattaggggtttaggttcgtgaggtgttttattttg

SEQ ID NO: 1876 - DNA, 2333 bp, Artificial Sequence
  chemically treated genomic DNA (Homo sapiens)
tagggtggggtattttacgggtttgggtttttggttttttattaggtaagttttgtcgtgtagggtttatgggagaagtaatggggataaaggaggaggggggttttaggaatttagggaattatttagagtagggttaggagttcgattatttttggagttattttaagttatttatagttttttaggttttcgggaaatttagagagggaaaggttggtttcgtatataggtattaggataagtttttttgttgtttacgggggttttgagtttgtgtgttttttagggttttattgtttgagtatttttaatgtttcgaggggtagataatagaattttttagtttttttggaaaagtatttttgtttttataagagaagtatagggtttggataaaaggaagggtagggaggggaaataaagagtttaagattggtgttttaatttgttatggggtttgtggcgagtttttttttttttttggggttcggtttttttatgtgtataatgaggagcgtaaattagattaggggtcgttatttaaatgttaagaaagggatcgggaatgtggttttcgttagacgttgttaggaggatatgtgggtttggggtttttaggtttttgggttttataaagtgaagttagaagtttggagttttttgtgtatttattttatttttaaatatttgtaaaatatgtttttggttaagtgaaataggattgcggttagaatcggtttataggttatttatttgtaattttttgtcggttttttttaatttagagtttcgatgattttagaattttagaattgttgtagttaataaatatttaatgtttgttatagtgtttttagaattaggaggtattcgagattatgtatttattttagggggtcgttatcgtttttatttttattttatcggttttatttatatttgtatatgcggtggttggaagcggttttggttgatgttgtagaaggtgaaggtttgggtggggttggagttgtattcgtttatttcgatgatgagtcggttgtgttggtgtcgtcgagcggttattacgtgggattgggagaatgttatgtttaggtcgtaggggaggagggttagggttttcgtttttaggacgttggtattttatttagagcgttatatggattttcgtcggtcgtttcggtattttttatcgttgtcgttatcgtagttcggtttttcgttagatttggaaatagattgaggagacggagtagaatcgtgcgatagttaatttgtttgggatttgttttatttaatgttagatgaagatttagaaagagggagagggcggggggagaggaaaaaaaaatatagtcgtatagtttaaaaatttattataaatttttttaatttagtagtttgatgaatatattttggtaaaaagaaaagggaagggagggaggggataagaaaaaaaagaaaaaaaaaataatttatagtattgtggacggatgtatgtatggtttaacgtgtttaaatatttaagatatttttttttttttttaataaaattttttcgagtttatagggtgatagtgagttggggtaagataatggttggtattttgtaaataggtgagttaagttttattttttagaattggggaataggaaggatttttttataatttttttttattttttatagatttttaaatatatttatatggttttacgtttatatttttgtaagtttgagtaggtggagatagtacgggcgaaaatttttttttcgatatcgattttatttaaagatattttttagtggtgttttgagaagggatttttttagatatagatggttatatatttattggtttaggggtggtagtgtaggtaggggtagagatggtgagggaggaggaattttttgtaaaaatttttttcgatgttttattattatttttttcgtaaggatttcgggaattttaatgtgtttcgttaatttttgaattgtagtttgagaatgttgtaatattttttaaattttttttacggggaagtgtagtttgtatttatatttattggatttaaatatttttttaatcgattttattttggggttagtgtagaattttgtagaaatttggaaatgtaggttttaggtgaggttttattttattttaatatatagtataatggtcgacgtttcgttagttagattattgagttgttttgtttttttttataattattttttaaattgtgtaaatgggaaatgttttgaagattttttgtcgttgtttttagtttgggttattaagattttttaacgattttttttgcgt

SEQ ID NO: 1877 - DNA, 2567 bp, Artificial Sequence
  chemically treated genomic DNA (Homo sapiens)
attatttttgtgttaaaatgtttttgtaattagtagttttggaagataaattgaaatatgtgattttttagggtttagtcggtttcgggattgaattttagtgtgtgtgtgttttagggtataagtatgtgtgttttaggatacgcggggtgtaagtgtttcggggtatacgcgtgtgttttagggtatatcgggtgtaggtgtttcggggtatacgtgttttaggatatacggaatgtaggtatttcggggtatatgtgtgtgttttagggtatatcgggtgtaggtgttttggggtatacgtgtattttaggatatatagtgtgtaggtgttttggggtatacgcgtgttttagggtacgtcgggtgtaggtgttttagggtatatatgtgttttaggatatacggagtgtaggtattttagggtatatacgtgtgttttagggtacgtcgggtgtaggtgtttcggggtatacgtattttaggatatatagcgtgtaggtgttttggggtatacgcgttttagggtacgtcgggtgtaggtgttttggggtatatatgtgttttaggatatacggaatgtaggtatttcggggtatacgcgtgtgttttagggtacgtcgggtgtaggtgttttggggtatatacgtattttaggatatatagcgtgtaggtgttttggggtatacgtatgtttcggggtacgtcgggtgtaggtgtttcggggtatacgtgttttaggatatacggagtgtaggtattttagggtatacgcgtgttttagggtacgttaggtgtaggtgttttggggtatacgcgtgtttcggggtatattaggatgtagattttttattgggtgtaaagtttttaatttttttttcgagttattagagtacggtttttagatcggagtagttttttttcgggttaggtagggtgtggattttgttttgaatgtatttagtttttagtcgattttgtttttttttttatttattgtataggtaggcgttgtaggtcgtagggagggcgtgcgtttcggttttttcgtttcgtgtttagtttgggaagtgttttaagattattttgggagaggtttgggttgcggcgttttcgtttttttgtttcgcgtaaggtcggggattttgttttttcggagcgagggtgttcggtaggtattagcggttagtagtagtcggggtcgggttttattcgaggatcgaggtgtcgatgaacgtttatgttcggaagatattggttttttggtttatgtatttatttaattttaagttaggttttttagatttttaaattaatagtggattttgtaaattgttgcgttagaggaaaatttaagcgagttcgatcgcgggaagtatcgtcgttatgaaaggcggtggtttagcgttatttgtcgggacgcggtagttaagggagtcggtgtcgggggaggtttgaggtttcgggttttcgggaggaaatagagttgtttgtaggaataaaggaggaaaggagggttacggttgttcgaagaatttttatacgaaaggtatgaaattagttggaattattttaaggaaaaaatttttttttaaataggcgtttttgcgtttagtagaagtgggttttattgttattgagtacggtttggggtttgcggggttgtttttagaatcggagggaagtaatttagttgtatataagaggttttggggagaggaattttttagggtttggagttttcgttcgagttgcgttatatttgttgggttggaagtttttatttagcgggagaaatataatttttggttttggtgtttgtggtagtaaaatttttatttttgtaaagttattgggcggaggttaggttttgtaagaggtttttttttgttggaggaagttttgggttttcggggatttcgtaggaggtagacgttggggatagggttcggtttacgggtagttgcgtttttttttagttttggtttttttgttttttttgttttttttgatttttttatcggtttttattgtttatagggcgttgagttagtagtagaaattgaggtggagatagttttcggtttttaaaatttgtgaaggagtttggattttgggaaggtatcgaggattgtttaggattttagaaaaggatgatagttaggttttttttttttttttttcgttttttaagttgttgggttttttggggggggggggttttgttgttgttttgagatagagtttcgttttgttttttaggttggcgtgtagtggtgcgatttcggtttattgtaatttttattttttagttttaagcgatttttttgttttagttttttgagtagttgggattataggcgttcgttattacgtttggttaatttttgtatttttagtagatttaggttttattatgttggttagtttggttttaaatttttgattttaagtgatttatttattttagttttttaaagtgttgggattataggtatgagttattgcgttttatcgtgttttttaaatgttgatggtagtttagttgttttttattttaataaatg

SEQ ID NO: 1878 - DNA, 2567 bp, Artificial Sequence
  chemically treated genomic DNA (Homo sapiens)
tatttattgaaatggggggtaattgagttgttattaatatttgaaaaatacggtggggcgtagtggtttatgtttgtaattttagtattttgggaggttgaggtgggtgggttatttgaggttaggagtttgagattagattggttaatatggtgaaatttgaatttattgaaaatataaaaattagttaggcgtgatggcgggcgtttgtaattttagttatttaggaggttgaggtaggaggatcgtttgaaattaggagatggaggttgtagtgagtcgagatcgtattattgtacgttagtttgggagatagagcgagattttgttttaaaatagtaataaaattttttttttttaaaaaatttaataatttgaaaaacgaaggaaggaaggaagggatttggttgttatttttttttgagattttgggtagttttcggtgtttttttagggtttagatttttttatagattttgagggtcgaaggttgtttttattttagtttttgttgttggtttagcgttttgtgggtagtgggagtcggtggggggattagaaagagtagaggaggtagggaggttaggattggggagggacgtagttgttcgtgggtcggattttgtttttagcgtttgttttttgcggggttttcgagggtttagggttttttttagtaaagggaggttttttgtaaggtttggttttcgtttagtggttttgtagggatggggattttattgttataaatattagagttagggattgtgtttttttcgttgagtggaggtttttaatttagtaggtgtgacgtagttcgagcggggattttaggttttggaggatttttttttttaggattttttgtgtgtagttggattgttttttttcggttttgaaaatagtttcgtagattttaggtcgtgtttaatggtaatgaaatttatttttgttaaacgtaggagcgtttatttggaggaagattttttttttgaaatgattttaattaattttatgtttttcgtgtaagaatttttcgaatagtcgtggtttttttttttttttttgtttttgtaaatagttttgttttttttcgaggattcgaggttttaggtttttttcgatatcggtttttttggttgtcgcgtttcggtaggtggcgttgagttatcgttttttatggcgacggtgtttttcgcgatcgggttcgtttagatttttttttgacgtaataatttatagaatttattgttgatttagggatttggggagtttaatttaaaattaagtaaatatataaattagggagttagtgtttttcgaatatgagcgtttatcggtatttcggttttcgggtgaggttcggtttcggttgttgttggtcgttggtgtttgtcggatattttcgtttcgggagagtaggattttcggttttgcgcggagtagagggacgaaggcgtcgtagtttaggttttttttagggtggttttgagatattttttagattggatacggagcgggaggatcgagacgtacgttttttttacggtttgtagcgtttgtttgtgtagtgaatggagggaggggtagaatcggttggaagttgagtgtatttagggtagggtttatattttgtttggttcgaggaggggttgtttcgatttgggagtcgtattttggtggttcggggaaggagttgggggttttgtatttagtaagagatttgtattttggtgtgtttcgaaatacgcgtgtgttttaaaatatttgtatttggcgtgttttgaaatacgcgtgtgttttgaaatatttgtatttcgtgtgttttgaaatacgtgtgtttcgaaatatttgtattcggcgtgtttcgaaatatgcgtgtgttttaaaatatttgtacgttgtgtgttttgaaatacgtgtgtgttttaaaatatttgtattcggcgtgttttgaaatatacgcgtgtgtttcgaaatatttgtatttcgtgtgttttgaaatatatgtgtgttttaaaatatttgtattcggcgtgttttgaaacgcgtgtgttttaaaatatttgtacgttgtgtgttttgaaatacgtgtgtttcgaaatatttgtattcggcgtgttttgaaatatacgtgtgtgttttgaaatatttgtatttcgtgtgttttgaaatatatgtgtgttttgaaatatttgtattcggcgtgttttgaaatacgcgtgtgttttaaaatatttgtatattgtgtgttttgaaatatacgtgtgttttaaaatatttgtattcggtgtgttttgaagtatatatatgtgtttcgaaatatttgtatttcgtgtgttttgaaatacgtgtgtttcgaaatatttgtattcggtgtgttttgaaatatacgcgtatgtttcgaaatatttgtatttcgcgtgttttgaaatatatatgtttgtgttttgaaatatatatatattggggtttagtttcgaggtcggttggattttgaaaaattatatattttaatttattttttagaattgttaattataaggatattttggtataagagtaat

SEQ ID NO: 1879 - DNA, 2312 bp, Artificial Sequence
  chemically treated genomic DNA (Homo sapiens)
agtgaatgagtgtttttatttttttttgatatatggtttaagtgtatagtttaatgaattatttgttttttatttagttagtatttgtttagaggttgttattattttgattgttaatagtattaattggttttgtttgttattgaatttttttgtttttttttttttttttttttttttttttgagacggaatgttgtttttgttgtcgaggttggagtgtcgtgatgtgattttggtttattgtaatttttgtttttaaggtttaagtgatttttttgttatagttttttgggtagttgggattataggtgcgtattattacgttcggttaagttttgtatttttagtagagacggggtttttttatgttggttaggttggtttcgaatttttgattttaggtgagttatttattttaatttttcgaagtgttgggattattagtatgagttatcgtattcggttgtgtttttgaattttttatatatagatttatttgggttttcgtgtgtttagtttttgtttcgcgttagttggaggtttttattcgtgtagttgggtgtgattatttattttttttagttgttaatgtttggatttcggatttttttttttgtcgcgggtttgtcgttatcgtttattttgttttttttttaggtttttatttttgggtaggagagttgtcgattatttcgggggtgttttttttgcgtttgaatatttatagttgtttttgaggggttgggagtcgggtttttgggagagacgagttatgaattttttatagtttttgtatttggggattttattttaggagagtgttatttatagttttcgttagggtaaaggagttgagtagttattttaagtttagtttatttttttttttcggtttttggtaggtatggattagtagttgtgagtagttagagttgatgttcggtttttaggggggtagaggcgtcgttattatgagtttgggtaagttttcgtttgtgggttgggtgtttagtttatagggaaagaggcggttgattgtagatatgattagttatttattcggggattttcgttatattatgtatgtgggtcgtggcggggatgttttcggggatacgtttttttttagtaattacggtggtagtttcgggagtatttatcgtttatttcgtagttttttggttaagaagttgtagttggtgcggagggtgggggcgttttttcggaggatggtatttttttttgtatttttttcggttttatcggttattttttttattattaagaacgttatttttttgttttagtttaattaggtcgtttacgatagtttcgtggttggtaagtttagtttcgatagtagttttattagttttacggacggttattttagttacggtgagggtttgggttattttggtttattttttagaggttgaggttgaggtttagaggggtttagtggtttttttaagttttaagtgagttttaagtgattatagaggttaggtttagattttatattatggatggggagggggtgtagtggtgggaataagttgattttttaaaatatttgaggttgagagtgaggaggtggagtttgaattttagttgttttttatttgttgtgtgatttgggtaagtatatttttttttttgggttttagttgaattagttatttatttatttttgttttttttaattaaagttttttttttatgtcggaatgatattatggagaggtgaagggtttgggttttagattttaatttagttttgtttgaattttaggaagttagttgatttttataagtttaagttttcgtttggataatgagtttttcggggttattgttaagatttagtgttaggagaggcgtaggggggttgatatttagtaggtgtttaggatattggagttgttgttatttgaatttggttttttgtaattcgataaatttgggaaattatttataggaatcgtaagttataggtttttttgtttagttagaagtgttattttggtcgttcggttagagtttatttgagaattatgggtttttgttgttatttggtggttattttttgttttgcgggagtggttttaatatttttgttttaggcggttgtttagaatcgtattgaggattggtttatagaaattcgattttgttttaggtttgtagttttggaagtaggggttggatatgtttgttttttatttttatatagttagattttgattgttggttttattttgtgtttataaattagtttacgtgttatgggtttatttgtagttatcg

SEQ ID NO: 1880 - DNA, 2312 bp, Artificial Sequence
  chemically treated genomic DNA (Homo sapiens)
cgatggttgtaggtgaatttatagtacgtgagttggtttgtggatataggatgggattagtaattagggtttgattgtatagaaatgaaggatagatatgtttagtttttgtttttaggattatagatttgagatagaatcgggtttttgtggattagtttttagtgcggttttgagtagtcgtttggggtaggggtgttagagttattttcgtaaggtagggagtggttattaggtggtagtaggggtttatggtttttaggtgagttttgatcgaacggttaaggtggtatttttggttgggtaggaaggtttgtggtttgcggtttttgtgagtggttttttaaatttgtcgagttataggaaattaagtttagataataatagttttagtgttttgagtatttattaagtattagtttttttgcgttttttttggtattgaattttagtaatgatttcgagagatttattatttaggcgaggatttgaatttatagaggttaattgattttttgaaatttaggtagaattggattggaatttagagtttaggttttttatttttttatgatattatttcgatatgaggggaaggttttggttgaagggggtaagaatgggtgggtgattggtttagttaaggtttagagagggggatgtgtttgtttaggttatatagtaagtgaggggtagttagaatttaaattttatttttttatttttaattttaggtgttttggggagttagtttgtttttattattgtattttttttttatttatgatgtggggtttgggtttgatttttgtggttatttggagtttatttggagtttggaggagttattgaatttttttgggttttagttttagtttttgaaaagtgggttaagatggtttaggtttttatcgtagttggagtggtcgttcgtggagttggtggggttgttgtcgaagttgagtttgttaattacgaggttgtcgtaggcggtttggttgagttggggtagggagatggcgtttttgatgatgggggagatggtcggtggagtcggggagggtgtagggggagatgttatttttcgggggggcgtttttatttttcgtattagttgtagttttttggttaggaagttgcggggtgagcgatgggtgttttcggagttgttatcgtggttgttgaggaaggacgtgttttcgaagatattttcgttacggtttatatgtatggtgtggcggaagttttcgagtgggtggttgattatgtttgtagttagtcgtttttttttttgtgaattggatatttagtttataggcgagagtttgtttaggtttatggtggcggcgtttttgtttttttgggggtcgggtattagttttggttgtttatagttgttagtttatgtttattaggggtcgggggagggaggtgggttgggtttgggatggttgtttagtttttttgttttggcggaagttgtaaatggtatttttttaaggtgaggtttttaaatgtagaggttgtggggggtttatggttcgttttttttaggggttcggtttttagttttttagaagtagttatagatgtttaagcgtagagaaagtattttcgaggtggtcggtaatttttttgtttagaggtggagatttggaaggaagatagaatgggcggtgacggtaggttcgcgatagaggaggaaattcggggtttaaatattagtagttgaagaggatagatgattatatttaattatacggatggaggtttttaattgacgcggggtagaagttaggtatacggggatttaagtgagtttgtgtatagaaagtttaagaatatagtcgggtgcggtggtttatgttggtaattttagtatttcgggaggttgaggtgggtggtttatttgaggttaggagttcgagattagtttggttaatatagagaaatttcgtttttattaaaaatataaaatttagtcggacgtggtggtgcgtatttgtaattttagttatttaggaagttgtggtaggagaattatttgaattttggaggtagaggttgtagtgagttaagattatattacggtattttagtttcggtaataagagtaatatttcgttttaaaaaaaaaaaaaaaaaaaaaaaaaaaaataaggaagtttagtaataggtaaaattaattgatgttattagtaattagaatgatggtagtttttgagtaggtattgattgaataggggataaataatttattgagttatatatttaagttatgtattaggaaaaaatagaagtatttatttatt

SEQ ID NO: 1881 - DNA, 2439 bp, Artificial Sequence
  chemically treated genomic DNA (Homo sapiens)
tattatttattagagggttgatgtttttgttagataggttatagttagtggaggtattgtttttgattagtttgtcgtttttgataaggtagttttggttaattttataaatttgaatgaataagaagggtgtaaggttggggtattagggataaataatttagatatgttagtgtgttgatttgtaaagtacgttagaaggtagttgaggttttagttttagttatagcgtattttaaggttagagtaaaaagttggttggttttttaggtttttttttgtaaggcggttgggttaaaattaaagattttgttgtataatataggtttgttatttttttggtggtggtattagggattaataagattagtatttttagttatattagttagttttattatagttattttataggatggtattttataaattattaagatgggttagaattgattatgagaagtaagttattgatgtttacgtgatgtataagttatagttagtgaagtagtattgataggtatagaaattttattttttattacgggggtttttttttatttttagggagttatttttagaattttatttttttgttgattttagtgcggtgatggtagtttttttgtttagcgcgtgttatagagaaggttatacgagtaggatgttatgttttaatataggttattttgcgtaggtttcggtgggttttgcggggtagttttttggtgtgttaacgattggtgatttttggaatggatatatattattttattttagcgtttagtattttttattgatttttttttgttatttagtaattattaattatggttgggttatttgagggagtgataagattattttatgtgtattatttataggttttttttgttaagttggataggttttgggggtgttattttgaatttaattttgaatgggtgttttttaaggtatttattagtttaagtttttttatttatagggattgattaatataattttaagtttttttttgtagttattagtaggttataaagagtaaagggtttaggaacgtgttaagaagttgttttttggtttttcgttattttagttatttttgattataaggttgtttttagaaggaaggtagtagagaatggttttatattgttcgattcgggcgttgtatttagcgtttattttgagttttattaacgaatagttgggtttgaaattattttttttttaggtttgtatagtaatttaagttatcgtaaagtttatttttgtagtttttgtttttggttatttcgatgacgtcgattattttattttgtttaaatatttggtttataggtatttgttgtttaagtttttcgcgggtttagtttagtttttcggttatagtgttttcgtttatttggatttttattaggtgggtttttttttggcgtagaggaagtaggcgtatttaggagaaggtagatatagtttagttttagttgttagcgttttttttatagtagaggaattgtagttttatgcggtttgattgatgttaagtatacggtaaaaagttagtaattttgaataagttattgaattttattaagaggaaggaatttttatttttgttaatagtaataatttaattttggatattggtgtttgagttattgttaggatgagcggataagatttatattataggtaaataattagattttagtttttattagtttaatgtttttgtggttgttttttgggttagttttttttggggtattgtagtggttttattttagttatttatatttgttttagtgataagtttgtttttgagagagtataagttttaagtaagaaaatgtattatcgggagcggtggtttatatttgtaattttagtattttgggaggtcgaggtaggtggattatttgaggttaggagtttaaaattagtttgattaatatggagaaatttcgtttttattaaaaatataaaattagtagggcgtggtggcgtatgtttgtaattttagttatttaggaggttgaggtaggagaatagtttgaatttagaaagtggaggttgtagtgagttgagatagggttattgtattttagtttgggtaataagaacgaaattttgtttttaaaaaaaaaaaaatgtatttaagtataaagtttttatttaaggatagtttggtaatgttttgataaaattttaacggtggatatgtatttttattcgtggtggtttttattatatggggttgtatttagtatttgagattagttaggataattagtaataggatagtaagaggtatttattttaattaagttaataaaaagtttgtttagtttattaattaggtttttaggagagtagttagtattttataatcgatttttaggtaggtattttagtgttattggtgagttatta

SEQ ID NO: 1882 - DNA, 2439 bp, Artificial Sequence
  chemically treated genomic DNA (Homo sapiens)
tggtgatttattagtaatattgaaatgtttgtttgaaagtcggttgtgaggtattggttgtttttttggaaatttagttgatgagttgagtaggttttttattgatttggttagagtgggtgttttttgttgttttgttattggttattttggttgattttaagtgttgagtgtaattttatgtggtgagggttattacggatgagagtgtatgtttatcgttgaaattttgttaggatattgttaggttgtttttgagtgaaagttttatgtttaaatgtatttttttttttttagagatagaatttcgtttttgttgtttaggttagagtgtaatagttttattttagtttattgtaatttttattttttaggtttaagttatttttttgttttagttttttgagtagttgggattataggtatgcgttattacgttttattaattttgtatttttagtagagacggggtttttttatgttggttaggttggttttgaatttttgattttaggtgatttatttgtttcggttttttaaagtgttgggattataggtgtgagttatcgttttcggtgatgtatttttttatttagagtttgtgtttttttaaaagtaggtttgttattagggtaagtgtaggtggttgaggtaaaattattgtagtattttaaaaggaattgatttaaaggatagttataggaatattgggttggtaggggttgggatttggttgtttgtttgtggtgtgggttttgttcgtttattttgatagtaatttaggtattagtatttaaagttaagttgttgttgttggtaaaaatgaaagttttttttttttggtgaggtttagtgatttgtttagagttattggttttttgtcgtgtgtttgatattaattaggtcgtatggagttgtagtttttttgttgtgggaggagcgttggtagttggagttgagttgtgtttatttttttttagatgcgtttgttttttttgcgttagaagaaggtttatttgatggagatttaggtgaacggaggtattgtggtcgagaagttggattgggttcgcgagaggtttgagtagtaggtatttgtgaattaagtgtttgggtaggatgagatgatcgacgttatcggggtgattaagggtaaaggttataaaggtgagttttgcggtggtttgagttgttgtgtaaatttgggggagaagtggttttaggtttagttgttcgttgatgaggtttagagtgagcgttgggtatagcgttcgaatcggatagtgtagaattattttttattgttttttttttgagaatagttttgtggttagaagtggttgggatagcggagggttaggggataattttttaatacgtttttggattttttgttttttgtagtttattgataattgtaaaggggagtttggaattatgttagttagtttttgtgaatgggggagtttaaattaatggatgttttaaaaagtatttatttagaattgagtttagggtgatatttttagagtttatttagtttgataggggagatttgtgggtaatgtatatgaaataattttattatttttttagatgatttagttatggttggtaattgttgagtagtaggaaggggttagtgggaggtgttgggcgttgaggtgaagtaatgtgtatttattttaggggttattagtcgttggtatattaagaagttgtttcgtaagatttatcgaggtttgcgtaaggtggtttgtattggggtatggtattttgttcgtgtagttttttttgtggtacgcgttgggtagaaaggttattattatcgtattgagattaataagaaggtgaggttttgagagtggttttttgggggtgggaagaggttttcgtgatggggagtggggtttttgtgtttgttagtgttgttttattgattgtagtttatgtattacgtggatattagtggtttgttttttatggttagttttggtttattttgatgatttgtaaggtgttattttgtagagtggttgtggtggggttgattggtgtggttggggatattagttttattggtttttgatgttattattaggggggtgataggtttgtgttgtatagtaggatttttagttttagtttagtcgttttatagaaaggaatttggagggttagttagttttttgttttgattttgggatacgttgtgattgggattgaggttttagttgttttttagcgtgttttgtaggttagtatattggtatgtttgggttatttgtttttaatgttttagttttatattttttttgtttatttagatttataagattggttagggttattttattaaggacggtaagttgattaagaataatgtttttattgattatgatttatttgataagagtattaattttttggtaagtaatg

SEQ ID NO: 1883 - DNA, 2453 bp, Artificial Sequence
  chemically treated genomic DNA (Homo sapiens)
atatatttttagaaggataagggagagtggatgttggaaagatagagcgagagattattattagggaaagattttatttttggaaggatattaaatttgggggggggtcggtagtggagttgttgtttttttttttgtatttaatagttttaattttggttttttttatttttagttttttttttttttggtttttttattgttggtttttgtaagttttttttttatttttcgtttaatatattttttagtttaaagtaaattatttttttttattttttatattttttagttttttttttttttttattgtaggttttagtgtttttgttttttttttggtgtatttgttatttgtattaattttttttttgttgtgtttagttatataaatgttaaagttattaatatttagttttataagttttattttgttttttttatttttttaataaaatgtttgtattttggttaggcgcggtggtttacgtttgtaattttagtattttgggaggtcgaggtgggtagattacgaggttaggagatggagattatcgtggttaatatagtgaaatttcgtttttagtgaaaatataaaaaaattagtcgggcgtggtggtaggtgtttgtagttttagttattcgggagattgaggtcggagaatggtgtgaattcgggaggcggagtttgtagtgagtcgagattgagttattgtattttattttgggcgatagagcgagattttattttaaaaaaaaaaaaaaaaaaaaaaaaaagtttgtattttgttttggtttgtgttcggtatttttgttttggtggttgtattgttttggggttattggttttggtttggttgtagtattttatggattttggtgagaaagttgagttttttttttagtttttgagttcgtttttttagttttttagttgattttgattttgtttttttaagtaagtgttttgatttatatgtaaggttgattatatttagtagaagtaagatgtttttagtggttgtatttacgattatggtttttttgtttattgtttgggcggggtttttaataatttttttaatttgtttatcgtttttagttgagattcgtttaatgatatgcgggggtggggtatacgtttttaattgagggttggttttggttcgtttgatggtacggatgttttttttaattttttgtgtgatttggtattaattgttaattaaggtaagaatattgggtgtgtttttatttataaatttttttattatttttgttatattggtgtcgttttggtttaagttgcgggtttgggttcgtgttcgtaatttgtttattagttttattatattgtaggtaattttagttatagtagttgttgtttttagatttatgttagtgtttaagagtataaaattgattttttttgtgaagggtgttagatttaggtcgaggagggttaggatgttagaggtagtgttaatagagttggatattatattggtaatggtggtgtttttgtggatttgtttaattttttttgtaagggtacggagtttttttatgtgatttttaagttttttttttaatcgaggaaatttttttaaaaattattgtttgtgttgttggtttttatcgtggcggtttttgttttttatgattatgtgatttgtaagtttgtttagagttttacggagtttatttgttttatttttgtataaggaaaggttaaaggattaagaaatgtagtttttttatttgtgaaatgagttttatgcgatttttattttgtgtaaattgtagagtttttattattaattaaatagaaataaattttataaatggaattaattattttttaaatttaaatatattttgtttattatagatattttttagtatttattttatatggaaataaatattttaaaggtattttagatgtttttttatggtaggtgtttgataaagatgtttttttatttaagggtaggttaatatcgtgattgttaaagtgtttggagagggaaaattttgtagatgaataaagagtagtgagagtgagataaagagattttattattaggatggtaggaaagtgaagtatgaattttatttaaagagaggttttttttttgtttttagtttttgggaagtgatttttaggtttttggaatgttttgtttggtaggaatatttttttttgtttggtgatttggttacgggatagtatagcgatgtgatggatgatagggtttggggttatttggtgttttttttgatttttagaggatttggggattaaaggtgtgagattttagggaagggttggagattttagttatgagggtagtttgtgatttagttttagtagatattttggatattaaggtatgggttgagaaagaaggattttttttttgattaattttagttgggttttttagagt

SEQ ID NO: 1884 - DNA, 2453 bp, Artificial Sequence
  chemically treated genomic DNA (Homo sapiens)
gttttgaagagtttagttggagttggttaaggagaaagttttttttttttaatttatgttttagtgtttagagtatttgttggggttggattataagttgtttttatggttagagtttttagtttttttttgagattttatatttttagtttttaagttttttggaagttaggaaagatattaaatagttttaaattttattatttattatatcgttatattgtttcgtggttaaattattaggtaaagaaagatgtttttattaggtaggatattttaggggtttggagattattttttaggagttgaggataaagggaaggtttttttttgggtaaagtttatgttttatttttttgttattttggtaataaggtttttttgttttatttttattgttttttgtttatttgtagagttttttttttttaaatattttggtagttacggtgttgatttgtttttgagtgaggaggtatttttattaaatatttattatgaaagagtatttgaggtgtttttaagatatttatttttatatggaataagtattgaggaatatttatgatgaataaaatgtgtttgagtttgaaagataattaattttatttgtaaaatttgtttttatttgattgatagtgaaagttttgtaatttatataggatagagatcgtatggagtttattttatagatagggaaattgtattttttaattttttaatttttttttgtgtagggatgaggtagatgagtttcgtaaagttttgaataagtttgtaagttatatggttatgaaggataaaaatcgttacgataaagattagtagtataggtagtggtttttgaaagagttttttcggttgaaaagggagtttgaggattatataaggaagtttcgtgtttttgtagaggaggttgagtaggtttatagaggtattattattgttaatgtggtgtttaattttgttggtattatttttggtattttgatttttttcggtttgggtttggtattttttatagaaggaattagttttgtgtttttggatattggtatgggtttgggagtagtagttgttgtggttgggattatttgtagtgtggtagaattagtaaataaattgcgggtacgagtttaagttcgtaatttggattaaagcggtattaatgtagtaaaggtgatgaaggagtttgtgggtgggaatatatttaatgtttttattttagttgataattggtattaagttatataagggattgggaggaatattcgtgttattagacgagttagagttaatttttagttaggagcgtatgttttattttcgtatattattgggcgaattttagttgaaggcggtgaataggttgagagggttgttgaaggtttcgtttaggtaatgagtagaggaattatgatcgtgggtgtagttattggaggtattttgtttttgttggatgtggttagttttgtatatgagttaaagtatttgtttgagggggtaaagttagagttagttgaggagttgaagaagcgggtttaggagttggaggggaagtttaatttttttattaagatttatgagatgttgtagttaggttaagattaatgattttagagtagtgtagttattagggtagaaatgtcgggtataggttaggataaaatgtagatttttttttttttttttttttttttttgagatggagtttcgttttatcgtttaggatggagtgtagtggtttaatttcggtttattgtaaatttcgtttttcgggtttatattatttttcggttttagtttttcgagtagttgggattataggtatttgttattacgttcggttaatttttttgtatttttattggagacggggttttattgtgttagttacgatggtttttattttttgatttcgtgatttgtttatttcggttttttaaagtgttgggattataggcgtgagttatcgcgtttggttaaaatgtagatattttattagggggataaggagggtaaggtaaagtttatggaattgagtgttagtgattttggtatttgtgtagttgagtatagtaagggaggggttaatgtagatggtaagtgtattaaggagaaggtaggaatattggagtttgtaataagggaggagagaggattggagagtgtggggaatgggaagaagtagtttattttggattaaagaatatattgggcgaagaatagagggggagtttgtaggaattagtaatgagaaggttaggaaaagaaagagttgaaaatggagaaaattagagttagaattgttggatataggagaagaaatagtagttttattatcgatttttttttaggtttgatgtttttttaagaataaagtttttttttggtgatggtttttcgttttgtttttttagtatttatttttttttgtttttttgggggtgtat

SEQ ID NO: 1885 - DNA, 2305 bp, Artificial Sequence
  chemically treated genomic DNA (Homo sapiens)
aggtagttttattgggttggaggttgtgggtgtttatatagggtttggtttataggaagtgtttgaaaggggggtcgatttggtgacggttttttttttttttttattattttatatatttttaggaatttatacggtggggatgtatttttcgggaaaggcgttggtggtgtagttgatgagaaggtaggttttgtttacggttttgaaagataggaagtgtaagagggcggcggttatgggttttgtcggagacgtggggaggtttttgtttggttttttgtaaagattttagtatttatttagtttagttttttgggttttcgtttttttatgtgagatgttttttgtttgtgtttttatattcgagagtttgtaagttatgtggatgtttgttaaagtggagattttagggtttagttttagagattttgatttataggtgtgcgtagagttggtaattcgttttttttataggtttttttaggggttagtgatgtgggatagagggtgtttagtagatttaggtaatgtcgaggggttttcgacgtttgatttgggttttaaattttagttgtattatttattagtggtatgattttggataagttatttaatttgtttttgttttagtttttttatttagaaaatagagatgagtttatttttataggagtgtgttgaggagtaaatttaacgaggtttattaaagtattgagtatagggtttgatgtatggtagtagtcgatggttgttagggaagatttgattttgttttttttttttatttttttcgtggagtagagtagttattaggttagggtttgagttagagtggtttgggtttaaattttgtgaggttttgggtaaattatttagtttttttgaatttttatttttttatttgtaaaatggatttattaggtttggtgagaggataaatagagaaggttagattaattttagagttggtatataggaaggaagtgataacgcgcgttttttttatttttagtatgcgaggttgggagcgggtgtaggtagtttagtcgaagtttagaggttaagggatagttttgggtttttttttgttttgcgtggttttgttattttttgtttagagaagatagtttattttttttttttattatcgtttttttttgggtttgttatcgaggtaattttgaatgattggaacgttaatttttgattttcgttcgtttttttttcgattagatataaagtagaagtgaatagggttggggtaggcgagggtagataaggagttatgtattagaattagttgaggttggtggataaatgggttcgtttttatttagatgggttatagttaaagtcggggttatagggtttaggttaggagagttgagttttttaaagttttgggttgtttttttgtagaatgggaaggttggataggaggtttttttttagttagaatatgttttagggtgagtttgtaggttggattttaagatgtggttgttggtaggtatgatagattgataaattggatttgtttttttattttgtgtttttttaagagatagcgttttgttttgttatttaggttgattgtagtggtattattatagtttattgtagttttaaattttcgggtttaggcgatttttttattttagtttttttagtagttgggattgtaggcgtatatgttattatttttggtttaaaaaaatttttttatagatataggttttcgttatgatgtttaggttggttttaagtttttggttttaagtaatttttttattttggttttttaaaatgttaggattataggtatgagttattgtatttggtttggatttgttattttatagatgaggaaattgaggtttttaggggataagatagtttgaagttattgggatttgataattgagaagggttttagtttagtttgttttttttttgtcgattttataattatttttttattttttagttttttttttttttttttgttttttaatgtttttttgttttttttgttttttatttatattttttatatattttttttaattcggtaggttgaggggaggggagagaaagtggagggggtgttagaaggtatatattataagtaagatagttatttagtttattttaagcgattttatagtatttttagggtataggtttttttttagatgaataagttgaggtttagagaggtgttgtgatttgtttaaggttatatagcggtattaagttagtgacgatagtttaggttagtttggggataaaggttgaattt

SEQ ID NO: 1886 - DNA, 2305 bp, Artificial Sequence
  chemically treated genomic DNA (Homo sapiens)
aaatttagtttttgtttttaggttgatttgggttgtcgttattggtttggtgtcgttgtgtggttttgggtaagttatagtatttttttgaattttagtttatttatttgggaggaggtttatgttttggggatgttgtggggtcgtttgagataagttgagtggttgttttgtttgtagtatgtgttttttagtattttttttatttttttttttttttttttagtttatcgggttggggaggatgtgtgggggatgtgggtgaggagtagaagaggtaaggggatattgagagatagagagggaaggaggaggttaaaggatgggagggtgattgtggggtcggtaggggaggggtaggttgggttgagattttttttagttgttagattttagtgattttaggttgttttgttttttgggggttttagtttttttatttgtaaaatgataggtttaggttaggtgtagtggtttatgtttgtagttttagtattttgagaggttaagatgggaggattgtttgaggttaggagtttgagattagtttaagtattatagcgagaatttatgtttataaaaaaatttttttaagttaggagtggtggtatatgcgtttgtagttttagttattggggaggttgaggtgggagaatcgtttgagttcgggagtttgaggttgtagtgagttataatggtgttattgtagttagtttgggtgatagagtaagacgttgttttttaaaaaaatataaaataaaaggataggtttaatttgttaatttgttatgtttgttagtagttatattttagggtttagtttataggtttattttggagtatgttttagttggaagggggttttttgtttagtttttttattttatagaggagtagtttaaggttttgagagatttagtttttttggtttgggttttgtggtttcgattttggttgtgatttatttaggtgggggcgggtttatttgtttattagttttagttgattttgatgtatggttttttatttgttttcgtttgttttagttttgtttatttttgttttgtatttgatcggaggaggggcgggcggaagttaagggttaacgttttagttatttaaaattatttcggtggtaggtttaggggagggcgatggtaggaggagaggatgagttgttttttttgagtaggaagtgataaaattacgtagggtaggggaaggtttagagttgttttttggtttttgggtttcggttgagttatttgtattcgtttttagtttcgtatgttgagggtggaggaggcgcgcgttattattttttttttatgtattagttttggggttaatttagttttttttatttatttttttattaaatttaataggtttattttataggtgggaaaatgaaagtttagggaagttaagtaatttgtttaaagttttataggatttgaatttagattattttgatttaaattttgatttggtaattgttttgttttacgggggaggtgagagggaagagtagggttaggttttttttagtagttatcggttgttgttatgtattaggttttgtgtttagtgttttgataggtttcgttggatttattttttagtatatttttatgaggatgggtttatttttattttttagatggagaaattgaggtagaggtaggttaagtgatttgtttaagattatattattggtaggtggtatagttgggatttgaagtttaggttaggcgtcgggggtttttcggtattgtttgggtttgttgggtattttttgttttatattattggtttttggagaagtttgtgggaaaagcggattgttagttttgcgtatatttgtggattagaatttttggggttggattttgaagtttttattttaataaatatttatatgatttgtaggttttcgggtgtgagaatatagatagggggtattttatatggggagacggaggtttagagggttaggttgggtggatgttgaggtttttgtagaggattaggtagaaatttttttacgttttcggtagagtttatgatcgtcgtttttttgtattttttgttttttagggtcgtgggtaagatttgtttttttattagttatattattaacgtttttttcggagagtatatttttatcgtgtgagtttttggggatatgtggggtggtgggaggaggggagagatcgttattaagtcgattttttttttaggtattttttgtgggttagattttgtgtgggtatttatagtttttagtttagtggagttgttt

SEQ ID NO: 1887 - DNA, 3096 bp, Artificial Sequence
  chemically treated genomic DNA (Homo sapiens)
tttaggttattgttgtttaggaagaggtgttgtagcgatttgtttataggttggaaggtttcgttacgtaaggttttgagtgggttgttcgagagttgtagttttaggagggtaggtagtttttttaaggttttagtgggtatttttcgtagttgatttttgtttaggtgtagtttttttagttttcgagttgggtttagcgttttaagggatatttcggtgatgcggtttttatttaggtagatttagcgtaaggttcgtgttttttttaggtttttaggtgttaggcggtttatagcgttgttttgtaggtgtagggagaagaggttgggtagggcgcgtagggtagtttttggtatttgtaggaaacggttgcgttttaggtataggtagtcgaggcggggagtttttttaagggtagtagcgttgaggtttgcgagttggttgtcggagaggtataggtagattaggcggtttagttcggttagggcgttcgtttttagtttcgcgatgtcgtagtgttgtaggtgtagcgatattaggtggtttaggtcggggaaggtcgttcggggtatcgaggggaagtggtttcgttttaggtttaggagttgggtgtcgttggggaagtcgcggggtatcgtttgtaggtcgtagttttcgtagttgttgtgtcgggattcggggacgtatacgtaggcgcgagggtaaggcgcgattgttcgttttttttcggggtcgcgcggagggtcgcgcggaggggcgcggggttcggttatagttcgtttttttagttttttttttttttgcgtcgcgtttttagggtagcgtaggttttagggtcgtagggcgtttagagtttcgtttcgtaggcgtcgcggtttttggtacgcgtcgttcgagcgtacgcgcgttcgcgttagttattcgagtaggggtcgcgtttggtagtcgtattatagcggatttttttgtagtcgtagtcggcgtagttggttcgggttttgtagcgggggtagggtgtttagttggttttcgcggaggtcgagggtgtgtaggcgcggatagtgtgcgaaggttttgggatttagggtttgtagggtttcgtcgtttagtagtagttttcgtaggtcgggtagcgttagttcgtttttttcgttcgcgtaggtgagcgggttgtggtttagttttagacgggttaggtcgcgggtttgggataagataggttcgggtagagtttggagttcgttgtggtgtaggttgagtcgttttagggcgggtaggttagttagggtttcgggggttagtacgttgagcgcgttgtgcgatagtcgtagttagcggacgcgtagtagtttttggaaggttatggcgggtaggtaaattagggcgttgtgggttaggtttagcgtggttagcgtatttagtgtttcgaacgttttcggtcgtagtttttttagtgcgtttttttttagttttagtcgtcgtaacgagtttagttcgtttagcgttttttggggtagtttacgtaggtggttggaggttaggttgagtaggagtaggcggtttaggttacggaaggcgttttcggttattagttttatttcgtagtggcgtaggtttaggtgtgtgaggtgaggtacgttttggaaggcggttgcggggattatttttagtaaattgttttgtaggtttagtcgttgggttagttggggatagcgaggagaaagtggggttgagttaggtagggatttcgtttttgtaagtgttgtttttttttcggaatattttttttttttgttattttttttatatttttttttattcgatttttgatattttttttaggaagtttttttttttagtgttttgggtattatttattgtggtattttttatattgtgttgtttttgttttttcgtttttttttttttattagttgatgattttgtagagtagagattatattttattttgttatagttcgtttttttattatagggtttgtagtgaatttagtatcgatttatgggttatttatttattttatttatatagtaaggattttaaatagattatttttttgttattggtttttattatttttattttatagaagtgtaaattgaggtttaaagagaagtaatttgttaaggtttttcgggtaggcggtggtagattaattggtgtttagtttaggtttttttttttgggtttttattttgttttattgttattttgtgtttgtgtttttgttttgttgattttagggatggcgtttggtattttagtgaggttttggtatcggtaggtaacgtgtcgtttggagttgttatagatgtaggtttgtgggtagcgttgggcggcggtttgtttagtcggggttagtagtagaagtataagaagcggtagtattaaggggatatgggtggagtttcggggtttgggacggggagggagagtttgttgtgtataagggtcgaggttatatgttgttttttatttagttttagttatggtgtagtttttgttttaaaaattttttagagtttttttttttgggtttaggaaagtgttaattattttgagtttttttgttttttattttttacgtagtggaggttttatgattagttttgttttatatgggaggaaatcgaggtttagaaaagtgatttggttagtttttttgtttttgtttaatggtttagtgaggatttgttgattgtgagaatgattttagtttagagtatgtttttaggttgtggtgaggttttggtttagggtaggttcggaagtagtttgtttttagattgatatgatgttagtttttaggtggtaggagtataatggtattttttagaaaggagggaggtatttagttcgggtttttgagtttttttttgtttgtttgtttaaatagagataagttttgttttgttgtttaggttggagtttggagtgtagtggaatgattatggtttattgtagtttttattttttgggttaaagtgatttttttattttagttttttgagtagttgggattataggtatatattattacgtttggttaattttttaattatttttggtag

SEQ ID NO: 1888 - DNA, 3096 bp, Artificial Sequence
  chemically treated genomic DNA (Homo sapiens)
ttattagaagtaattaaaaaattagttaggcgtggtggtgtgtgtttgtagttttagttatttaagaggttgaggtgagaggattattttagtttaggaggtgaaggttgtagtaagttatagttattttattgtattttagattttagtttgggtaatagagtaaggtttgtttttatttaaataaataaataaaaaaagatttaaggattcggattggatgttttttttttttttggggggtattattatgtttttgttatttgggagttggtattatattagtttgaggataggttgttttcgagtttattttggattagagttttattatagtttgagaatatgttttgaattggagttatttttatagttagtaagtttttattgagttattgggtagaggtaaagggattaattaggttatttttttgagtttcggtttttttttatgtaaaataggattaattataggatttttattgcgtggggggtggggggtagggaggtttagggtgattggtatttttttgggtttaaaggaggaggttttgaggggtttttggggtaggagttgtattatggttgggattaagtgagggatagtatgtggtttcggtttttgtgtataatagatttttttttttcgttttaggtttcggagttttatttatgtttttttggtgttgtcgttttttgtatttttgttgttggtttcggttaggtaggtcgtcgtttagcgttgtttataggtttgtatttgtgataattttaggcgatacgttgtttgtcggtattagaattttattgaggtgttagacgttatttttgaggttagtagggtaggagtataggtatagagtggtagtggggtaaggtggggatttagagggaggagtttgggttgggtattagttgatttgttatcgtttgttcgggagattttggtaaattatttttttttgagttttagtttatatttttgtaaaatgggaataataaaaattagtaatagggagatgatttatttaaaatttttattgtgtgaatggaataagtaggtgatttatagatcgatattgaatttattgtagattttgtggtggagaggcgggttgtggtagggtgaggtgtggtttttgttttgtagagttattagttagtggaggagagagagcgaggaggtagggatagtatagtgtgaaaaatgttatagtgggtgatgtttagggtattggagaggaaggttttttggaggaggtgttaggggtcggatgaagagaaatatgggaaaggtgataggagaaaagagtgtttcggggaagaagtagtatttgtaaaggcggggtttttgtttggtttagttttatttttttttcgttgtttttagttgatttagcggttggatttgtagggtaatttgttgaaggtgattttcgtagtcgttttttagggcgtgttttattttatatatttggatttgcgttattgcgaggtggagttggtggtcgagggcgtttttcgtggtttgggtcgtttgtttttgtttaatttggtttttaattatttgcgtgagttgttttaggaggcgttggacgggttgggttcgttgcggcggttggagttggaggggaacgtattggaggagttgcggtcggggacgttcggggtattgggtgcgttggttacgttaaatttggtttataacgttttggtttatttgttcgttatggttttttaggggttattgcgcgttcgttggttgcggttgtcgtataacgcgtttagcgtgttggttttcgaggttttggttggtttgttcgttttgagacggtttagtttatattataacgagttttaggttttgttcgggtttgttttgttttaggttcgcggtttggttcgtttggagttgggttataattcgtttatttacgcgggcgaggaggacgggttggcgttgttcggtttgcgggagttgttgttggacggcggggttttgtaggttttgggttttagggttttcgtatattgttcgcgtttgtatattttcgattttcgcgggaattagttagatattttgttttcgttgtagggttcgggttagttgcgtcggttgcggttgtaggggaattcgttgtggtgcggttgttaggcgcggtttttattcgagtggttggcgcgggcgcgcgtgcgttcggacggcgcgtgttaggggtcgcggcgtttgcggggcgaggttttggacgttttgcggttttgggatttgcgttgttttggggacgcggcgtaggaagaggaagagttggaagagcgggttgtggtcgggtttcgcgttttttcgcgcggtttttcgcgcggtttcggggaggagcgggtagtcgcgttttgttttcgcgtttgcgtgtgcgttttcgagtttcggtatagtagttgcgagggttgcggtttgtaggcggtgtttcgcggtttttttagcgatatttagtttttggatttgaggcggaattattttttttcggtgtttcgagcggtttttttcggtttgggttatttggtgtcgttgtatttgtagtattgcggtatcgcggagttggaagcgggcgttttggtcgggttgggtcgtttgatttatttgtattttttcgataattagttcgtaggttttagcgttgttgtttttgaaggggtttttcgtttcggttatttgtatttagaacgtaatcgttttttgtaggtgttaggggttgttttgcgcgttttgtttagttttttttttttgtatttgtaggataacgttgtggatcgtttggtatttggggatttggggagaatacgggttttgcgttgggtttatttgagtggaaatcgtattatcgaagtgttttttggggcgttgggtttagttcgggagttggagaagttgtatttggataggaattagttgcgagaggtgtttattggggttttggaggggttgtttgtttttttggagttgtagttttcgggtaatttatttagggttttgcgtgacggagttttttagtttgtgggtaggtcgttgtagtatttttttttgaatagtagtggtttgga

SEQ ID NO: 1889 - DNA, 2400 bp, Artificial Sequence
  chemically treated genomic DNA (Homo sapiens)
gtttcgttgtaatgaaaattatagtaataatgatgatatttaattttgatgggtatttggtatatgtttggtgttgttttaaggattttgtatgtatttatttatttaatttttatataattttacgagggagaggttattattgtttttattttattaatgattatttggagttaggtttgtttaaagttatttagttggtgataggtagagttgggattcgattttaggagtttttggttttttaaatattttttaggttgtttttatatgatagtttttttcgggttttgtatttttagtttttttcggataaagtttttcgattttattttattttgttgtttttatgggattttttgtagggttttgggtgtttttggagttttagtatttaaagttaatttttagtgtttttagatttgtgcgtttggagtttggtgagatgatttcgttaggttttgggtgttcgcgtttttatagttttaaagtttttgtatcgtggtgggtgtaattagtttggatgaaataaggatattagggtttaagttcgggttttgttatttagttcggtttttttgggttaggtattttttttttttaagtattagtttttttaattatgatatgagataaagtattaggaagtattttgtaggttataatgttattaattgttgttaatttgggttattttgggagttttttattttcgttaattgttgttttattttaagttttgggtagtttttagtggtagatggttttgggtgttttagttttgttttttgttaggttttgtggttttgagtatatttttttatttttttgattttaatttaagggatgttatgagatggagtaagggcgcgtatgtgatatttatttggtaaagttatcgtcgggttatgttagttgttattattattattgttgtttttggagaattttaagttttttttaaatggattttttttaagtttttggttttttttttgattttggatttaggagtagagtttgtgaagtgttatttttagtatgttgagtttttttatttttttaaataacgtatttttgttattaggtattatgtattagtaaagagaggagggttgatgttagggttcggggacgggatatttaggttggggtgtttagatttttttgttgattattttatcggttttgttgttttatttatatagagtttgtttagtttgtcggtttgggtgttgatggatgaggacgttcggatttttttttattagtcgttttatgatttagagtaggtgttttaggtatttcgtcggtttcgttcgcgtattcggaaagtgtaagtgattagtttttgggtttttatatggttagagttttgggtttttgttggaaaagtattttttttttttgaaaggagagaaggaaaatatagattagttatatttttggatattttaggatgatttgatttattagatgggtttagaaagttatgtttaggtttggagggatagagggtgtgtgttttttaatgtgataataaggattggaagacgaggattgggatattgattttagagagtttggtgttatagtaattattggggatagtttagaagttttgggtgtttggaaagaattgggggtagagaggagggaaaagttgttttatttataaatattttttgagtatttttgggaatgttttttttttggtgtgttggagttttatggggttagttatggttttagttgtattatgttggtttttagagtatattgttttttttttattttaaaaagtttattttttttattaaaaatttaagttattcgtagattgttgggtttttaaagtttaggttgttgttattaagaattttgggaaaagtaggacggagtttttgagttttttattagtttttttttttgtttttttttattaatgtttttaagggttttttttatgtttggtattttttttgtgtatataggtaggtgtgttttaattttagttgtgttatgtggtagtcgtaggttttagagtaaggtattttatttttttaatttttagttttttttagttgaaaaattagaaatagttatatttatattagagtttggttgtagggagtagaggaataaatatatttgaatattttggtaagtgaaaggtatcgaatgagcgtgtatttttttttttatttgttttttgagtttggttttttggtttataaagaagggagaataattttatttttaaagaggttgtgaggatttggggataagtgtgttcgtttagaggagtaattgtagttatattttagtattttttgttttttttgttttttttgttttttgtaaggggtttttttggatataggagtaggaagttgggtt

SEQ ID NO: 1890 - DNA, 2400 bp, Artificial Sequence
  chemically treated genomic DNA (Homo sapiens)
ggtttagttttttgtttttgtgtttagaggagttttttgtaaggagtagggaaggtagaggagatagaagatgttgaaatgtggttgtaattgtttttttgggcgggtatatttgtttttaaatttttataatttttttggaggtgggattgtttttttttttttatggattaggaagttaggtttagaaagtaggtggggaaggggatatacgtttattcggtgttttttatttgttaaagtgtttagatgtgtttgtttttttgttttttataattaagttttgatgtaaatgtgattgtttttaattttttagttgagggaaattgaaggttggagaggtgaagtgttttgttttggggtttgcggttgttatatggtatagttggaattaagatatatttgtttgtgtgtataggggagatgttaggtatggagaggatttttggagatattggtgggaggaagtagagggaggagttggtggggagtttaggagtttcgttttgttttttttagaatttttagtagtagtaatttgggttttggaagtttagtagtttacgagtggtttgaatttttggtgggaaggatgggttttttggaataagggaggaatagtgtgttttggaggttagtatgatataattagagttatagttggttttatggagttttaatatattagggagaaggtatttttagagatgtttagagaatgtttgtggatggggtagttttttttttttttttgtttttaattttttttaggtatttagagtttttgggttatttttagtagttgttgtggtattaaattttttggagttaatattttagttttcgttttttaatttttattattatattgaaaggtatatattttttgtttttttaagtttgaatatgattttttaaatttatttaataaattaaattattttggagtgtttagggatatggttgatttgtattttttttttttttttttagggaaaagagatgtttttttagtagggatttagggttttggttatgtggaagtttaggggttggttatttatatttttcgggtgcgcgggcggagtcggcggagtgtttggggtatttgttttgagttatagggcgattggtaaaagaagattcggacgtttttatttattagtatttagatcggtaggttgagtaggttttgtgtgggtgagatagtagaatcggtggggtagttagtagaaagatttggatattttagtttagatgtttcgttttcgagttttgatattagtttttttttttttattaatgtatgatgtttgataatagaaatgcgttgtttaaaagaataagaaaatttagtatgttgaaggtaatattttataagttttgtttttgggtttaaggttaggagagggattaggggtttgagaagagtttatttggaaaagatttaaagttttttagaaatagtagtaatggtgatgataattaatatgattcggcggtgattttattaggtgggtattatatgcgcgtttttgttttattttatgatattttttgagttaggattagagaggtgaagggatatgtttaaggttataaagtttagtaagggatagagttggggtatttagagttatttgttattaaaggttatttaaagtttaaggtgagataatagttggcgggggtggggggtttttaaaataatttaaattaataatagttggtggtattatagtttataaaatgttttttgatattttattttatattatagttgaggaaattgatgtttggagagggaaagtatttggtttagaggagtcgagttaagtgatagggttcggatttgagttttagtgtttttgttttatttaagttggttatatttattacgatgtaaagattttgaagttgtgaggacgcgagtatttagagtttggcggggttattttattaaattttaagcgtataggtttggggatattgagggttggttttgggtgttgaggttttagaggtatttagagttttgtagaggattttatgggggtagtaggatgaggtggggtcggggaattttgttcgagaggaattggggatgtagagttcggaaaaggttgttatatggggatagtttgggaggtgtttaaggagttaggggtttttgggatcgaattttagttttgtttgttattagttgggtggttttgggtaaatttggttttagatggttattaataaaatggggataataatagtttttttttcgtgggattgtgtgagaattaaatgagtaaatatatgtagaatttttagaataatattaggtatatattaggtgtttattaaagttagatgttattattgttattgtgatttttattataacgaggt

SEQ ID NO: 1891 - DNA, 2495 bp, Artificial Sequence
  chemically treated genomic DNA (Homo sapiens)
atatatttgtgaatgtttgttgggtttatatttaagaggggaattgttgtattattaggtatgtatatattaagttttaaaagatattgttaaagttttttaaagtaattttattaatttatatttaatgaaaattttaattttgtatattttttataatatttagtattgttaatttgtaaaattttaagtatttttataggtggttagttggagttttttgtggtattaatttgtatttttttaatggttgttgatgttgagtaattttttatattatatgtttgttggttatggaggtatttttttttaaaatgtgttagtttgagttttttgtttatttttaattgatttttttttatttgtaggaaatttttaaataaattttggatgttagttttttgtttgatatttataatgtaaatatttttttttgtttaatgtaaatatttttttttgttgtttgttattttattttttttaaagtaagaaaagatttttggtcgggtatagtggtttatatttgtaattttagtattttgggaggttaaggtaggtggattatttgaggttaggagttcgtaattattttagttaataaggtgaaattttgtttttattaaaattataaaaattagttaggtgtggtggtaggtatttgtaatttgtatttgggaggttgaggtaggagaattatttgaattcgggaggaggaggttgtagtgagttaagatcgtgttattgtattttattttggtttataggagtgaaattttgttttaaaaaaaaaaaaagagtttgttgtttttatcgagttttgaagaacgttagtagttcgttgtttaaaattaaattatagggttttatgatgggttaatttgatgggaaagttattattttgatagtcgttgtttaggggattggttaagtagttgttttagtttttgtaagagaaggtgttaaagttatagttatagatattaatgtgtttaaattttaggaattggaaaagtatttgggtatttaaattcgtgtttttgatgttataaagaagaaataaattgattagttcgttaatgaagttgagagatttgatgttttttttaatgttgttggttttgtttattatggaattgttttggattgtgaggagaaagattgggatttttcgatgaattttaatgtgcgtagtacgtatttgatgattaaggtatttttttttaaaatgtttgtttaaaaatttggtaatattattattatgttttttgtggtttttagtattaaaggagttgtgaatagatgtgtgtatagtataattaaggtagtcgtgattggttttataaaatttgtggttgtagattttatttagtagggtattaggtgtaattgtgtgtgtttaggaacggttgatacgttatttttataagaaagaatataagttagaggaaattttgaagaggtacggaatgattttttgaagagataaaagatgggacgatttgtaattgtagaagaaatagttatgttttgcgtgtatgtggtttttgatgaatttgtttatgtaattggtaattttgttattattgatggaggatggagtttgtgattttaggatttttatggtgggaaggaaggtaggttttttttatttatagtgaatttggttatgaagaaaatttattaattattttttttttgttaattatatgttaatgaaattaagttttttttaataatgttattgtttgtaagagtttgattttttaagtatattaatttttttgtaattttttttgaaattattgtaaagaaataaaaatattgaatttatagtaagagaatagtttttaaaataaattttaatttgtaagtatttgtgttagttattttgggttgttataataaattattatagatggagtgttatagataataaatatttattttttagtttggaggttaggaagtgtaagattaaggtgttagtagatatggtatttggttagggtttattttttagtttgtagatggttttttttttgttatatttttatatagtaagagtagagaaaaaaagtaagtttttatgtgtttttttataaggatattaattttgtttatgggggtattatttttatgatttaattattttttaaaggttttattttttaatgtattatattgggggttaggatgttaatatatgattttggggtgatataaatagtttattgtagtatatataattaaaatgtaaatatgaagaaaaaaggaagtttttgttttttttgtggggggtggggttaaggaagaagatagtaattttaggattaggtattgtagtttatgtttataatttttgtattttgggaggttaaggtaagaggattatttgttgttaggagtttaggattagtttagttaatagagagaggttaaggtaggaggattatttgagtttaagagtttgaggttgtagtgagttgtaattatgt

SEQ ID NO: 1892 - DNA, 2495 bp, Artificial Sequence
  chemically treated genomic DNA (Homo sapiens)
gtatgattatagtttattgtagttttaaatttttgggtttaaataatttttttattttagtttttttttattaattaggttggttttgaatttttggtagtaagtgatttttttgttttggttttttaaagtgtaggaattataggtatgagttataatgtttagttttgaaattattatttttttttttaattttattttttataaaaaaaataaaaatttttttttttttttatatttatattttaattgtatatgttgtaatgggttatttgtattattttaaagttatgtgttgatattttaatttttaatatgatatattaggaggtggggtttttgggaggtaattaggttataagggtagtgtttttatgaataggattagtgtttttataaaaagatatataagagtttgttttttttttttgtttttgttatgtgaggatgtagtaagaagaggattatttgtaaattaggaagtgggttttaattagatattatatttgttggtattttgattttgtattttttagtttttagattgaaaaataaatgtttgttgtttatgatattttatttatggtaatttgttatagtagtttaaagtgattaatatagatgtttataaattgagatttattttaaaaattatttttttgttgtgagtttaatatttttatttttttataatgattttagaagagattataaagagattaatatatttaaagaattagatttttgtaaatagtgatattgttaaaaagggtttagttttattaatatgtgattagtaggaaggagatgattggtgagttttttttatagttaggtttattgtggataggaagagtttgtttttttttttattatggagattttaaaattataagttttattttttattaatgatgatagggttattagttatataagtagatttattagaagttatatatacgtagagtatggttattttttttgtagttgtaaatcgttttattttttgtttttttaggaaattatttcgtgtttttttaggattttttttggtttgtatttttttttgtagagatggcgtattaatcgtttttgggtatatatagttgtatttgatgttttgttggatgaaatttgtagttatagattttgtgaggttaattacggttgttttggttgtgttgtatatatatttgtttataatttttttgatgttggaaattatagaaaatatggtgataatattgttagatttttgagtaagtattttaggaaggaatgttttgattattaggtacgtgttgcgtatattgagatttatcgagaagttttagtttttttttttataatttaggatagttttatgatggataaaattagtaatattaaagagaatattaagttttttaattttattggcgaattgattaatttgttttttttttgtgatattaaggatacgagtttgaatatttaggtatttttttagtttttgaagtttggatatattaatgtttgtggttatgattttggtatttttttttataaaagttaaggtagttgtttggttaattttttgagtagcggttgttaggatgatgatttttttattaagttgatttattatggaattttgtggtttaattttaagtagcgagttgttggcgttttttagaattcggtgggagtaataaattttttttttttttttgaaatagagttttatttttgtgggttaggatggagtgtaatggtacggttttggtttattgtaatttttttttttcgggtttaagtgatttttttgttttagttttttaagtataaattataggtgtttgttattatatttggttaatttttgtagttttagtagagatagggttttattttgttggttaggatggttgcgaatttttgattttaggtgatttatttgttttggttttttaaagtgttgggattataggtgtgagttattgtgttcggttaagaatttttttttattttaaggagaataaaatggtaagtaatagaggaagatatttatattagatagaagaaaatatttatattataaatattagataaaggattagtatttagaatttatttaaaaattttttataaataagaaaaaattagttaaaagtggataagagatttaaattggtatattttaaaagggagtatttttatagttaataggtatataatataaaaagttgtttaatattaatagttattagggaaatgtaaattaatattataaggagttttagttaattatttatgagaatgtttaaaattttataaattgataatattaaatgttgtagaggatgtgtagaattgaaatttttattgagtgtaaattggtaaaattattttggaaaattttgatagtattttttaaagtttaatatatgtatatttgatgatgtagtaattttttttttaggtataaatttaatagatatttataggtgtgt

SEQ ID NO: 1893 - DNA, 2452 bp, Artificial Sequence
  chemically treated genomic DNA (Homo sapiens)
tattagttaagtgagaatagtattatattttttataggttgttgtgagaattttgttttaggttagtgttttgtatatagtgtatgtttaatttatgttttttttttttatatgttggggttttttagtttttttaatggaatttagagttgtgatagttaagggtttagaatttaggatatttgttttattagaatttaggatattcgttttaagttttagttagtagttattagagttgaggttttgtgtgaagtagtattttttttaagtatttttttgttttttgtaaattaaatagaatgatttaattttattatttggtggatgagtttaggattttttagtataagagagatttttttttgttttggtagtgggaagttgtttttttattttttgggaggtgtagagttgggtgattttgggatgggtttttagggtaatgtttttatgtgtgtttatattttttattttttttataggtagtggtgagttttgttaatttttattatgtttagaattgaataggaagtggtaatttggttgttatggtagcgagaggggtaggaatgggtgaggttttttaaggagtattggtatttgtgaggtgggaaaggtatttatatattggtttttttaggatagaggtagggataggatgtggtattagtattttaagaaaaatgtttaaatttagtttaaaatatatatgatgtaatgattgttgttataattaagtagggttttttgatagaggttaagtagagaaagttatttgtgtgaggaaattgagggttttgttttaaagtttgaggaagtttagtagataaaggagttaatgtagagagggtttagagttttattttggtttgggaggtttgggttagtttcgtttggggtttgatattagggtaaagagttaagttagttttaattttttttttttttaatttataaaatattaaataagaaaattgttggtaaggagggtaagaaaaaggttttgagtttttgtttttgtatttatttttttttttataagttagttttttttttttttatttgagacgtaattttgtggttatagtagtagtagtagtaggaaggttggggttatggttttatttagttgggtagtgttaggtttggagatttaaggtgagggtttattcgatataggatgtgttatttgggtttgttagggaaggattcggggttttaaaagtgaagttgtttatttagggaagtgaggtagtgtgggatttattgtttttagttaatcgtagggatttattgagtttattatgagggcggtgttggtagttgttttcgttttttttttcggaattttaggtaggtgtggttgttttatttagtttggggttttaagtcgggaggatttatagttagagggtttttcgttttttttaattttttttagaaattggtttttaggatttagtaagggggttggggtgaggtttttggaacgttaggtatagatttttttggaattttttgggtttagagatttaggggtgcgggtttttaggttgagatggagtattttagattttagttttttatatatatatatttatagggaagtttttataaatttttatttatttatttattgtagattttttttgttttttttttttttttttttttaggtttttggttgtttagaatagttatttgtgtttattgttgtaaataattttttataggtttatttgaaattttatttttgttaagcgggaaaaatgtaaattgttaagatttagggtataaattttgggttgagggaggggtttttgtatttttatatataggtgtgtatgtatatgtatttatatttatagttttattttgttttttatttatttttatatatatatatatacgtttatgtatatagttttatatatattttagtagtttttttttttttttatttatacgttttttttttttgtttttttttttgtttttttttttgtcgattttatttattattagttttttttagatttttagtttttcgtgtaggttttttatagttttcgtagtatttttttttatttattttattttaagatttttttttttttttgtttttagtttacgttagtacgtaggtaagtgttttttatttttttttgtttaatgttatttcgtttgtatagttattagttttagtggaaatgatttagtattaggtttaagattatattttttatttattttaaggtttagaattagaagtattaatttttgatgttcggtatttgtgttatttgtttttttagtgtgtggggatttagttggattttcgtgattatgtatgttttttttatttattagtgttatgtttttattttttagatgggattgttaaaaggtaaattgaggtataataaaattttaaatagattattttagt

SEQ ID NO: 1894 - DNA, 2452 bp, Artificial Sequence
  chemically treated genomic DNA (Homo sapiens)
gttgaaataatttgtttaaaattttattgtgttttagtttattttttgatagttttatttaaggagtagaaatatggtattagtgagtagggggagtatatataattacgggagtttagttgggtttttatatattgaaggagtagatgatataggtatcggatattaaaaattgatgtttttgattttaggttttggggtaagtgaagggtgtggttttgggtttagtgttgggttatttttattggagttggtggttgtataggcgagatagtattgagtaggaggaagtggagggtatttgtttgcgtgttgacgtaggttggaggtaggggaggaagggggttttgagatgaggtgggtgaggggaagtattgcggaggttgtaggaagtttgtacgagggattaggagtttagagggagttgatggtgagtagagtcgataggaggagaggtagggagagggatagagagaggagacgtatggatagggaaaaggagaggttgttggggtgtgtgtgagattgtgtgtatgggcgtgtgtgtgtgtgtgtgaaagtgaataaaagataaagtgagattgtgagtgtgagtgtatgtgtatgtatatttgtgtgtgagagtataggaattttttttttaatttaaaatttatgttttgagttttaataatttgtatttttttcgtttgataaaagtaagattttaagtgagtttgtaagaggttatttgtaatagtgaatataagtgattgttttgagtagttaggagtttgggagagagagagaggaaggaatagaaagaatttgtaatgaatgaatgaatgagagtttataagaatttttttgtgaatgtatatatgtaagaaattagggtttgagatgttttattttagtttaagagttcgtatttttgggtttttgagtttagaagattttaggaaggtttatatttgacgttttagaagttttattttagtttttttgttggattttagggattagtttttgggggaggttggggagggcggggagttttttgattgtgagttttttcggtttggggttttagattgggtggagtagttatatttgtttgaagtttcgaggaaaagggcggaaatagttgttagtatcgtttttataataggtttaatgaatttttgcggttggttgggggtagtgggttttatattgttttatttttttaaatgggtagttttatttttagaatttcgggtttttttttggtaggtttaggtggtatattttgtgtcgggtgggtttttattttggatttttaggtttgatattgtttagttggatggaattatggttttagtttttttgttgttgttgttgttgtggttatagggttgcgttttaggtgaggggagaaggggttgatttgtggaggagggagtgggtatagaggtaggagtttagggttttttttttattttttttattagtagtttttttgtttagtgttttgtgggttggggaaggaggagattagggttgatttagttttttattttaatattaggttttaggcgaagttaatttaggttttttaagttaagataaagttttggattttttttgtattggtttttttatttgttaggtttttttaggttttaaagtagagtttttaatttttttatataaatagttttttttgtttggtttttgttaggaagttttgtttagttatgatagtaattattgtattatgtgtgttttgaattgaatttgaatattttttttgaaatgttgatgttatattttgtttttgtttttgttttgaagggattagtgtgtgaatgttttttttattttatagatattaatgttttttgaggaattttatttatttttgtttttttcgttgttatggtaattaagttattattttttgtttagttttgggtatggtgggggttggtaaaatttattattgtttgtgagaggggtgggaggtgtaggtatatatgaagatattgttttggagatttattttaaggttatttaattttgtattttttagagggtagagaaatagttttttattgttagggtagaaaggggttttttttgtgttaagaaattttgggtttatttattaaataatgaagttggattattttgtttagtttgtaagggatagagggatgtttagagagggtgttgttttatatagagttttagttttagtggttgttggttgggatttgggacggatattttggattttggtgggatagatgttttggattttgggtttttgattgttatagttttgggttttattgggggaattgggaggttttagtatgtgggaaaaggaagtatgagttgagtatgtattgtgtgtaaagtattgatttggggtagaatttttatagtaatttgtgaggggtgtggtgttatttttatttgattgata

SEQ ID NO: 1895 - DNA, 2374 bp, Artificial Sequence
  chemically treated genomic DNA (Homo sapiens)
aagattagtttggttaatatgataaaatttcgtttttattaaaaatataaaaattagttgggtatggtggtgggtatttgtagttttagttatttgggaggttgagatataagaattatttgaattcgagaggttaaggttgtagtgagtcgatagtgttattgtattttagtttgagtaatagagtgagattttgttttaaataaaataaaaaataagggaagggaaaatgttttatttaattttattatttgggggttgggtataaaatatgagaaaaggaagatttaaaggtgaaaaaatggttagtatttataaaagaaaaggagtggttgtttgtgttttaggtagttgattattttttatttttagaatattttattttttttaaaaaaaaaaatttaagtttttaatattttaaaatttttttttaataaatgtttatatattagaaaagttatgggttgtgggaatgaaatttgtaaaaatagtgtttttaatattgaaaatagggttaagaatattggtttaaaatattaatgatatttttttatttttaaaacgaaaggagttgaagttgtttaggtattgaatgtatttatttgtaggtgagatatattagatggtttgtgaagatttataaaattaattaaggtatgaattttataatttttaagttattaagttcgttattataggaataaaatattggaagttataaaaattaattttggttttatatatttagatttaatattgtttaaaatatttttaattaaaaaataagttagtattaagtatgttgaaaatgttggaagaagaggttaagtttttggagtgggaaggatatgtttttttgtggggaagcgtagtagtgtggaagggggaaagggatggtttttagttgatttattttagattttttatttagtttggttttcgttttttgtagagttgttaagaggatatttttttggaatgttttttttttaggggtttttattttttaagaatttatgagttttggtaataggcgggggtggggagggtaggtttaaggggtggtagttggtttaggataatttatttgggggtagtatgtttagagagattttgtgtaaaatttggggttttttggttttatttattatgtagttatattcgttagtattttttttttgtagggtaattatttttatttgtagtaggtttttatttaggtttgtgagaaacgtacgtttgttcgttggagttttgcgatttatagttgaggatattaggggttggtattttttcggtaagaatcggtattatattttttgagttttgatattttggagtttgtagtggtattgtattagaatggagttttttacgggtgtttgtagtattttagggaggttgttaattatgttttgatttggggaaggaaaggaggtgggaattttgggtaggagttgggagtattttttagtttagttgttggtatgggtgtggtatttataataatacgttatttttggatatggggttgagtatatggggtttagagttgtagttttttttgaattttattttttagttttaggagtagtagtaagagtagggtgaggtttatggttgggtagagaaatgttaatttttgggtttgtttgggtattgatgtagtattcgtttgagggtaggaaatatttgttttagaaagttatttggggtgggagaaaggaaatgatgggtatttttaggggtggggaaagggagtttttttaagttttggttggtttagtgtttaggaattgttttgagggtaagggtgggtaagataggatgagaagattcgaagaaagttagaagtttgtaggggttggggttcggttaaggggtgagatgggaggattgtgataattggaggataggagaggaagaggaaagatgatttttaggatttttttaatatagaatttgagggtgtatagttatgaaggaggaaggtagagtgttttgtattttatttaatgttatttttgtttttaattttttgggagtgttttacgattatttaagtttttaggaggttgtatgtagtataattttaaataggaagttttattttgattttgtgttttggattgggtttttttttatttattgttttggatattatagaatttttttatttggatttatattttttagttttgggaaataaatttttattttgataattatatgtttatttttttttttttttttatttttttgtaattttttaattagttggttattgaatgtcgtgtgtttattttatttttatattttttttattttattttttatttttttgttttttttgttttgtttttaaggagatttt

SEQ ID NO: 1896 - DNA, 2374 bp, Artificial Sequence
  chemically treated genomic DNA (Homo sapiens)
gaaatttttttgaaggtagaataaaagagataaaaagatggaaaatgagatagaaaagatatgaaaatgagatgaatatacgatatttaataattaattagttaaggaattgtagaaaaatggaaggggagaagaaaatggatatgtaattattaaagtaagaatttgttttttagaattgaagaatgtggatttagatggaagggttttatagtgtttaggataataaatgaagaaagatttagtttagggtataggattaaggtgaaattttttgtttgaggttgtattgtatataattttttaaaagtttgggtggtcgtggggtatttttaaagaattgagagtaagaatggtattgagtgaggtgtagggtattttattttttttttttatagttgtgtatttttagattttgtattaggaagattttgaagattatttttttttttttttttttgttttttaattgttataatttttttattttattttttagtcgggttttagtttttgtaggtttttagtttttttcgggtttttttattttgttttgtttatttttatttttagggtagtttttgagtattgagttaattagggtttggaagaattttttttttttatttttggaggtgtttattatttttttttttttattttaagtgattttttgaggtagatgttttttgtttttaggcgaatgttgtattagtgtttaggtaagtttaggagttgatatttttttgtttagttatgggttttattttgtttttgttgttgtttttgggattagaaggtaaggtttaggaggagttgtagttttgggttttatatgtttagttttatgtttaggagtaacgtgttattgtgaatgttatatttatattagtagttgggttgggagatgtttttagtttttgtttaaaatttttattttttttttttttttaggttagggtatagttggtagtttttttgaggtgttgtaggtattcgtgggaagttttattttggtgtagtgttattataggttttaggatgttaaagtttagaaggtgtggtgtcggtttttgtcggaggggtgttagtttttggtgtttttagttgtggatcgtagagttttagcgggtaggcgtacgttttttatagatttgggtgggggtttgttgtaggtggaaatggttattttgtaggaagaggatgttggcgagtatggttgtatggtggatggggttagggggttttagattttgtatagagtttttttgaatatattgtttttaggtgagttattttaggttagttattattttttagatttattttttttattttcgtttattgttagggtttatgggtttttgaggagtgggggtttttggggaggaggtattttaaggagatatttttttgatagttttgtagggagcggaaattaaattgggtgggaagtttgagataaattagttgaaaattattttttttttttttttatattattgcgtttttttataggaaggtatgttttttttattttagggatttggtttttttttttagtatttttaatatatttgatgttaatttattttttaattagaaatattttaaataatgttgaatttgagtgtataaaattagaattaatttttgtagtttttagtgttttatttttgtaatagcgggtttgatggtttaagaattatggaatttatattttaattaattttataagtttttataggttatttagtatgttttatttataagtaggtatatttagtgtttgaataattttaatttttttcgttttaaaaatggaaaaatgttattaatattttaagttaatatttttgattttatttttagtattaaagatattgtttttgtaggttttatttttatagtttataatttttttagtatataagtatttgttaaaagaaaattttaaaatattaaaaatttgggtttttttttttaagaaagataggatgttttaaaaataaaaaatggttagttatttgaagtatagatagttatttttttttttttatggatattggttatttttttatttttaggtttttttttttttatattttatgtttaatttttaaataataaaattaagtagagtattttttttttttttgttttttgttttgtttgagatagggttttattttgttgtttaagttggagtgtagtggtattatcggtttattgtaattttggtttttcgggtttaagtgatttttgtgttttagttttttaagtaattgggattataggtgtttattattatgtttagttaatttttgtatttttagtagagacggggttttattatgttggttaggttggtttt

SEQ ID NO: 1897 - DNA, 2465 bp, Artificial Sequence
  chemically treated genomic DNA (Homo sapiens)
ttttaataaatatgatgattttaggtagtttttaggagtggaattgtatagtatttgtttttttgttatcggtttattttgtttagtattatatttttaatataaattttcgggtttaagtaatttttttattttagttttttgagtagttggaattataggtatatatttttatggttggtagggttttttttattttttgtagagatgggggttttattaagttgtttaggttggttttaaatttttggttttaagggattttttttttttggttttataaagtgttgggattataggtgtgagttattatttttagttaatttttttcgtttttaaggcgaaataatatttttttgtatgtatatattatattacgtttatttatttattttttagtggatatttgggttgtttttgtttttgggtttttgtgaacgatgttgttgtgaatataagtgtgtcggtttggttttttttttttttaaatttgttttttgtttttttgtattgtgatggtttttttaaggcggatatataagtatttaagtttcgatttatatttcggagtaattttattgtagtttatattttagtttgtttacgagttagggatgggtattttacgattggtattgtttggttttagagaaaagtttataattttgggggttatagttgaggttttttatggttgtagggaatttgtttttattgtagttagattaatatttagtttagtttttttattagtttttgggaagtttatagaggtattttttataagagatgttattaaaagtttttgattgtatttagtttggaaattaggttttttatagatgataattagtttagaagatgtttttatgagtatggtgatagggtttaaatgtgtttgggagttttattttttttgattttttaatacgtaaatatttttaaaggttatagtaggaggttttattgaaattgaagagttttttttggttaattttttttttaaaaatgttatttggaaattaagtataattttgttaaaatgagtaaggattttatttaaatgaaattaaagagggttattttattttttttatttagtatttaaaataatttagagtgtgagaaattagattgtttagggttatacgtttttaaggattgttttttaatagttttttttttgtttttgtttcggggttttagttttttttttttatttttggatttaagtttgcgtggtgttggttatattgattgatagttaggggatatgtatttattagtagggtgtgttttttcggtttttataatgaatgttggtttagtcgttagtagtttttacgttaatgttttttcgttagtgaggttaggtttttaggtgttattggagttagaggagggtagttggcgtgcgttaagtagttattaggagttattttatgttaatgttttattttttgtacgttatagttacgtttagttgtaaaagtagttatgttttgggtttttttggtttttttttttttaagaaaaaaaaaaaggaaaggaagaaagtaattaaaggggcgggggggatttaaagtttgtattttagtatgagttatcgaattaaagtttagtaattatatgtaaaataaatttttcgtgagggtagtaagttttcgtgaggacggttgggattggttgtatagtaaagttaggagaggttttatgaggagaatagtatttagagtttaagggggagaatttttgttttaagtgggaatttggaatagaagtttttttgtttttagttgagaagatgattagattttagttgtttttggggaaagtcggtatttatagttggatataaatatagtttgtaggaggaagagtgttagagtaagagatagagtagagatggttacggagatatgggtgtatatggggatatggtatagggaggattttgtttttgtttttacgaaggggaattttaaacgagttacgaagtttttttgattagggattaaggtattagtttgtgttagagataatatggttttgtggttttttattgtcgttttgcgtggcgtgggtggtggttttttttttattgtggtaggggaagtttgaatttatttgattatagtattttgtagattgtttggtttttagttttattaggtataggtaatagatttagaattttgaaattattttttaaatttggtgatgtttattaggggttagaagaagaggaaagaatataattaatttatatagtagtttattttttaataaatttttttgttttaggtagtaatttgttttaggatatatagttaattagttggttaaggtgggtttagaatttaggtgttggtgttagggaggtaagaatggtatatggtaattggaatgtgtagttttttttatttatttattatcggttttttaaagaaaatgtgaagtagtgt

SEQ ID NO: 1898 - DNA, 2465 bp, Artificial Sequence
  chemically treated genomic DNA (Homo sapiens)
atattgttttatattttttttgggagatcggtggtgaataaataaaaagagttatatattttagttattatgtgttatttttatttttttagtattaatatttgggttttaaatttattttggttaattggttgattgtgtgttttggagtaagttgttgtttgagatagggaggtttgttgggaggtgggttattgtgtgggttgattgtgtttttttttttttttttgatttttgatgggtattattaaatttaggaaataattttagagttttgggtttgttgtttgtatttggtgaggttggagattaggtagtttgtagaatgttgtggttaggtgggtttagattttttttgttatagtgggagagaagttattatttacgttacgtagggcggtagtagggagttatagggttatgttatttttgatataggttagtgttttggtttttagttagaaggatttcgtgattcgtttggaattttttttcgtgaaggtagggatagagttttttttgtgttatgtttttatatgtatttatattttcgtagttatttttgttttgttttttgttttgatatttttttttttgtaagttatgtttgtgtttagttgtgagtatcgattttttttaggagtagttagaatttgattatttttttagttggaggtaggagaatttttgttttaagtttttatttggaataggggtttttttttttggattttgaatgttgttttttttatggagttttttttggttttgttgtgtagttaattttagtcgtttttacggagatttgttgtttttacggagggtttgttttgtatgtggttgttgaattttgattcggtgatttatgttgaggtgtaaattttaagtttttttcgtttttttaattgttttttttttttttttttttttttttttaaaaaaaaaaaaattaaaaaaatttaaagtataattatttttgtagttgaacgtgattgtggcgtgtaggaagtggagtattggtatgaagtggtttttagtggttgtttggcgtacgttagttgtttttttttgattttagtggtatttgggggtttggttttattgacgggagaatattggcgtgaaggttgttggcgattgggttagtatttattgtgaagatcggagggatatattttgttggtgagtgtatgttttttggttgttagttagtgtggttaatattacgtagatttgagtttaggggtggaggagagagattggaatttcggggtagaggtaggaggagggttgttagagagtagtttttgggggcgtgtgattttgaataatttgattttttatattttaaattattttaagtgttaaataaaaaaaataagataattttttttaattttatttaggtgaaatttttgtttattttagtaaaattgtgtttaatttttagatgatatttttgggggaaagattaattagagggagttttttagttttagtaaaattttttgttgtggtttttgaagatatttacgtattaggaaattagaaagagtagaatttttaggtatatttgagttttgttattatgtttatgagagtattttttagattagttattatttatgggaagtttagtttttaggttgaatgtagttaggaatttttggtagtattttttatagaggatgtttttgtgggttttttaaaggttaatgaggaaattgaattaaatgttaatttgattgtagtgaagataaattttttgtagttataagaaattttagttatggtttttaagattatgagtttttttttaaggttaggtaatgttaatcgtggggtgtttatttttgattcgtgaataggttggggtgtggattatagtagagttgtttcgggatgtggatcggggtttaaatgtttgtgtgttcgttttagagaaattattataatgtagaagagtaggggataagtttgagaaaggaaaaggttaggtcggtatatttatgtttatagtaatatcgtttatagaggtttagaggtagaggtaatttaagtgtttattgaagggtgaatagataaacgtgatgtggtgtatatatatagaggaatgttatttcgttttaaaaacgagagaaattggttgggagtggtggtttatatttgtaattttagtattttgtggggttagggagggaggattttttgaggttaggagtttgagattagtttgggtaatttagtgagatttttatttttataaaaaataaaaaaaattttgttagttatgggagtgtgtgtttgtagttttagttgtttaggaggttgaggtaggaggattgtttgagttcgggagtttgtattgaagatataatgttgagtaaaataagtcggtgataaaaggataaatattgtatagttttatttttaagagttgtttagaattattatatttattgaga

SEQ ID NO: 1899 - DNA, 2459 bp, Artificial Sequence
  chemically treated genomic DNA (Homo sapiens)
ttcggttaaggcggggtttaggtgtttgtttttttcgagtttgtttaaggtttttatgttgtaagtattagatgttgaatttaggtggttttttattgttttggaggagaaggttgttaggattggtttttttttttcgtttttttttttttttataaaaagaatgggcggtgtttcgggaaaaagttcgttttaggatattttagtgtgtttattgttgttttatggttatatgtacggttgtttataaattgtatttttattgaggaagaaggtaaaaaatttagagagggtaaggaattatttattttgtatatgtgattatttggatcgtttaaatttttttttaaaaaataagaattataatttaaagaaaatgttattttgattattgttagaaatttaaggtgtttaagtaaaatttaaaagtaaaattagagtttattttgttggaatgaatgtaatataaatataattttattatttttaattagaaattttggtttgttattattttggttggtggttttgtaatgtacgtttaaggggaaaaatattagatttttatatgttttttttttattttttttattttttagtttagagtataatttttagaagataatagaaggaagttagttttggggaaatttggtattttatttattgtaggaaggagaagaaatagtagaaacgggttagagagttttattagattaaatgttaaattatttttttttaaagatgtggtagttttttttaagtttttagagagagagagtgagaggagtagattttagagtagttaattgaagtaaacggatataagcgaggagggtttttcgcgggagaattttcgagaggtagagggcgagtttttcgagagcggtggtttcgtagttttttttgacgtcgagttgttatttcgttggagtagtagtgtagcggttgtggttgtgtagtagtgttatgaaaatgatttattttaattagaatttttggaggtagagggagagttttttttagatgttattattattgttaagtagttgtatttttcgtcgggaaatttttttaggtaagagaacgtagagacgttcgttcgtagttcgggggaggacgttttattaggtgttggttacgaataggaggtttttttgggtgtgaggggtgcgttagggtcgtttatttaggagcggttcgcgggaggattaggcgaggtttttaacggagtttttagtgtgtgtgtcgaagaaggttttttggggtttcgtaacgttcgtagttagttttttaagggcgcgtttgatttgttaggtgagttttcggtcgagggcgtagcgtatacggttagtttcgcgtaggtagattgtatagttcgttttaagggttacgtttattttgttaaggtgttaattttggatatttatttgagtaagattgagggggtataagtggacgagtcggtcgtgattatttttagagcggaagattgcggtgattgggacgatatggagaagaggtttagcggtcgtaggtcggggaggcggagggggtcgtagaaatttatcgattttttcggcgcggacgtcgagttttttgagagcgttgttagggacgacgcggtgttcgacgacgaggtggcgttaaacgcggttagcgataacgtttcggcggaaaagaaagtgaaattttcgcgggtagttttcgacgggggcgttgttttcgttgcgagtttagagtttaagtttagtttcggtattaaagggtagtttcgaggggagtcggatcggagtaaatagttattttcggtttcgttttttacgaagaggaagggtaggagtcgtgttttcgaggtcgtgttcgtttcgttcgttagcggttttcgggttttcgttaaggagtttttatttaagagggtgttcgattttagtttagttattaagggtattgcggtcgagagcggggaggaggcggcgcgggttatttttcgcgagttttcggttaagagtagttcgttgttgtcggagattaagttcgagtataagaggggttcgttttttaattattttaacggtcgggtagagggaggtcgaagtagagagttgggtagagcggtcggagcgtttggagtttttgacgtcgacggtttgaagtttaggaattatttcggcgtgggtaggtcgatagtgattattaaagtgattttgtaagtagtcgcgtaagtttcggtcgagttgttgttcgtatacgtgttgggggttcgttttgagaggttcggggtatttgtattgtggaagaaacgtttggttattgaatttttttttttatgttgaatttaagatagtgaagggttagtttatatagttaagatttaagatgatatttgtggtagtttttttagttaattttttttttaatataagatttaagtttaacgaatgtaaaaataggatatt

SEQ ID NO: 1900 - DNA, 2459 bp, Artificial Sequence
  chemically treated genomic DNA (Homo sapiens)
gatattttatttttatattcgttaaatttaaattttgtgttaaaaagggaattaattgaggaggttgttataggtgttattttaaattttgattgtgtaaattggttttttattattttaagtttagtatggaggggaaagtttagtgattagacgttttttttataatgtagatatttcgagttttttagagcggatttttagtacgtgtgcggatagtaattcggtcgggatttgcgcggttatttatagggttattttagtggttattgtcgatttgtttacgtcgaaatggtttttgggttttaagtcgtcggcgttagaagttttaggcgtttcggtcgttttgtttagttttttgtttcgatttttttttgttcggtcgttgaagtggttggggagcgggttttttttgtgttcgggtttgattttcggtagtagcgagttgtttttgatcgggagttcgcgggggatggttcgcgtcgtttttttttcgttttcggtcgtagtgtttttggtgattgggttgggatcgggtatttttttgggtggggattttttggcgggagttcgggggtcgttggcgggcggggcgggtacggtttcgagggtacggtttttgtttttttttttcgtgggggacgaagtcgggggtggttgtttgtttcggttcgatttttttcggagttgttttttggtatcggggttgggtttggattttgggttcgtagcggaggtaacgttttcgtcgagggttgttcgcggagattttattttttttttcgtcgaggcgttatcgttggtcgcgtttggcgttatttcgtcgtcgaatatcgcgtcgtttttggtagcgtttttagggagttcggcgttcgcgtcgggggagtcggtggatttttgcgatttttttcgttttttcgatttacggtcgttggattttttttttatgtcgttttagttatcgtaatttttcgttttgggagtaattacgatcggttcgtttatttgtgtttttttagttttatttaagtagatgtttaaagttagtattttagtagggtgggcgtgatttttggggcgggttgtgtagtttgtttgcgcggagttggtcgtgtgcgttgcgttttcggtcggaggtttatttggtaaattagacgcgtttttggggggttggttgcgggcgttgcggggttttagggagtttttttcggtatatatattgggggtttcgttaggggtttcgtttagttttttcgcgggtcgtttttgggtgggcgattttggcgtattttttatatttaggaaagttttttgttcgtggttagtatttggtgaagcgttttttttcggattgcgggcgggcgtttttgcgtttttttgtttggaggaatttttcggcgaggaatgtagttgtttggtagtggtggtggtatttgggaaaggttttttttttgtttttagaggttttaattggggtgaattatttttatggtattgttgtatagttatagtcgttgtattgttgttttagcgaggtgatagttcggcgttagggggggttgcggggttatcgttttcggggagttcgttttttgtttttcggggattttttcgcggggagtttttttcgtttgtgttcgtttgttttagttggttgttttgagatttgttttttttattttttttttttgggagtttaggagaggttattatatttttgggagagagtggtttggtatttgatttggtgggattttttaattcgtttttattgtttttttttttttttgtagtgaatagagtgttaagtttttttaaaattggtttttttttgttgttttttggaggttgtgttttggattgaaaaataaaagggatgaggagggaatatatgagaatttggtgtttttttttttagacgtatattatagaattattagttaaaatgataatagattagagtttttaattgaaaatgataaagttatgtttatgttatatttattttaataaaataaattttggttttatttttgaattttgtttaaatattttaagtttttggtagtagttagaatagtattttttttgaattataatttttgttttttaaaggaaaatttgaacggtttaaataattatatatataaaataaatagttttttgttttttttaggttttttatttttttttttaataaagatgtaatttataaatagtcgtgtatgtgattatggggtagtagtaaatatattaaagtattttaaggcggattttttttcgaaatatcgtttattttttttgtaggagggaaggaggacgaagaaaaaaaattagttttagtagtttttttttttagaatagtaagaagttatttgggtttaatatttagtatttgtaatatgaaaattttaagtaagttcggaggaagtaagtatttgggtttcgttttagtcgga

SEQ ID NO: 1901 - DNA, 2382 bp, Artificial Sequence
  chemically treated genomic DNA (Homo sapiens)
ataaagttattattttttattttttgagaagtttattattttttaataggttaagtgtttttttgtatatttaggggtttgtattttttttgtttagatttgtttttttttgtttattgggttttatgtgtttttatggttgggttaatgattaatatatagatatatttaaagtttttttttatttgtgtttttttttttttttttttattgtttgtttttgtttgtttattttattttatatttattattggtttttatttggggtttgatgttataaaggagtattttgaggtttcgttttattttttttagcgtttgggttaattttttttaagtgttggtggtatatatttttttttttaggaggtttagaggtttgattatgttgttgttattgttgtattgaaggaaaagatttttatttaagaagatttgcgttttatattagggttgtttaggtttggataatgattttatagtgaagttgaagtaaagagagtgattatttgtgagataaagatgtaggtgaggtttaggataggggaagaggtttattagaatttgcgtttttgtgatttaagattttttggattgggttaggttagtagaggcggggtagttttattttagatttttttaattttttggatttttgtttttatttttttttgattgtttgggatgagatatttgatggtattagggatttttggggtgtatttagtgttaatggtgttaataggaggatttatgttataagtatttttagtaatatttattaagttttgaggtataaaatagataagttagtgtatgattttttgagatttaaattttagttgaatatatatgatatttaatagaaaggaaaaagaggtatttattataggatatacgttgaatttttgtggggttttagatgtttaggaaagtgatttggagtagaaggcggggggtagtattgtagaattgttttttgtgagttagtgttttgtttagggttttaggttgtggttttttatgaattgggtgtaatattttagggatttttttttttacgttatttttaagagtaggtatttatttgtttgaagtttgtatgaagttttattcgtttattttttattttttttttttttttttgtttttagttagtttttgtgtttaggatatttattaattatgatttttaaggttattagtagtaatagtagaaataaaagaaggcgtatagggttagaagttagggatatttttcgtatattgtggagagtaataggtaggaagttgggcgtgtatatatttatttttattggtatggtgaagaaatgttatttaatagcgtgggtgtgggtattgtttaaattttttattttggaataattgaggttaggtttgtagagatttaattaaagaataattttgtgaagagagtgttttttaagtatttagaatataattatttattgaaaaataaaagaagatatttaaaaataaaattaattttgaataaattttttttttttttttgtttttgttgtttttgtaaaaaaaattttttttggtgtgagtaggatggttggaggttatgtgagttttttttttttttttttagtttttttttttttttttttttttgttttttttgtttttttttttttttttggtattttttgtttatttttgtatttttttttatcgttattttttttttttttattgtttttaattcgtttaaattttttttttttaaatggttgagatttttttttattaagtatattttagtattaattaaattagttgtaaataggtagtaagtggtttattatgatagatgggttttgtgtgtgtgtgtgtgtgtgtaattgtaataaaatatattgagttatttaataaatatagagtgtttattatatgtattaggtattattatagatgttaattaacgaaattgaaatggttaggtttttatagtggtttatgtttataattttagtattttgggaggatgaggtaggaggattatttgaggtcgggagtttaagattagtttgggtaatatagtaagattttatttttataaaaaaaaatttttttttattatattttaagttttgggttatatgtgtagaacgtgtagttttgttatataggtatatacgtgttttggtagtttgttgtatttattaatttattatttatattaggtattttttttaatgttattttttttttagttttttatttcgtgataggttttggtgtgtgatgtttttttttttgtgtttatgtgtttttattggttaatttttatttatgagtgagaatatgtggtatttggttttttgattttgtgatagtttgttgagaatgttg

SEQ ID NO: 1902 - DNA, 2382 bp, Artificial Sequence
  chemically treated genomic DNA (Homo sapiens)
taatatttttagtaagttattataagattagaaaattaaatattatatgtttttatttataggtgagagttgattaatgagaatatatggatatagggaggggaatattatatattagggtttgttacggggtggggggttaggagaggggtaatattaggagaaatatttaatgtaggtgatgggttgatgggtgtagtaaattattagggtacgtatatatttatgtaataaaattatacgttttgtatatgtaatttaaaatttaaagtataataaaaaaaaatttttttttgtagagatggagttttattatgttgtttaggttggttttgaattttcggttttaagtgatttttttgttttatttttttaaagtgttgggattataggtatgagttattgtgagggtttggttattttagtttcgttaattagtatttatgatagtgtttgatatatgtagtagatattttgtgtttattgagtgatttaatatgttttattataattatatatatatatatatatataaaatttatttgttatggtagattatttgttgtttgtttgtagttagtttaattaatattggggtgtgtttggtgagagaaaattttaattatttaagaggaaagagtttgaacgggttagggatagtgggagaggggagaatggcgatgggagaaaatataggaatgggtagggggtattaggaagaaagggaaaagtaaaagaggtagggaggagaagggaagaggaaattggaggaaaggagaaggagtttatataatttttaattattttgtttatattagagggggttttttttgtaggggtagtagggataggagaggagagagagtttatttaaagttaattttgtttttaaatgtttttttttattttttaataaatgattatattttgaatatttggaaaatattttttttataaaattgttttttaattgggtttttataggtttgattttagttgttttagggtaaagaatttgggtagtgtttatatttacgttgttggataatatttttttattatattagtgagggtgaatgtgtatacgtttagttttttgtttgttattttttatagtatgcgaagaatatttttgatttttagttttgtgcgtttttttttgtttttgttgttgttattaatagttttggagattatggttggtgagtgttttgagtataagaattggttgaggataaggaggagggagaaaggtagggggtaggcgaatggggttttatgtaggttttagataagtgggtgtttgtttttaaggatgacgtgaggaagaggatttttgggatgttatatttagtttatgggagattatagtttgaggttttaggtaaggtattggtttatagagggtagttttataatgttatttttcgttttttattttaggttatttttttgaatatttgggattttataggaatttagcgtgtgttttgtgataaatgttttttttttttttttattgaatgttatgtgtgtttagttagagtttaagttttaggaggttatatattggtttgtttgttttgtgttttagaatttggtagatgttgttaaaagtatttgtgatatgaatttttttgttaatattattaatattaagtgtattttaggggtttttggtattattaagtattttattttagatagttagggagagatgggaatagggatttagaaggttgagggagtttgggatggagttgtttcgtttttgttagtttggtttagtttagggagttttgggttatagaagcgtaggttttaatgggtttttttttttgttttggattttatttgtatttttgttttataggtggttattttttttgttttaattttattataaaattattgtttagatttggatagttttggtgtgaagcgtaggtttttttgaataaaaatttttttttttagtataatagtgataataatatggttaaatttttgggttttttggggaagaaggtatatgttattagtatttggggagaattgatttaaacgttgggagaagtggggcgagattttaggatgtttttttgtgatattaaattttagataaagattagtggtaagtgtggaatggggtgggtaaatagaggtaggtagtaagagaggggagggaagaatatagatggggaggggttttaggtatatttgtgtattgattattggtttaattatagaggtatatgggatttaatgggtaggaaagggtaagtttgggtagaaagaatatagatttttaaatgtgtagagaaatatttgatttattggaggatgatggattttttaaagagtggaggatgatggttttgt

SEQ ID NO: 1903 - DNA, 2498 bp, Artificial Sequence
  chemically treated genomic DNA (Homo sapiens)
gattattatgtttttatttgttttttatattaacgtgtttatagattttatgtatgggggttttattaaaatatggatttttatttaggaggtttggggtttgagattttgtatttttaataggaggtgaatttgttgttagtttatgaagtatatttttgagtagtgagattttttttagaggatattgagtgagttgaattaataatggtagtttttagtaatttagaatagtgtttggtttatataaatatagttattgttttatagttattaatttatttaattttttaatattattatgatgtagattttattatttttatttgatagtggaggaagttgaggtatagaggggttattaatataattagaggatttttgaagttttgagttttgttagtttttttttgattttaggaagggttttttaaggtttatatttttgattttatgtttattttttataggtttaggggtggttttaaggtggattgagtgagtttaattttttatttgtttttttttagttttgtttttgattttgatgatgatgggggtgtttttttattttttttagttttgttttttgtgttaatagtttttagttttgcgttgggttttgttttggttagaatttagttaattttaggggttgagtttagtatgttttagggtattttttattaattttgttttgttttttgatagttcgttaaggttttgatgtatttcggggagtatgatagtaagatgtagttagacgaattttttggtatttttgatatttttttgtaggtttttttagaggttcggtaggatttagaggttatgaggaggaggaaggaggaggaggagcggcgggcgcgtatggaagttatggtgaggggtagtgttaggtttgggattgaggggagacgggtgttatttggggagaatatttttaaattggggtgtgtgggaggagggtagagattgaggaattgaggaatattataggggttggatgttagttttaggagagagaaatttttttttagtttgagggaagagagtggtgtgaagttgggggtttgtatgttttaggtaggaagaaagtggggttaatagatataggtaggtagtatgattatggtttaggagttagtttagggttggggggttgttttggttttagcgtttttttttgagagggtttttatttttggtttttcgttcgtagttgaaggagtagagggaacgtgagcggtggtagcggtagcggaaggttttggttgtaggtagttcgttggaggagggaggagagttcgatgatttggtgtcggttttgcgttttggggaggttttcgataaggatttatgtaagtttaagcgtagtcgtaagcgattagggagttaggttttggaagttattcgggagcgggtaataaatcggttaaattattgatttggggaattagttatataggaggtcgggagatagggattggtgagaatggggttgagtggaggaggtggtgatatttaaattatttggtgtttggtttagagttttgggttgggttttgggatggggggttgtgtgtggttggattaggtgtttttttacgtttattttaaggggttttttttattttttttttatatgattttttttgtgttttggttttaggtattattttgaggttgttttggatggttttaggttaggtaattttaggttgaaggggttttgttttttattttttattatgggtatttatgtgttggtatagaatagttttagatttagattggagaggtttatagttttgtttagagtttttgtgtagtacggggagtaatgatggagggagtttttgagagggaatttggtgagggaatttagattttttttttttaaggggaggtttaatagaatattgatttgggggtaaattttttttttgaatgggaatagaggaggtattatatattttagttagattagttttggtaggttttagagaatagttaatgttggaaggatgatgtagggattaaagttattaggatagagtagtagtgtttgttttttatgttataagttttttggtttttttttgtatgttttaagtattttttttttttttttttatttttatttttattttgtttattaatttatagttttagaagatttattttgggtttttatagttatggtttattattaggtgtttgatgaatttggcgaggggtttaagatagattttatgtattattatattttatgttttttgggtattttttatgtttttattttttggatatttggttattgttgtgaagttagatagtgattttaaatgttgttttggagttttttatagttttttagtagagggtagtatttgaatgtttagttttattttatagttttttattttatataaattgtttaggtttttttattttttttttaatattagttttaaggtagaagttatagtagtttt

SEQ ID NO: 1904 - DNA, 2498 bp, Artificial Sequence
  chemically treated genomic DNA (Homo sapiens)
gaggttgttgtggtttttgttttgaagttagtgttagagaaggggtgggagggtttgagtaatttatatgaagtagagaattatgggatggagttaagtatttaagtgttgttttttgttgaggggttgtaggggattttaaggtaatatttgaggttattgtttggttttataataatggttaggtgtttaggagatggggatatgggagatgtttaaaaggtatgaggtgtggtgatgtatgaggtttgttttgagtttttcgttagatttattaagtatttggtagtgagttatagttgtggaaatttaaggtgagttttttaggattgtggattagtagataggatggaggtgagggtagagaaggaagggaaagatatttaagatatgtagggagaggttagaggatttgtgatatgggaaatagatattgttattttgttttgatggttttggtttttgtattatttttttaatattgattgttttttggaatttattagagttgatttaattagaatatataatgttttttttgtttttatttaagaggaaagtttgtttttaggttaatgttttgttgagtttttttttgagagaagggagtttggatttttttattagatttttttttaggggttttttttattattgtttttcgtgttatataggaattttggataaggttgtggatttttttagtttagatttggaattgttttgtgttagtatatgggtgtttatggtaggggatggggagtagggtttttttagtttggggttatttggtttgaggttatttaaggtagttttagaataatatttggggttagggtatagaaggaattatgtgaaggggagataagaggagttttttaaggtaagcgtggggagatatttggtttagttatatatagttttttattttaggatttagtttaaggttttaaattaagtattaaatggtttaaatattattattttttttatttagttttatttttattagtttttgtttttcggttttttgtgtggttagttttttaggttaataatttagtcggtttattgttcgttttcgggtaatttttagggtttggttttttgatcgtttgcggttgcgtttgagtttgtataagtttttgtcgaagatttttttagagcgtagggtcgatattaggttatcgaattttttttttttttttagcgagttgtttgtagttaggatttttcgttgtcgttgttatcgtttacgttttttttgtttttttagttgcgggcggggggttaaagataggaatttttttagggagaggcgttgaggttagggtagttttttaattttgggttaatttttaggttatggttatgttgtttgtttgtatttgttggttttattttttttttgtttaggatatataggtttttagttttatattattttttttttttaggttgggaagaagttttttttttttggggttgatatttaatttttatggtgttttttagttttttagtttttgttttttttttatatattttagtttgggggtgttttttttaagtagtattcgtttttttttagttttaggtttggtattgttttttattatggtttttatgcgcgttcgtcgtttttttttttttttttttttttttatggtttttagattttgtcgggtttttgagaaggtttgtaagaaggtattaaagatgttaaagaattcgtttggttgtattttgttgttatgtttttcgaagtgtattaaggttttggcgaattgttaagggatagaataggattggtggagagtgttttggagtatgttgggtttagtttttgaggttagttgggttttagttagagtagagtttagcgtaaggttggggattgttggtatagggggtagggttggaagaggtgagaagatatttttattattattaggattagagataaggttaaggagaggtaggtaaagagttgggtttatttagtttattttagagttatttttgggtttgtaaggggtaggtatgaggttaggggtatagattttgggaagttttttttgaggttaggaagaggttggtagaatttagaattttaaagattttttagttatgttaataatttttttgtgttttagttttttttattgttaaatgggaataatagaatttatattatagtggtgttggggggttagatgagttggtggttataaaatagtggttatatttatataggttaggtattgttttgagttattgagagttattattgttaatttaatttatttagtattttttaagaaagattttattatttaaaagtgtgttttatggattagtagtagatttattttttgttagaaatgtagaattttagattttaggttttttaaatgagaatttatgttttaataagatttttatatatgaggtttatggatacgttagtgtgagaagtagatagaggtatggtaatt

SEQ ID NO: 1905 - DNA, 2351 bp, Artificial Sequence
  chemically treated genomic DNA (Homo sapiens)
ggttttgtttttttatgttttagtttttttatcgataaaagaggtgataattatatttattttatagggttgttgcgaagattgaaataataagggtatggggtgttagttattattattttttagaattattattttttagatcgagatttttttgtagtagatggttgatattttaaagttttgtttgttttttatgttataatatggttataagttttttgatagtagggagtatattagtttttgttttttaatatttaagattggtatttagtatatagtagatatttaataagaacgtgttgaatagagttagatagagttgaattttttttttttttgaggagtattttttatttttttttttatttttttttttttttttttttttttttttgtttgatattttttttgtttgtttttttttttattatttttttttttaattattatatttttttttatttttttttttaattattttttttatttttttcggggttttatattgatatgtgcgtttttttttttggttgttttatttttagagtacgtttttattttgttttaaatttgtttttaggtttagtttttttgggaggttttttatggtttagttttgaggatattgaagtattagggttggatgggagttttattatttgttttattttagtttgtttattttttagatgaagatgttaaggtttaaagtattaagaaggttgttttacggttatgtggttaatttgttttagagttaggattagaatttgggtttttttatttttggtttaatgttttttatattacggtatttatagaggtagtggtagaaatatagtaggagattattgaatgtttgttagataaatgaatgaatgaatgaatgaatgttattggaagaggagagttatttagataatattatttgtttttttgtagttttttttgatttgttttatttttgttttattttttatatgtttggggtttttagaggaggtttttggtattgttagttttgtttgtgatttttttattatttttggggagttagcggtttttttttttttttttatttttgtgtgtataaaggttatttttattgttttttgtggaaatatttttagaggatcgagggtattttttgagaataaagtttttttttggggagtgttggttagggtttttgttattgcggtttgttgtttgtttagagttttgtgttttgataagaataaagtgatttcgattggaattttgtagtttgttgttggttttgtttgtttttttgtagatgtgtagttttattttggttttttttttttttaaggaaaggggagttgtttttaattgatggtttttttttaaagtttagttttttttttttttatgttttttttttgtattttatttggtattttttaaatattatttgtcgttgtagttttttgttgaattgttttggttttaattttattttttgtaattggagtttgaataatgagttattttataggaagattgatttgggtattagggtattatttagtttgttattataatagttaattttggttatatgtttagttgtgaaggggaaatgggttagtttgttggagttttttaaagtatggagttggtgagtagggggatggggtattgggttgaggggtagaggtggtagatgggtaggaggaggggttttggtttgttttagtaaaaatgtttttatgtttataatatgatattgtgaaagaaattgtaaggattgaaaatggatattatttttttttaaagggataagaagagtagagtttttaggttgtagatgttaggagtggaaaggttttttttaaataattgagtgagtgagttttaaattaaagagtattttagatttattaatattttaggatgataaaatagtggtgtatttttattcgttatttttatattagatttagttgtagaaattttagtggtttttttatttattttttttatagtattttttataatttaatatttttttttttatttattttaagtgaaatttcgtttattttttttttaattagattgaaaattatatgagggtaagaattatgtttatgttgtttatttgtttttttagggtttgagatagtgtttggtattttatgatatttaatagatattcgttgaatgaagtgaatgagtattagagggtattggttttatggatttgggtgtgggggataaggtatattatgcgtagtggtttttgatttttttgtatacgtacggtggtttttgattttttttatgtttacggtggtttttgatttttttgtatgtgtata

SEQ ID NO: 1906 - DNA, 2351 bp, Artificial Sequence
  chemically treated genomic DNA (Homo sapiens)
tgtgtatatgtagaggagttagagattatcgtgagtatgaggggagttagagattatcgtgcgtgtgtaggggagttagagattattgcgtatggtatgttttgttttttatatttagatttatgaaattagtgttttttgatgtttatttattttatttaacgaatgtttattgagtgttatgaagtgttaggtattgttttaggttttggggaaatagatgagtagtatagatatggtttttgtttttatgtagtttttaatttagttgaggaagagataggcgagattttatttaaagtaaatggaaagggaagtgttgggttgtgagaagtgttatgagggaaataaatgggggagttattgaaatttttgtagttgggtttggtatgggagtggcgagtaaggatgtattattattttgttattttgaaatattggtgagtttggaatgttttttaatttggggtttatttatttagttatttaagagagatttttttatttttggtatttatagtttgaaaattttgttttttttgtttttttgaggaagggtaatgtttatttttaatttttataattttttttatagtgttatgttgtgagtataaagatatttttgttgaagtaagttagaatttttttttttgtttatttgttatttttgttttttagtttagtattttatttttttatttattagttttatgttttagaaagttttagtaggttggtttattttttttttatagttgagtatgtaattaaaattggttgttgtaatggtaaattaaatgatgttttaatatttagattaatttttttgtgaaataatttattatttaggttttaattgtagggaatggaattaaaattagaatagtttaataaggaattgtagcggtagatagtgtttgggaggtgttaggtgggatataggagaaaggtatggagaaggagggggttaggttttggggaggggttattagttgaagataatttttttttttttgagaggagaggaggttagaatggggttatatatttgtaggaaaataggtagagttagtaataagttatagggttttaatcggaattattttgtttttgttaaaatataaggttttgagtagatagtaagtcgtaatgataagagttttggttaatattttttaggaagaggttttgtttttagagaatgttttcggttttttaaagatatttttatagagaataataaaaatggtttttatgtatataggagtgagaggagggagaaaggtcgttgattttttaggggtggtggaagggttataggtaagattaatagtgttaaagattttttttggggattttaggtatgtggagggtggggtaggggtagagtaggttaaaaggagttgtagaaaaataagtagtgttgtttgagtagttttttttttttaatagtatttatttatttatttatttatttatttaataagtatttagtggttttttattatgtttttgttattgtttttgtgaatgtcgtaatgtaaagagtattgggttaagagtgggaaagtttaggttttaattttagttttgggataagttggttatatgatcgtgaagtagtttttttggtattttggattttggtatttttatttgaaaagtgagtagattggaatagaataggtagtgaagtttttatttagttttgatgttttagtgtttttaaagttgagttatgggaggttttttaggaggattgagtttggaggtaaatttggagtagaataggagcgtgttttggagatggggtagttagggaaaggggcgtatatgttagtgtgaagtttcgaagagagtggggaaaatggttgaaagaaagagtaagagggagtataataattagagagagaggtggtggagggaaagatagatagagagagtgttagataaagagagggaagaagggagagagggagatgggagagagaatggaagatgttttttagaagaggaaagaatttagttttgtttggttttatttagtacgtttttattgggtatttattatgtgttaggtattagttttaagtattgaggaataaagattaatatgttttttgttattaaggaatttatgattatattataatatgaaaaataagtaaaattttaaaatgttaattatttattgtaaggggatttcgatttagaagatagtaattttggaaaatagtaatagttaatattttatgtttttattattttaattttcgtagtaattttataaggtgggtataattattattttttttatcggtgaggaaattgaggtatgggggggtaaggtt

SEQ ID NO: 1907 - DNA, 2487 bp, Artificial Sequence
  chemically treated genomic DNA (Homo sapiens)
gaggcgggaggattgtttgagtttaggagttttaggttatagtgtataatgatgattttattggtatatagatgaaaaagaaaaagatatttgaaataaaaataaaaatatagtgtataatgattaggtttgtgaatagttattgtattttagtttaggtagtatagtaagattatattttttatatgaaattttattagaatgaaatttatggtttattatatagatgttgtttattcgttgtaggaaaaattgaattatagatgatttttaaaattattagagtaaattatttaatttatttgtgtatatatttttagattttttatatacgttgtaaaaaaaatagatcgtattattttgttggttttttaagttgttttttgtaagtaatgtattgtgagtatttttttatggttataattattatatataaaagaaaaaaataggttttataataaatagttaaaagatattttgatttgaaattaatgaagaagggttttttggttttgtttttgtattttttgtataatgttgaaattggtaattttgtagtaaatattaatattttttgaggatttgttgaagatgaatgtgataaaaaataagaaattttattttttttattatatagttttaattaatatcgttggttttgtttgagattaagtaaacgttggttttagtgtttaagtttttttttggggttttacggttttgggtttggtatttttgttgggtatttcgtagggttttcgagacgtgtcgcgatttacgggattttacggaagtttttttttatcgtaagttttttggaggtagggaaaggagtcgggattcgagtttagttggttttaagagaagggcggtggttcgtacggcgcgggcggttttgtttattgtagttggggagatgtaggttggtcgttcgggcgcggcggcgggaggggttgcgggtttgtggggcggggtggtggtttcgtgttgttggatttttatggagatgattttgtttttgttttattttttttcggagttgcggttcgagttggcgtattcgatttttattgcgcggttttaagaggagatagtcgttattgtatcgggttttatagttattttttagaggtaaagttcgtggtttttgagtcgttagttttttttttggggtcgttcggggtatatcgtttgggtcggtttagttttttagtgtagtcgtttaggaagattttaagtagcgttgaggggcgtagggtttttttttcgcgattttggagttttttagtagttttggaattaattaagattttgaagaggttttggggagaaataaaatttacgcgtagggtagggtttgtatcgggttatgttaagtaaatttttattttttttagagaattgatttgggatcgaagtaaagtttttgaatattttggaaaacgttgatttttataggtttatattaattgtttttttttttttgatagttttttttttttttttttttatggggtttaaaaatgtagggagtagggtgggggttgggttgggggaatgagggaggaatataaaaaatttattgtgaatataggttttggttataaggatagttttaagagttaatatgttaagatttgatgagtaggataaataaaatagtggtattttaaaatatcgatttaaaaatatcgatgttgtgtttattaataaattttgtatatgtattagaatataatattttgatattattggtgttaaagtttattgtaatttatgtaattgtatttaagtttgttaaagtttgttttgtaggaattgatatttgtgttttatagaaattttaaaaattatgttttataaatatttattttagtgggaggaagaagggttaaggatttggaagttttatagtaatagttgtattttgtttgttatagttttagttttatagttttaaatttataaattagtgagtatatttattatttgaaaatattagtataagtatggtattttttattatcgtttgtaagattaatagtttaggtttttttaaaatacgttattatttttattatttattgtttagtgtgtatttaataaaaattatatattggtatgtagttttatatgttttaaatgtgggatatttaatttaattggaattgttttttatttttgtttttttattaattatatttattttttttttattttcgtttttttgtgcgatttttagaattagatatttttttggaggtatatttaaggaagtaaatttttgataaataaaggaattattgtataatttgtatgtgtgaattgtagaagtacgcgtatgtaggtatatatttttgtcgaggagtagtgttttaatttttaagttattttgtttattgtagtggagaaggattagattaatttgtatttttttagttgtataatagataatttgtggaaatatagttaattgatattattgtt

SEQ ID NO: 1908 - DNA, 2487 bp, Artificial Sequence
  chemically treated genomic DNA (Homo sapiens)
agtaatgatgttaattaattgtgtttttataggttatttgttatatagttggagaaatgtaagttagtttggtttttttttattatagtagatagagtggtttagaaattaaaatattgtttttcggtagaggtatgtatttatatgcgcgtatttttgtaatttatatatgtaaattgtgtaatgatttttttatttattaaaaatttatttttttaaatatgtttttaaaaaggtatttggttttaaagatcgtataaaagaacgggagtagaagaaaagtaagtgtgattggtgaaaaaatagaaatgaaagataattttagttgagttaaatgttttatatttagggtatgtaaaattatatgttagtatataatttttattaagtatatattaagtaatggataatgaaaataatggcgtgttttgaggaaatttgggttattgattttataggcggtgatagaaaatattatatttgtgttggtatttttaaatggtggatgtgtttattgatttataagtttaaagttataaaattaaagttgtaataaataagatgtaattgttgttataaaatttttaagtttttaattttttttttttttattgaaataagtgtttgtagagtatgatttttgaggtttttgtggagtataaatgttagtttttgtagaatagattttaataggtttggatataattgtatgggttgtagtgaattttaatattaatgatgttaggatattgtgttttgatatatatgtaaagtttattaataagtatagtatcggtatttttaaatcgatattttaaagtattattgttttatttgttttgtttattaaattttagtatattaatttttagagttatttttataattaagatttatatttatagtagattttttgtattttttttttatttttttaatttagtttttattttattttttatatttttggattttataggaggaaagagggagagaattgttagaaggaagaaggtagttggtgtgaatttatgaaaattagcgttttttaaagtgtttaagaattttatttcgattttaaattagttttttggaggaggtaagagtttatttggtatggttcgatgtaaattttattttacgcgtggattttgtttttttttagagtttttttagaattttggttaattttagagttgttaagggattttagggtcgcggagggagggttttgcgttttttagcgttgtttagggtttttttgggcgattgtattgggaaattaagtcggtttaggcgatgtgtttcgggcggttttaagaaaaagattagcggtttagaagttacgggttttatttttaggaagtggttatgaggttcggtatagtggcggttgtttttttttggaatcgcgtagtgaaaatcgagtgcgttaattcgggtcgtagtttcggagaggggtggggtagggatagggttatttttatagggatttaataatacggagttattatttcgttttataggttcgtagtttttttcgtcgtcgcgttcggacggttaatttgtatttttttagttgtagtgagtaaagtcgttcgcgtcgtgcgagttatcgttttttttttgaggttagttaggttcgggtttcggtttttttttttgtttttagggagtttgcggtgggagaaagttttcgtggggtttcgtgggtcgcggtacgtttcggaagttttgcgaggtgtttagtagaggtgttagatttaaggtcgtgggattttaagaagagatttggatattgaagttaacgtttgtttgattttaaataaagttagcgatgttaattaaggttgtgtgatgaggaaagtggagttttttattttttgttatatttatttttagtagatttttagaaaatgttaatatttattgtagaattattaattttagtattatataggaggtataaaaataaaattaaaaaatttttttttattagttttaggttaaaatgttttttaattatttattgtgaagtttgttttttttttttgtatgtaatagttatggttatgaaaagatgtttatagtatattatttataaaaagtagtttagaaaattagtagaatggtacgatttattttttttgtaacgtgtgtaagaaatttgggagtatgtatataaataggttaaatggtttgttttggtagttttaaaaattatttgtaatttaattttttttataacgaataagtaatatttatgtaataaattataagttttattttagtaaagttttatatgagaaatgtgattttgttatgttgtttaggttggagtgtagtggttatttataggtttggttattgtgtattatatttttatttttattttaaatattttttttttttttatttgtatgttagtaaaattattattgtatattatagtttagaatttttgggtttaagtaattttttcgtttt

SEQ ID NO: 1909 - DNA, 2392 bp, Artificial Sequence
  chemically treated genomic DNA (Homo sapiens)
gagtattcgttttgtgatagcgtaatgttgggtgttcgcggtcgcgttgggaaaatagacgcgtatatatattttttatgtggtgggtttagagcgatacgaaagttttcgagggcgtcgcgtggggttttgcgggggttttttagaggcggcgggagtgggaagggaaggatagtcggagggatgagggtttggtttggtcgtggggtgggagagaggacgggtgggacgggtagtggggttgtaggtatttgagatgagatgttttgttggagagcgaggttttttttagttagaaaatgggagttattgaaagtttaaaaataaagaaattatatgggtagtttttaatttcggcgagttcgatttcggcgagttttgtgtggtaggagatgggttggtaggagcgggaggaaggttttcgtgagtgattattaggatacgaaggtaggaagtttagatacgttgatttttttatatgaagtagaaaggagggaggattttatttttaatagagtagtgattttgaagttacggattcgataaggattttagtagagtcgagggaggggggaatttagttgtggtttagacgagtatcgtaggtggttgagaggggtcggggtgtaattaggggacgttttgggacggaatttagtagatagtttgggttggagatagggtttgggaacgggggtaggaaacggttaggtattgtttagggagagtttgtggcgggagaagaggcgaatttttgcggtgcggggagttggtgttgaagagaaaggtggagttgggggatttttatagaagatatgggtttggtgggtaggagggtatttcggaattagggggtagagttgttgggaagaaggagggttcgtgtcgtgggaggaggacgaggcgtaaagtttaggaaggaaggatttggagtcgggtcggagttttggagggaggagagaggggaggtcggagttggagcgtttattacggtgatcgttgtttttattaggtattgtttaggggttgtttatttttttttagtttttacgggggatgttgtgatttgataggtgaggagagtaagttttttagataggtcgtttttttaaggtcgtgtagtttttataagtttaaatgtgatttgcgtcgggtaattttaaaatattgtcgtcgttagttttaggtggttttgtagggaggggttttcggtgttttttgtgaattggaatcggaggttgattttttagagtgtgagaagttggcgggtttggcggttggggacgtgttgcggtgtgcgtgtatcgggttgaagatttgttaggttggacgtttttgtcgtgagtggtgtttttagaggtcgcggttttttgtagtagttttgggtagtttgtagtagggaaatttttggtcgagtgggtttagggggagttttggtggttaagtttgttgtgtggtcgtagtagaattttgagtttgggtgagggggaagagtagaagttttttttttatatttttggaggttgggggtgtaagattaaggcgtcggcgttttcggggttttttggttgtgtttttggaggttagagggcgttggaggtcgtaggaagttttttgtgtgacggttttgattttttttattgggaggagatttggagttagttattttttaatattattacgtcggtaacgtttgggttttggaggggatatattcgaattttagttaggtataagtaggtaaggtagagaaatgggggtgtagtttttgggggttcgagagttttagaggagttttttatattttagtgtttagtttttatttgttatggtatttttaggatgggaagggtttttgtcgatgagttttttttgttggtatagttttttttttttttcggaagtcgatttgagtaagtagtcggtttatattatattttttattattttttttttgggttttttttttgattgtttggtatatttgtttcgatatttatttgtaaatcgtaaggttaggtattttggggtttttttttgatcgtgttttcgatattttatagagtgtttgtacgtgagatgtttggtggtttgtgattttatgatggtttcgttttatttttgttatgtagtgtttttgtaaatttattatgattttattttgttatgtggtatttttgtagttttttggagttgttttttttgaggtttttagtgattttttgagggttggttaacgtaaggtgaattttagttttaaatttttttggggttagaattttttgttagatacgtttatagtttttgtaatttttttttgatgttatttgttaatcggtttgtataatgagttatttagtaaatggtgatgtgtttcgtttttgttatagtt

SEQ ID NO: 1910 - DNA, 2392 bp, Artificial Sequence
  chemically treated genomic DNA (Homo sapiens)
gattgtagtaaagacgggatatattattatttattaagtaatttattatgtaagtcggttaataagtgatattaaggaaaagttgtaggagttatgagcgtgtttaataggagattttgattttaggggggtttagggttggaatttattttacgttaattaatttttaggaggttattgaggattttaaggggagtagttttagggggttgtagggatgttatatggtagggtggggttatggtggatttgtagagatattgtatgatagggatggggcgaggttattatggagttataagttattaaatattttacgtgtaaatattttgtgaggtgtcgggggtacggttaggaagaggttttagggtgtttggttttgcggtttataggtgggtgtcggggtagatgtgttaggtaattaaggaggaggtttaggaagggggtagtgaggaatgtggtgtgagtcgattgtttgtttaagtcggttttcggggaaagggagaggttgtgttagtaagggggatttatcggtagggattttttttattttgaggatgttatggtaggtgggaattgggtattgaggtgtggaaagtttttttgaggttttcgagtttttagaagttgtatttttatttttttgttttatttgtttgtatttggttgaggttcgaatgtgttttttttaagatttaggcgttgtcgacgtgatagtgttggaggatgattagttttaggtttttttttagtgaaggggattaaggtcgttatataagaggttttttgcggtttttagcgttttttagtttttaagaatatagttaggaggtttcggggacgtcggcgttttgattttgtatttttagtttttagaaatgtgggaaggaaatttttgttttttttttttatttaggtttaggattttattgcggttatatagtagatttggttattaaggttttttttggatttattcgattagaggtttttttgttgtagattgtttagggttgttgtagagaatcgcggtttttgaggatattatttacggtagggacgtttaatttggtaggtttttagttcgatatacgtatatcgtagtacgtttttagtcgttaggttcgttagttttttatattttgaggagttagttttcgattttaatttatagaggatatcggggatttttttttgtagggttatttggagttgacggcggtagtgttttggagttgttcgacgtaggttatatttgaatttgtgggaattgtacggttttgggaaaacgatttgtttaggagatttgttttttttatttgttaaattataatatttttcgtggggattgaaggaaaatgggtagtttttgggtagtgtttggtgggaatagcggttatcgtggtggacgttttaatttcggtttttttttttttttttttttaaggtttcggttcggttttaggttttttttttttgaattttgcgtttcgttttttttttacggtacgggttttttttttttttagtagttttgttttttggtttcgggatgtttttttgtttattaggtttatattttttgtaggagttttttaattttatttttttttttaatattagtttttcgtatcgtagggattcgttttttttttcgttataaattttttttgggtaatgtttgatcgttttttgttttcgtttttaaattttgtttttagtttagattgtttgttgggtttcgttttagggcgttttttggttgtatttcggttttttttaattatttgcggtgttcgtttaggttatagttgagtttttttttttttcggttttgttgaggtttttatcgggttcgtggttttagaattattgttttgttaaaagtggggtttttttttttttttgttttatgtggaaggattagcgtgtttgagttttttgttttcgtgttttgatggttatttacggagatttttttttcgtttttgttagtttattttttgttatataggattcgtcgaagtcggattcgtcgaagttggaggttgtttatgtgatttttttgtttttaaatttttagtggtttttattttttggttgagaggggtttcgttttttaatagggtattttattttagatgtttgtagttttattgttcgttttattcgtttttttttttattttacggttaggttaggtttttattttttcggttatttttttttttttattttcgtcgtttttaggaagttttcgtaggattttacgcggcgttttcgggagttttcgtatcgttttggatttattatatggagaatgtgtgtgcgcgtttgtttttttagcgcggtcgcgggtatttagtattacgttgttatagggcgggtgttt

SEQ ID NO: 1911 - DNA, 2475 bp, Artificial Sequence
  chemically treated genomic DNA (Homo sapiens)
tggttttggtaatttaattcgtatgggttgtttagagtagggtttttgagggttttgatttgtttgtttttcgttgagtaggattaggttttagagagagtaattataggttgggtgtggtggtttttgtttgtaattttagtattttgggaggttaaggtgggtggattatttgaggttagaagtttgagattagtttggttaatatggtgaaattttgtttttattaaaaatataaaaattagttaggtatgttggtgtacgtttgtaattttagttattcgggaggttgaggtaggagaatcgtttgaattcgggaggtggaggttgtagtgagttaagattgcgttattgtattttagtttgggtgatagagagtttattttaaaaaataaataaataaataaataaaagagagtaataattttttttagagtagtagttgttattgggatattggaagtagaggttgtaatttttatttatatttagggttttttttttttttttttaaaaataagaaattaattaaattttaatatatatatttataatagtatatgtatgtgatttgtaagtaaatatgtatgtattagaggtatagttttaaaaatttgttattgatagtagcgtatgtttaaaaatgtttggggattgatttagaaaatgtgttttaagatattaatttatatttaaaattattagtttatttgatgtttagtagaatggaaaataaatgtgtaatatgttatatatggtgtttatattttagttgtttgttttttttttatttttatgtttaatagtttttatgtttattttaggtttggagtatgatgtttcgtatgttaatttaaaataaattttttaaggaatttagatttgtaatgtaatgattttgaatgtagattttgggttattattttttgggaatgtttttattatattatgaaattgtatttattgttgtttatatatatatttttgataattaagtaaatttttgaatattttttttaagatttaaaatagtaaaatgaaatttaatattattataaagttattttttggtaaataatttaaggaagataattttcgtatgtattttttttttaatagtttaggttaggtttttatatatagttttttttaaaatatttgagtgtaattatttagtaggttatcggttgtaattttgagaaataaagtagtataatgtgatttgtatagagaatgattttatttattacgtttttaattatttatatttgttttaaattaaaatgttttggttgaacgtaggtattcgaaggaaggtttattttagtttagttttgtttttaatgtttgtgatatatagagtatgtgtgtttagggagaggttgcgtttagtgaagtagttgggtttttatttttatagggcgatattttaataggattttagttttttggggagttattttattgtgttattgttgttgttattatgtagggtaatttttttttttttttatttatgattttattttggtttgggtatttttatttgttttgtttatcgtttttttttgggttttttgttttttacgagaattattaagtaaaataagaataaaatgagttttgtaaaataaggtattttgtggatatttgtgaggtaaaaagttgttttttagtagtttgtggtagagtaaattttttttggtttgattattgatttatttgttgttttttgacgggttgttttgaggggttgtgagggtaaggttggttaggttagttgtttcgatttattatttgatattgacgttttatttattttttttatttcgggttatgatataaatattaggttttgttttttttgttgattagtgattggttattagtcgagaagtttgtttttatgaaattttgtttttattgaattttagaatagttttggttaaagttgttatataaaaaattaaattttttgaatatgttagttttgtgttgagattattggtttattttttggttgtataaaattagtttgttttatttattagggggttagttcggattttaagtagatttgtagagaggatttggtggatatttagatgggtatataaatgtgtttaggaaatgttgagtaaatatgaatgatttgtttttttagggttgatttatttatggagttaagagaatatgttttgtttatgagtaaggatatttttttttttataaatatagattaattttttttagtgaaaatattaaagtataaaatatatttttagttttaaggatgatattaattatagaatttatgattatgtaagtttttttttttattataagtattaaattaattttggtttttaattttaaaatgtataaaattaattataaattaggttttatttttattttgggatatggaattaagtatattagaattgtagagatatatgtggttatgtttaattt

SEQ ID NO: 1912 - DNA, 2475 bp, Artificial Sequence
  chemically treated genomic DNA (Homo sapiens)
aggttagatataattatatgtatttttataattttaatgtgtttaattttatattttaggataggaataaagtttaatttatgattgattttatatattttagggttaaaggttaaagttaatttaatgtttatggtaggaagaaaagtttatataattatgaattttatgattaatgttatttttgaaattaaaaatgtattttatgttttgatgtttttattggaaaaagttgatttatatttgtgagaaaggaagtatttttgtttataggtaaagtatatttttttagttttataaataaattaattttaaggaaataggttatttatgtttatttagtattttttgaatatatttatgtatttatttaaatgtttattaagttttttttgtaaatttatttggaattcgagttgattttttggtggatgggatagattggttttatgtagttagaagatggattaataattttagtataaagttggtatgtttaagagatttaattttttatataatagttttagttaaagttattttaggatttagtggaagtagaattttatgaggataaatttttcgattaatggttaattattaattagtagggagggtaaagtttggtgtttgtgttatggttcggagtggagggggtgagtggggcgttagtattaaatagtaaatcgggataattagtttggttagttttgtttttatagttttttagagtagttcgttaggaggtagtagatggattaatggttaagttaggggggatttgttttgttataggttattggaaagtagttttttgttttatagatgtttataaaatgttttattttataagatttattttgtttttgttttgtttgatggttttcgtggagagtagaaaatttaagaggaagcgatggatagggtaggtggaaatgtttaagttaaggtaaagttataggtgggaaaggagggaggttattttgtatagtagtagtagtagtggtatagtgggatggttttttagggggttaaggttttattgagatatcgttttatgagaatgagaatttagttattttattgaacgtagtttttttttgggtatatatattttatgtgttataagtattgagagtagaattagattgggatgagttttttttcggatgtttgcgtttagttaaagtattttgatttgaggtagatataaatagttggagacgtagtgggtaaaattattttttgtataaattatattgtgttgttttgttttttagggttataatcgatgatttgttaaataattatatttaagtattttggggagaattgtatataggaatttagtttgaattattaagaaaaaaatgtatacgggagttgttttttttaaattatttgttagagaataattttataatgatattgggttttattttattgttttgaattttagaagaggtgtttagaaatttgtttaattattagaaatatatgtgtgaataatagtgaatgtaattttatgatgtaatggagatatttttaagaaataatagtttaggatttgtatttaaaattattatattataaatttaagttttttaggaagtttattttgaattgatatacgaagtattatattttaggtttgaagtagatataaggattgttagatatggagataagaaaagaataagtagttaagatataaatattatgtgtggtatgttatatatttattttttattttattaagtattagataaattagtggttttgaatataaattaatattttgaggtatattttttaggttagtttttaaatatttttgaatatgcgttgttgttaatgataagtttttgaaattgtatttttaatatatgtatatttatttataaattatatatatgtgttgttataaatatgtatgttaaagtttaattgattttttatttttagaaaaaaaaaaaaaaaattttgaatataaataagagttatagtttttatttttagtattttagtggtaattgttgttttgggagaggttattatttttttttgtttatttgtttgtttgttttttgagatggattttttgttatttaggttggagtgtagtggcgtaattttggtttattgtaatttttatttttcgggtttaagcgatttttttgttttagtttttcgagtagttgggattataggcgtgtattagtatgtttggttaatttttgtatttttagtagagatagggttttattatgttggttaggttggttttaaatttttgattttaagtgatttatttattttggttttttaaagtgttaggattataggtagaagttattatatttagtttataattattttttttggagtttagttttatttagcggaaggtaaatagattaaaatttttagaggttttgttttgaataatttatgcgggttgggttgttagaatta

SEQ ID NO: 1913 - DNA, 2437 bp, Artificial Sequence
  chemically treated genomic DNA (Homo sapiens)
tttttaggtattgaagaagtggttgtgaatgaaaatagataaaattagattgagataatggtatgtaaagtgtgatatgaatatgggggttaggttcgtttaatgtttttgttatttttatatgggatgattttaataagatatttatagttaagttgttagaaataaaggtttttttttttttttttagttattttaataaatttgggttatttattattgttgtttagtttgtattgagtagttttagttaagtgagttatggttatattgaaatatttatttggttacgaattgagtgaaggtgggaggttttttttgttaatttttttttttttttaatatattttttggtaatttttacgcggaaaattttattttattataggtttttttttttttattttttagaaggcggtggttttatttaggagagggttgtagatcggggttagttttagggttttcgcggtgttatttttttttcgcgagggtttttgtcgtgtttcggttcgtcgttgggaggcgttgcggtatcggcgtaggagtcgtcggtaggggtggggcggggtcggcgggacggggtagagggttttgcggcggcggacgcggcgggttcggttataggtaattcgtaggagtcgagagcgttgtttggcgcgcgggcggttggaggtacggcgttgggcggcgtcgaggttttggggtcgtcggagttagcgggagttagttttcgttttcgtttttcgttttttatcgtgtcgtcggttttggtttttgcggcgcggacgttcggcgcgggagagaaaggtattaggcgatttcgtcggttttttgggattttcgtttatatcggggtgggcgttttaggtcggggaggacgttgtcgggggaagggggcgttgttttttcggtattttaggatcgtcgattgttcgcggaggagattcggatatcgcgtttcgttttttggtttgcggttttcgaaaacgttcggcgcgagggggttttttcggggcgttttttttttcgtttggtattagttgtttttttggaatatggaatttcgggcgagggaggtggagaatttttttttggggttcgtttttcgtttttttgttcgtttgtagtttgaaggaagggcggtgggggcgggggttcgagtatttcgcggtttgcggcgcgtaggagggtaggtttttggtttgcggtcgttttcgaatgatttcgttttttttcgttttggacgatagtattagggtgtagtcgtaggagaggggtcgatattttttaggagttttatcggcgaagttttagtaagtggtatttttcggggtttagagagtcggcgtgttgtttggtttgggtttagatattagtttatttaagtttattttgggtttttaagtgtgttgttttcggtagatttcggggattggaggggaagtgtagtattatttgtgatttaagagggatttgaatgttttaaagttggttaagaatgtttttttcgcgaggtagtatgagatgggttacgtggtagtaaagagttatttcgggttcgtgagatggagttttgattttattatttgttaggtgtgtgattttggaaaatttatttttttaaattttagtttttagaattttaaattgtaggtattgtatataatttcgtagtattgtgtttatgtagtgaagtgatgggaatgaaatgtttggtattgtatttttgtgtgttagatattttttgcgaatttgttggatgttgaatttatttatgtttaggttttgttaggttagtgtaagtggaaagaatttgggtaatgaagataaatatatttgggtttaaggtggttttatttatggtatattgattgggggttttttatttttaaaatattaatagtagttttggcggggtttttgttgttgttgttttgagatagagtttcgttttgttgtttaggttgtaagttttgatttttttagtttaatcgatttttttattttagtttgggattattatatttggttaattttgaatttttttattttattagagatagagttttattgtgttgtttaagttggtttcgaattttttttgttttagttttttaaagtgttgggattataggtgtgagttattgtattggtttgtagttttgtttttgagtgtagtaggtgtgtttatatcgatatatgttatattttgttatttttagtatttgtttagtatatggtaataaaaaattttttaaaaattagggatataaattaaaattggggagtattttttgttttttaggttatattggatatgggggaagggtagaagagggatgaagaggaattaaagagattagaaaataattagtcgtagtgttgggaggtataaattaatggtaatttttaaaaatgtgaatttattaatttt

SEQ ID NO: 1914 - DNA, 2437 bp, Artificial Sequence
  chemically treated genomic DNA (Homo sapiens)
ggagttaataaatttatatttttaaaaattattattggtttatattttttaatattgcgattagttgttttttggtttttttaatttttttttattttttttttattttttttttatgtttagtatgatttagagggtagaaaatattttttaattttaatttgtatttttaatttttaaaaaattttttgttattatatgttaaataaatattaaagatgataaagtgtaatatgtatcggtatagatatatttattatatttaagaataaggttgtagattagtatagtggtttatatttgtaattttaatattttgggaggttgagataggaggagttcgagattagtttaggtaatatagtgagattttgtttttagtaaaataaaaaaatttaaaattagttaggtgtggtggttttaggttgaggtgggaagatcggttgagttaaggaggttaaagtttatagtttgggtaatagagcgaaattttgttttaaaataataataataaaaatttcgttaaggttgttattggtgttttggggatgagaaatttttaattagtatattatggatgggattattttggatttaggtgtgtttgtttttattgtttaagttttttttatttatattggtttaatagaatttaagtatgaatgaatttaatatttaataggttcgtaaaaggtgtttaatatataagagtataatgttaagtattttatttttattattttattgtatgaatataatattacgaggttatgtataatatttgtagtttagagttttaaaaattaaggtttaaagaagtgggttttttaaagttatatatttaataagtggtggagttagaattttattttacgggttcgaagtggttttttattattacgtgatttattttatgttatttcgcgggggaaatatttttgattagttttgagatatttaagttttttttgggttataaataatgttgtattttttttttagttttcgagatttatcggaagtaatatatttaaaagtttaagataagtttgggtgagttgatgtttggatttaaattagatagtacgtcgattttttggatttcgggagatgttatttgttgaggtttcgtcgatggggtttttgaggggtatcggttttttttttgcgattgtattttagtgttgtcgtttagggcggggagggacggggttattcggaggcggtcgtaggttagggatttatttttttacgcgtcgtagatcgcggggtattcggattttcgtttttatcgttttttttttaaattgtaagcgagtaggagaacgagggacgagttttagaagaaagttttttatttttttcgttcgaagttttatattttagggaggtaattgatgttaggcgaagagggaggcgtttcggggggattttttcgcgtcgggcgttttcggaggtcgtaggttagggggcgaggcgcggtgttcgggtttttttcgcgggtagtcggcgattttggggtgtcgagggagtagcgtttttttttttcgatagcgtttttttcgatttgaggcgtttatttcggtgtaagcgggggttttagggagtcggcgaggtcgtttggtatttttttttttcgcgtcggacgttcgcgtcgtagggattaaggtcggcgatacggtggggggcgaggggcgaagacggggattggttttcgttggtttcggcggttttagggtttcggcgtcgtttagcgtcgtgtttttagtcgttcgcgcgttaggtagcgttttcggtttttgcgggttatttgtggtcgagttcgtcgcgttcgtcgtcgtagggttttttgtttcgtttcgtcggtttcgttttatttttgtcggcggtttttacgtcggtgtcgtagcgttttttagcggcgagtcggggtacggtagggattttcgcgagagagaggtggtatcgcggaggttttggggttggtttcgatttgtagtttttttttgggtggggttatcgttttttgaagagtgggaggaagggggtttatagtagggtgaggtttttcgcgtgggggttgttaggaagtgtattgggaggggaggagaattagtaggaggaattttttatttttatttaattcgtggttaagtggatattttaatataattatagtttatttaattggggttgtttagtataaattgaataataatgatgaatgatttagatttattggggtagttggagaggggaaaggaagtttttatttttaatagtttgattataagtattttgttggaattattttatatggaaatggtaaaagtattgagcgagtttgatttttatatttatattatattttatatattattattttagtttggttttgtttatttttatttatagttatttttttaatatttagaag

SEQ ID NO: 1915 - DNA, 2308 bp, Artificial Sequence
  chemically treated genomic DNA (Homo sapiens)
gaggcgggtggatttttgaggttaggagattagtttggttaatatggtgaaattttgtttttattaaaaatataaaaattagttaggtgtggtggcgggtatcggtagttttagttatttgggaggttgaggtatgagaattgtttgaatttgggaggcggaggttgtagtgagttaagatcgtgttattgtattttagtttgggtgatagagtaagatttcgttttaaaaattaaataaaataaaagtatgatgatatttataataataattttttaaatttttataatatttttttattttaatatataaattaattttttaaaagagaaaaatagattataatttttttttttaagttaggaagttttagaaaaatttaatgatttttaagaagtagtaatgttttataaataaggaggagattaattcgagaaataatttagtaataataagggtttttaggaaagggtgagagatggtattgagttagagattttagggtttttgattattattatttttagagttgtaatagatttggtttaggtttttaagttatggtgtattttatttgtaaataatatttaatagtgatgttgttaaatagtagtataaaaatgtggtaagatttttataatttataggttttgttgttgtggtaatatgaaagtgaaaataaaagtatattgttttataattgtatagttttttttttttgtttttagggtagtagatgttaattgaatgtttagatattaataagaatagaaaatttaatatatagatgttgttattgatttgtgatgtttattaaatatttataatttagaggaagtatttttttttttttattggtttgaatttattaatttgattattaaataatgtagtagttttattatttttattattgggatttttttttttgattttatttgttgattgtatttatttatatataatttaggttttttttgaatacggagaaagatatacggtatttgttgtttagttagaagttattttaagttattttaaaatgagttatgtcgtttagtattttatttttgaaaattaagagaatcgttttttagttaaattgaaaatagtaaatatttagtggtttaaatttatatatgggttttaaagtcggggagattattttaggatgaaataaaattttaagtaaaatgaattttaaaataattaatttaagataagttgtttataggagttttatttcggttagtttaaatgtaagtggttgtttgtatttgatttattttttatgagatgttataattattgattttttaaatttttaattttatggttattttttaaatttttgttttatatttattttaaaatagaatagttattataaagtttaggataatttaatttttaaaagtagttttaagataagttaataagagggaaaaaaataaagttagagaattttgttattttttaattatttattttatattatgtggtaaagaaattatttttaatttttattttatataaattttattgttttatttttttttttttagggagagaattttttatttgtgttggttattttagatgattattatagatatatttttttttaagtaatatattttatttataaatataataatgaaaagttttttaatagtttattggtaattttaaagttgtaagtttcgaatattataaatcgtattttatatttttttatagggtttgggggagtgtttgttatatttattagaaggtaagaagttaagtaagaagagagaggagaggaaggaggtaggaaaaagtaagttagagttgtagtaatagtaggagagggcgggttggttgtgtttttataagggagagagaaatttaatatatatatatatatatatatacgtgtacgtacgcgcgcgtatatatatatatatatatatacgttataggtattgatggaggtagtagtttggaggaggtgggggtagggaaaggaatattatatgatatagtaaggggaaaatatatttaagtttttttagttgttgttaggggaaatattttagtagagagaagtagttggaagattttattagattttttatgttttgtttgttttttcggaaatttaaattttgagtatattattttcgttgtaaatgtagttttttattattgttgttttttttgggtagagattagttttttttattttttgggttatttttagtgtggtggaagatttattttttttttttttttttttttgtattagtttaattagtgttaggtt

SEQ ID NO: 1916 - DNA, 2308 bp, Artificial Sequence
  chemically treated genomic DNA (Homo sapiens)
aatttgatattaattaagttagtgtaagaagaagaagaaaaagaagatgaattttttattatattggagataatttaagaagtaagaaaaattgatttttatttaaaaaggataataatggtgaaagattgtatttgtaacgggggtaatatatttagagtttaaattttcgaaaggataaataaaatatggagagtttaatgagattttttagttgtttttttttgttaaggtattttttttggtaatagttagggaagtttgggtgtattttttttttgttgtgttatatgatgtttttttttttatttttattttttttagattgttgtttttattagtgtttgtggcgtgtgtgtgtgtgtgtgtgtgtgcgcgcgcgtgcgtgtacgtgtgtatgtgtgtgtgtgtgtattgggttttttttttttttgtaagaatatagttagttcgtttttttttgttgttgttgtagttttgatttgtttttttttgtttttttttttttttttttttttttgtttagttttttgttttttggtaagtatgataaatatttttttaagttttgtgagaaggtatagggtgcggtttgtggtgttcgaaatttgtaattttgagattgttagtgaattgttggagaattttttattgttgtatttataaataaaatgtgttgtttagggagggatgtgtttgtgatagttatttggaatagttaatataagtgaaaagttttttttttggggaggggaaaataaggtaataaagtttatataagataaaagttagaaataatttttttgttatataatataaaatggatgattgaaaagtaataaagttttttgattttgttttttttttttttgttaatttgttttgaggttatttttgggaattgaattgttttgggttttataatgattgttttgttttaaagtaaatgtggaataggagtttaaagaatagttatggaattaagaatttaaaaaattaatgattgtggtattttatgaagaataaattaaatataaatagttatttgtatttagattaatcgaagtaaaatttttatggatagtttattttaaattaattattttgaagtttattttatttgagattttattttattttaagatagttttttcgattttaaaatttatgtatggatttaagttattaaatgtttattgtttttaatttgattgaaaaacgatttttttgatttttaaggatgaagtgttaaacggtatgatttattttagaatagtttaaaataatttttggttggatagtaggtgtcgtgtgttttttttcgtgtttaggggaggtttaagttatatatagatgagtgtaattaataagtgaggttaggaaaagaaattttagtgatgaaaataatgaaattgttgtattatttgataattaagttggtgaatttaaattagtgaaagaaaaaaagtattttttttaagttatgagtgtttggtgagtattataagttagtggtaatatttgtgtgttgaattttttgtttttgttggtgtttgagtatttaattgatatttattgttttgagaataggaaaaggaagttgtgtagttgtagaatagtatgtttttgtttttatttttatgttattataatagtaaaatttgtgaattatgaggattttgttatatttttatgttgttatttagtagtattattgttaaatattatttataaataaaatgtattataatttaaaggtttaaattaaatttattgtaattttagaagtggtaatagttagaaattttggaatttttgatttagtattattttttatttttttttaagggtttttattattgttgaattatttttcgagttggttttttttttgtttatgaaatattgttattttttaaaaattattaagtttttttagagttttttgatttagaagagaaagttgtaatttgttttttttttttaaaaaattggtttatatattggaataaaagagtattatagaaatttaaggaattgttgttataagtattattatgtttttgttttgtttagtttttgagacgaagttttgttttgttatttaggttggagtgtagtggtacgattttggtttattatagttttcgttttttaagtttaagtaatttttatattttagttttttaagtagttgggattatcggtgttcgttattatatttggttaatttttgtatttttagtagagatagggttttattatgttggttaggttggttttttggttttaaggatttattcgtttt

SEQ ID NO: 1917 - DNA, 2324 bp, Artificial Sequence
  chemically treated genomic DNA (Homo sapiens)
tttattaagaggatataataattataaatgtatatatatttaatattaatgttttaaagtatataaagtagaaattgatataattaaaataagcggataattttataattatatgaagagatttttaatttttattttttagtaattgataaaaaaatttaaaaaaggtataaatgatttaaagttaattgttatttatagaatattatatttaatatttgaaaaatattgttttgaagtatatatggtattaagataagattatgtatgatcggttataaaaattaaataatatttttaaataatttttgggttaaagaaaaaattagaaagaaaatttgaaaatattttgaatttgaatttaaattttaaatattgattttgatatttaaatatgtttgattttggataattaatttggattgttgagtgttagtttttttattaataaagtggagatattaatttttattgggttattatgaagattaaatgaaataatgtatataaagtatttagtataatttttggtataataataatatttaatgttattgtttataatgagaagttattattgagggtatatgggtatatttatagggttttttgttattttgattattttgtttttgtttttttggtgggggagaatttttagttagttggatggtattaataagatttttttttttttttttttattttttgagatattgttttttgttatttaggttggagtgtagtggcgtaattataatttattgtaggttcgaatttttgggtttaaatgatttttttgttttagttttttaagtagttggtattgtaggaacgtgttatatttagttaatttttttgatttttggtagagataatgttttgtttttataaatgttgtttaggttggtttcgaatttttaagttgaagtgatttttcggttttgggtttttaaaatgttaggattatagatgtgatttattgtgattagttgaatattttgttttttaatattatttaagaagattacgttgtattattttattttttatatttttttgttgataaatgattttattttatttgatttaattttatttttttattgtgtaatattattgatagatagtggatttacgtaggtatataagagatttatgtattttttgaatttaaattttgagttgaggacgatgtttttatttttaggtttttattcggtttgggagtttgtttttagtattattgttgataagacgttagtagtatatttaaaatttgttatttgagattttgattttattatattggttttttattttttaaatattaaaaaataatttgggaaaatgaggaattatgatttttttttatttttttttttaatttaattgtataaatttagtagtgatttttatgtattttgttttttgaagtatttttttttaaacgtttataataataattattttataggaatattggtgtttgattaattattatttgttaaaagatttaggatttttagttggaaaggggattggggatgtatatagtattattttggagagttttgtattttgttatattgaatggagttagtgtttttgtgtaattaaattaattatattgttagggtttacgttgtaattaatgaaattcgtgtagattaaatgaagtgattagtttattatttttagattgaataattaaatttgaagagttttagtgttttttttaatagtttttttttttttagatgattattgatattttggtttttaattttattttattgtgttaattcggtgtgtgtttatttgttttatgttatgtagaatttattataatattaaaaatgttgaatttttataaatgtatttttttaaaagaattaaggtttattttagaaataaatttaatataatagaaaggtaaggggaatggtatgtattttattaagggtttgtattgtgttaggtattgtgcgggtattttatttatttaattttatttaatttttttttagttatatagtgaagttggtttaatttttattttacggatgaagaaagtagtttaaggaggtaaaattatttaaggttataagtaagtaaggggtagaggtagtatttgaatttaagtttttttgattttaaaatttatattttttttatgagtagtagaggtttgtttttgtgttttatttaagaaattatgttattttgaggtatggggatatatttttagagttttgttgtgtttttgtagttttcggtatagattttttaatttgtttcgagcgaggatagttttgttgtgt

SEQ ID NO: 1918 - DNA, 2324 bp, Artificial Sequence
  chemically treated genomic DNA (Homo sapiens)
atatagtagagttattttcgttcgaagtaaattggagagtttgtgtcgggagttgtagagatataataagattttgaaggtatgtttttatgttttagaataatataattttttgaatggggtatagagataggtttttgttatttatggaaagagtgtgaattttagaattagagaggtttgggtttaaatattgtttttgttttttgtttgtttgtaattttaaataattttatttttttgagttattttttttattcgtaaaatggagattagattagttttattgtgtggttgggaaaaaattagatgaagttgaataggtaaggtattcgtatagtatttgatatagtgtaggtttttgataaaatgtatattattttttttatttttttattatgttgagtttgtttttaaggtgggttttagtttttttaaaaaaatatatttgtaaagatttagtatttttggtgttataatgaattttgtatgatatgagataaatggatatatatcgaattgatatagtgaagtgagattgagaattaaaatgttaatagttatttgaaaaaaaggaagttattggaaaaagtattgaagttttttaggtttaattatttaatttaaaaataatagattgattattttatttggtttgtacgggttttattaattatagcgtaagttttagtagtgtggttaatttgattatatagagatattagttttatttaatatagtaagatgtagagttttttaagatgatattgtgtgtatttttaattttttttttagttgaagattttaaattttttgataaataataattaattagatattagtgtttttgtaaggtagttattattataagcgtttaaaaggagatattttaagaaatagagtatatgaaaattattgttgaatttgtataattgagttaggaagaaaaatagaagagaattatggttttttatttttttaaattgttttttgatatttgggaaatggagaattagtgtgatgaagttaaagttttaaatggtaggttttagatgtgttattggcgttttgttaataatagtattgaagatagatttttaggtcgaatgggggtttgaggatggaagtatcgtttttaatttaaggtttggatttaaaggatgtataaattttttgtgtgtttgcgtaaatttattgtttgttagtaatgttatatagtaaggagataaaattaaattagatagggtgggattatttattaataaagagatataaagagtagaatgatatagcgtggtttttttgggtagtattgaaagatagaatgtttagttggttatagtgggttatatttgtaattttagtattttggaagtttaaggtcggaggattattttagtttgggaattcgagattagtttgggtaatatttatgagagtaagatattgtttttattaaaaattaggaaaattagttgagtgtggtacgtttttgtagtgttagttatttgggaggttgaagtaggaggattatttgagtttagaagttcgagtttgtagtaagttatgattgcgttattatattttaatttgagtgatagagagtaatgttttagaaaataaagagagagagagagagattttattaatattatttaattggttagagatttttttttattaaaaaaataaagatagaatgattaaagtagtaggagattttgtaagtgtgtttatatgtttttagtaatggttttttattatgaataatgatattaagtattattattatgttagaagttatgttaagtgttttatatatattattttatttaatttttatgataatttagtgaaggttaatatttttattttattggtgaagaaattgatatttagtaatttaaattggttgtttaagattaagtatatttaaatgttaaaattaatatttgaaatttgaatttaaatttaaaatatttttaaattttttttttaattttttttttgatttagggattatttagaagtgttatttaatttttatagtcgattatatatggttttattttgatattatatgtattttaaaataatgttttttagatgttgggtgtagtgttttataagtaataattagttttaaattatttatgttttttttgaatttttttattaattgttgagaaatgagagttaaaaatttttttatataattgtggaattgttcgtttattttaattatgttaatttttgttttatgtattttgaagtattaatattaggtgtatatatatttatgattattatgtttttttgatgaa

SEQ ID NO: 1919 - DNA, 2389 bp, Artificial Sequence
  chemically treated genomic DNA (Homo sapiens)
agtttataggtaaatgttttatattttattattagttggtttaatttttttgtaaatttttgtttgaaggaatatattaagttataaattatttagtgggaatttattttgttaaagtagattatattttttgaagtagggatgttggattaattaagttttgggtatttggaaagtgaaggaattttgggagagtgattgtgttgaagaaatgataggatgaagagtaaagataattttgaaaattttgaatttttatagtgattttattatttgtgatttttttttattttttttttttttttttttttttttttttttttttttttgagatagagttttattttgttgttaggttggagtgtagttgtgtgattttggtttattgtaatttttgttttttaggtttaagcgatttttttgttttagttttttgagtagttgggattataggtacgtgttattatgtttagttaatttttgtattttttagtagagacggggttttataatgttggttaggatggtttcgattttttgattttgttatttgttcgttttagttttttaaagcgttgggattataggtgtgcgttatcgtattcggttattatttgtgattttttatttaatttttgtaaattagtattattgagtttttaaagaaagagtattttatgaaggaggtaggttgaggtagggcgttagagaatcgaagaatgggtattttcgtagattattaagtgtaattagataagaatagataaatttgaatatttttaataaattttaatatgtaattatgtaaatgtatgttagaaaaaaaatttaggtaatatgtttttgagtattattattttttagaagatgtaggtgggtttgggagaatattggggtaggttaagttatatagtttaatttttttttaagtttatttgaatatttatttagtattttttgtatataaagtttaagtaaaatttatttagtttttgtattgttattttgttattaaattttttttttgggttaaattttttttttagatttgtagttattgttttttttgatttttataaagtaggaaatgtttatgtattgttaagtttttagagttttcgttgtttatagtaattaaatgagatgattgttttagttttaagtattggttttagagaagggtagagtatattttgaatcggaaaattaaattaaataaaaataaatagttacgtgaggtatgtgagatgttagtttttttttggagaaatgtaagatagaaatttgattgtaaagttttatttttgaatgaaggtttttgcgatttgtttttagggttatattgttttttttttggattattgggaattatagttttagtaaatttagttttttttgatttggtgataaaggacgtaaattaaaattgtattaagttttttttgattttttaaagttattttaaaatagtttgtaaataataaagttattttttaaaatattttttttaaattaattataaattattttgaatagtttgaatatttgttttaaatgatgtttaggatgttttataatatttggaggatagcgttatatttgagagttgattattttaaattggtttttttaagtaattttttacgtgatttgtttgttgtgtttgtttatacgtagtagtttttgaattgttgttttaattatattgattgatttaataaaagagttaaaatattatttaattttgttgtatattttagttaattttgagtttttttaattaaaatagaatgggtggttgagtattttttttttgtagattagtgtttaattttaaaatttatagagatttattggattgatttggaagattattagtaattttagaagtggttaaataatcgggataaaagtatttatttagaagtggttaaataattgagataaaagtatttatgttttagatatgtttataggatgatgggtttatgttgttttttttttttattttttgttttttttttaggaaaatgtaaaaagtgtttttttttatattattggataaattattttaggataaattgaattttgtttatagtttagtagttttatgtaattagttttttaaaatttgagttttaaatagaaacgttttaattatgttaaaaatttgagtagttttaagagtttttttttttttaaatggtatagttgtaaagagtagtgtgatttttgtgggtttaagttcgggttttattttttatttaaatgtggttttgaataagtttttaatatttttttaatgttaagtttttattgggtataattatatttattttggttttttgtttgtttgttttttgaaagttaaatggtataatatgaatgt

SEQ ID NO: 1920 - DNA, 2389 bp, Artificial Sequence
  chemically treated genomic DNA (Homo sapiens)
atatttatattgtgttatttgatttttagaaaataaataaataaaaaattaaggtaaatataattatgtttaatgaaggtttgatattgagagagtgttagggatttgtttaagattatatttgagtaaagagtagagttcgagtttggatttataaaagttatattgttttttatagttgtattatttagaagaaggaggatttttagaattatttaggtttttgatatgattgaggcgtttttgtttgaaatttaggttttaaaaaattgattatataaaattattggattgtaaataggatttaatttattttgaagtaatttgtttaatggtgtaaagaaaagtattttttgtatttttttagaaagggggtaggaaataaaaaaaaaaaatagtatagatttattattttgtaaatatgtttaaggtataaatgtttttgttttagttatttagttatttttgggtaaatgtttttgtttcggttatttagttatttttgagattattggtggttttttaagttaatttagtgaatttttgtaaattttaaggttgggtattaatttgtaaaagaaaaatatttaattatttattttgttttagttggaaaaatttagaattaattgaaatatataatagaattaaatgatgttttaatttttttgttaaattagttaatgtggttaaagtaataatttagaagttattacgtgtgggtaagtatagtagataagttacgtaaagaattgtttgaaaaagttaatttaaggtagttaatttttaagtatagcgttgttttttaggtgttgtaaaatattttgaatattatttgaagtaaatatttaagttatttaaaatagtttgtaattggtttgaagggggtgttttaaaaaatagttttgttatttataaattattttgaagtaattttggagaattaaaaagaatttaatgtaattttaatttgcgttttttattattagattagggaaaattgagtttgttagggttatgatttttagtagtttaaggaagggatagtgtgattttaaaagtaagtcgtagaaatttttatttaaagatagagttttatagttagatttttattttatatttttttaaagagaaattgatattttatatattttacgtggttgtttgtttttgtttggtttggtttttcggtttaaagtatgttttatttttttttgagattaatgtttaggattgaggtaattattttatttgattgttatgggtagcgaggattttgaaaatttggtagtatatggatattttttgttttatggaggttaagagaagtagtggttgtaaatttgagagaaaaatttgatttaaaagagagatttaatgataaagtggtaatatagaaattaaatgaattttatttggattttatatgtaaaggatgttaagtaagtatttaagtggatttagaaagaaattaggttgtgtgatttagtttgttttagtgtttttttaagtttatttgtattttttggaaggtgataatatttaaaggtatgttatttagattttttttttaatatatatttgtatgattgtatgttagaatttgttagaaatgtttagatttatttgtttttatttaattgtatttaatggtttacgaaaatgtttatttttcgattttttggcgttttattttaatttgttttttttatagggtattttttttttgaagatttagtaatattggtttataggaattgggtaagaagttatagataatggtcgggtgcggtggcgtatatttgtaattttagcgttttgggaggttgaggcgggtagataataaggttaagagatcgagattattttggttaatattgtgaaatttcgtttttattaaaaaatataaaaattagttgggtatggtggtacgtgtttgtaattttagttatttaggaggttgaagtaggagaatcgtttgaatttgggaggtagaggttgtagtgagttaagattatataattgtattttagtttggtaatagagtgagattttgttttaaaaaaaaaaaaaaaagaaaaaaagaaaagaaaagaaaaatgaaaagaagttatagatagtgaagttattatagaggtttaaaatttttaaaattgtttttgttttttattttgttatttttttaatatagttatttttttagggtttttttattttttaagtgtttaagatttgattgatttaatatttttgttttagagaatataatttgttttaataaaatgaatttttattaggtaatttatgatttaatatatttttttaggtaagaatttgtagaaagattagattaattaatgatggagtatagggtatttgtttgtgggtt

SEQ ID NO: 1921 - DNA, 2380 bp, Artificial Sequence
  chemically treated genomic DNA (Homo sapiens)
gtgttgagattgtattattgtattttaggttgggcgatagagtgagatatagttttagaaaaaaaaaattatatatatatagatatatgtgtatatatatatatatatatatatatatatatatatatattttattgatagtggtattattagaattgtatatttttaagatttttgtagtagggtatggaagatagaatggagggagattgtattgaggtaaaatatataagtggtaagaaattatgagtatcggaattaaataagttagaaaagaatagtaaatgtttaataaataggtatgaattgtttgatattttatgaagtttgtataaattattttttttagagtaaaggttggttgtgaagataaaatgaaataataaaaatataagatgataaaaaaatttagagaaatttatagtggtatttaaataagatttggtttttttttgagttttagtgatttattattttgagttttaatggtgattaataagagtatttagttaaggagtgagtattatttttgtagataattattattataagttttcgagatatttttggatattcgttgttattattggtattgaattttaggaaatttcgggaataataattgtttaattataaattttagaaaataatgtggaagtttattagatttttgaataaagtattttttttttttttttatagtatataggtattttaaattaggaatattcgtttttatttttgttagtaaattttttgttaaatttattatttaattgaaaattttagaaaggagtaataaagaaattatggtagaggtttatattattaaaaagaaaaggtagttagtaaaaattattttttatgtagaagttaaaaaaaaaaaaaaattatttttaatgagatttgtattttaaagaaaataagaatcgatattatgatttatatattggttggtattttttatttaaagatgtatagatttgaaaaatttatatgttatattttattttattatttgttttttatagttttgtaaattagtaaatttttataagatatataggttgagagcgtgaagttagttagaaaagttacgtggaaatgtatatttattttagagtagtcggatttatatttaatatggtaaattaaaacgatgtaggtatttattttttttttttggagtttttaggtttttaaaatttaatattttattgttgatttgtttaaaatttttttaggtgaggtgaatttcgagggtattttatttaattatatagttagaggagggtggggttttataagattagattttaaatgttggggtttttgcgggtttttaggttgtcgggagtagaggtgaattgttttttgttttttgttgtaggaagaagacgggagatattgattgattggaggtggggggcgggggtttgggggagggaagtaatatggggattgtaataaataagagattttttttatatgattttttatatttggtgtttgatgtttttttttaggttttttagaggaaataggaaatttgttttttggttattggaaagaagagaataaatatattgagaattgtgaaaagaagtagtaggattttaggtaaggagttgatgggttagttaattttattttttattaagtgttttttttttgaagtttttttaagtgtttaattttgtaaaagttaagaatgtttttatttttttttattgagttggagtatattttggttttagtttagatgttatattatagagtagttgatgataggtaggttagaataggttttggaagaatttatttttagttttaggtaagattttttaagttttgtttttggaaagtttgattttttttaattttggattgattttaaagtttttaggttattttgttttagagtttaaagaattattaggaggttattattcgtggagtgaagtaggattttttatattatttatggggttttatgtaaaatgaaaatgtgatgttatttatttgaaaattaagaattttaagatggtgataatagaatattaaagtaagtgtggggattttttggagtatagggttttatgtaattgtattaggtcgtagatttattaagttagttttggttgtagaaagaacgtgggaattttgggttatgtggatttttataagttgagttgttgagagatttggattatttttattgtgtttagtagggtgatagttagttttttaatagtagtatatttggaagttgttgtaaggtagtagagggggaggagggtggatgttgggttgcgggtgtgagtaggtaaagattataaatatattattgagtaaaaattatatagtggtttttttgttt

SEQ ID NO: 1922 - DNA, 2380 bp, Artificial Sequence
  chemically treated genomic DNA (Homo sapiens)
gggtaaggagattattgtgtgatttttatttagtgatgtgtttgtggtttttgtttgtttatattcgtaatttagtatttatttttttttttttttgttgttttgtagtagtttttaagtgtgttgttgttggaggattgattgttattttgttgaatataatggaggtagtttaggttttttaataatttagtttgtgaaaatttatatggtttagagtttttacgttttttttatagttaggattggtttggtgagtttacggtttggtatagttgtatagagttttgtgttttagagagtttttatatttgttttaatgttttattgttattattttgaaatttttaatttttaaatgagtggtattatatttttattttatatgaaattttataaataatgtagagggttttattttattttacggatggtggttttttgataattttttaaattttaaggtaaaatggtttgagggttttggagttagtttaagattaagaaagattagattttttaaagatagagtttagggggttttgtttgaggttgggaatggatttttttagggtttgttttaatttgtttgttattagttgttttgtaatatgatatttggattggggttagaatatgttttagtttagtggaagaagatgaggatatttttgatttttatagagttaaatatttagaggaattttaggaagaaagtatttggtaaaaggtaaagttggttggtttattagttttttgtttggggttttgttgtttttttttatagtttttagtatgtttatttttttttttttagtggttagaggataagttttttgttttttttagggagtttggagagaggtattaggtattaaatataggaaattatgtggagaggattttttatttattatagtttttatattattttttttttttaagttttcgttttttatttttagttagttagtgtttttcgttttttttttgtagtagagaatagaaggtagtttatttttgttttcgatagtttgggaattcgtaagagttttagtatttgaagtttggttttgtgaaattttatttttttttggttgtgtgattgaatgggatgttttcgaggtttattttatttgagagggttttgggtagattagtagtaaggtgttaaattttagaagtttgaaaattttagaagagaaaggtaggtatttgtatcgttttgatttgttatgttaaatgtgaattcggttgttttggaatagatgtgtatttttacgtggtttttttagttggttttacgtttttaatttgtgtgttttgtggagatttattgatttataagattgtgaggggtaaatagtgagatgggatatgatatatggattttttaaatttgtatatttttggataaagaatgttagttagtatatagattatggtgtcgatttttattttttttggagtgtaaattttattagaagtagtttttttttttttttggtttttgtataaggggtaatttttattaattgttttttttttttaatagtatagatttttattatgatttttttattatttttttttgaggtttttagttaaatagtagatttgatagagaatttgttaatagaaataggaacgggtgtttttaatttagagtgtttatgtgttataagaaaaaaaaaagagtattttgtttagggatttggtggatttttatattattttttagaatttgtggttaaatagttgttattttcgaggttttttgaaatttaatattagtagtgataacgaatatttagggatgtttcggaggtttgtggtggtggttgtttgtagggatggtgtttattttttagttgggtgtttttgttggttattattgaggtttaagatgataggttattgagatttagagaggagttaggttttatttaagtattattataaatttttttggatttttttgttattttatgtttttattgttttattttgtttttataattagtttttattttaagagaaataatttatatagattttatggaatattaaataatttatatttatttattgaatatttattatttttttttagtttatttagtttcgatgtttataattttttattatttatgtattttattttaatatagtttttttttattttattttttatattttgttataggggttttgggaatatgtaattttaataatgttattgttagtgagatatatatatatatatatatatatatatatatatatatatatatatatttatatatatataattttttttttttgagattgtgttttattttgtcgtttagtttggagtatagtggtgtaattttagtat

SEQ ID NO: 1923 - DNA, 2378 bp, Artificial Sequence
  chemically treated genomic DNA (Homo sapiens)
tttaagaataaaacgtttttttttttttttaatatagaatattttttttatgagttttttaaaagtacgttaagtaaattaaaataaaaggaggtgggtaatgtatttgaagaaatttagttaatttaatttttgtaattttagaagtatgttttatttattttttggaattaattgtggttttattataaattgaattagatatatttgttttaatgttattttaattttgtaggtagattgtaatttagggttggtttagtttatttattttttagtttattaatttattgtttttgttgttttagtcgtgtgggtatttttttagttggaatatatagaggttgtttttttttttaaaagtttaaaagtaataaagtaagaaagagagaaaaagtaagaaagtaagaaattgagaaaaagtaagaaagtaaaaaagtaagaaagggaaagtaagtaaatatagtttttatttttttttttatagaattagagttttttgagagtgtttataggatttatttagaaaggttattttgtaaatgttttattagttacggtataatatagtttttttttagtagaaaagttttgttttttgggagtttgttttttttttagtttaatggattttgttaggggtaggatgtggtttttgttattacgggttataaaatttaggagtaatggttgtagtgatggcggttttttgtcggtttattagtacgggagtttgacggtgaggaggagagaaaggaaaattgggaaaagttttgaatgtttaataattttttagaggtaagatgagggagagagagatttagagttataattgtagaagttttttgtaaaatttaattaaaatttgggtagaaataaatattagaaataagtgttatttattaatttaaatcgttaattaaggtaaatattgttataaatttaggaaaagaaagggaggagaatggaacgaggggtgattattttagatattaagtaaattaaattattttgaaggttttgttagatatatgtattaattattggttattttagttgtatatttgtatggagaggagaatttggcgtttttaaattgattttggttggtaaagtgggaaagtagaaggatagggtggtaggttaaggggaatttaatttagaagtggttacgtggtatttacggttttgtattggttaggtggaagaaggaggaattacgtaagatttaggcgagggcgtataattatttttagttttttagttttgttttttgttttttggagtttatgtagttggataaatttgttgagttgtaacgtgaagtaatttttttcgggagggggaaggttttagggtgaatttaagttaattttagggataatagagtgggaaagtaagttgagtttttaaattttttatgtggttggtttttttttttcgtgagatttagtatttagtaggagggagacggggtagggtggggtggggataaagtgagtcgttgattttgttttttgggttataggttttgtatatttataagtttcgagggtaggttataagttgaaatttttttattttagagagaggaggttggagagtagtttagttatttaggttgggagttatttgtatttgatgagtaattttaagtgggaattattagagtgtgtgtttgtgtgaatgttagagtgtatttagagggaataaatgatttattatcggggttttaataaagttatattcgaaaagggagggagttttttatttttttttttattattaaaattttaaagaggtagaatttatttggttttttaagttaggttggaagggagttatagttaattaagtagttcgtttagtttttttagtttttttttgagtataataatatgtataaattggtaaaagggattatagattgttttgatgttaaataaagaggaaaatttttaaaatacggtaaaaattgtatttttgtttaattttttcgcgttttttttttagtataaatttaagatacgtatagttaggttttagggagaggtatataatgaaaaattattattttagatatttagatttaagtattttgtagtaagagaaaatgtttagtttttttttttgaattattttttttgtttacgtttttttgtttgttttgttgttgttgttgtttttgagatggagttttatttttgttatttaggttggaatgtagcggtatgatttcggtttattgtaatttttatttttcggatttaagtaattattttgttttagtttttcgagtagttgtgattataggtatttgttattaagttcggttatgattaaatattattttattaataataaatattgtgttttgg

SEQ ID NO: 1924 - DNA, 2378 bp, Artificial Sequence
  chemically treated genomic DNA (Homo sapiens)
ttagagtatagtatttgttattagtgaagtaatatttaattatagtcgggtttggtggtaggtgtttgtaattatagttattcgggaggttgaggtaggataattgtttgaattcgggagatggaggttgtagtgagtcgagattatgtcgttgtattttagtttgggtaataagagtgaaattttattttaaaaataataataataataaaataaataaaaaaacgtaagtagagaaagtaatttagaagaggagattggatatttttttttgttataaaatatttggatttaagtatttgaaatgataattttttattatgtatttttttttggagtttagttgtacgtgttttaaatttgtgttgaagaaaggacgcggaagagttaaatagagatataatttttatcgtgttttggaggtttttttttttgtttaatattaaagtagtttgtagttttttttgttagtttatatatattgttgtatttaaagaagggttgaaggagttgagcgggttgtttgattagttgtgatttttttttagtttggtttaagagattaaatggattttatttttttaaggttttaatgataaggaggggaataagaggtttttttttttttcgaatgtaattttgttgaggtttcgataataaattatttgttttttttaaatgtattttggtatttatataggtatatattttgatggtttttatttgaaattgtttattaagtgtaaatagtttttagtttggatggttgagttgttttttagttttttttttttggagtaagaagattttagtttgtgatttgttttcgggatttgtgggtgtataaagtttgtgatttaggaaataaagttaacggtttattttgtttttattttattttatttcgttttttttttattaaatgttgaattttacgagagaagaaaattagttatataaaggatttgaaagtttaatttgtttttttattttgttatttttggagttggtttggatttattttgaagttttttttttttcggggaaagttgttttacgttgtagtttagtaggtttgtttagttatataggttttagaaaataagaagtaagattggaaagttggggatgattgtacgttttcgtttgaattttacgtggttttttttttttttatttggttagtgtagagtcgtgggtgttacgtggttatttttggattgggttttttttggtttgttattttgtttttttgtttttttattttgttagttagagttaatttgaggacgttaagtttttttttttatataggtgtgtagttgggataattaatgattaatgtatgtgtttggtagggtttttagggtaatttgatttgtttgatatttagagtgattatttttcgttttatttttttttttttttttttttgagtttgtggtagtgtttattttagttggcggtttaagttgatgaatgatatttgtttttggtgtttgtttttgtttaagttttaattaaattttgtaagaggtttttgtaattatggttttaggttttttttttttttattttatttttgaaaagttattgagtatttagaattttttttagttttttttttttttttttttatcgttaaattttcgtgttgatgggtcggtaggaggtcgttattattgtagttattatttttgggttttatggttcgtgatggtaaaagttatattttgtttttgatagaatttattaggttgaggagggaatagatttttagaaagtagagtttttttgttggaggagagttgtattatgtcgtagttaatgggatatttgtaaaataatttttttaagtagattttgtaggtatttttaaggggttttgattttataagggaagaggtagaagttgtgtttgtttgtttttttttttttgtttttttgtttttttgtttttttttagttttttgtttttttgtttttttttttttttttgttttgttgtttttaagtttttggaggagaaagtagtttttgtatgttttaattgaaagaatgtttatacggttgagatagtaagagtagtggattaatggattaggaaatagatgaattaaattaattttgggttataatttgtttgtaaagttgagataatattagaataagtgtatttggtttaatttatggtgggattatagttagttttaagaagtaaatggaatatgtttttgaggttgtaaaaattgaattggttaagtttttttaggtatattatttatttttttttgttttggtttgtttaacgtatttttagaaaatttataagaaaggtattttgtattaaaagaggagaaaaacgttttatttttaag

SEQ ID NO: 1925 - DNA, 2469 bp, Artificial Sequence
  chemically treated genomic DNA (Homo sapiens)
ttaatattaggggtattagttagtaaaatttgttgagtttattattgaaaaatttttttatttattattgtggttataatatatagttatttggttaggaaagagtatatattatagggatttgtttattgtacgtgtgtttgagtttttttttattttttgttttttttaagaatttttttttgattggtttaattagaagcgttgattttttttatttgattttttgtaattttataatttatgttttttatttttgtgttatattgtttatttttttttggtttttttgtgtgtatatgtatatgttttggggaatggggtatttatttttgttatttattgtgttatttatttttgtatgtttatagtgtagagtatggtgttttgtatatagagtatgttcggtaaatatgtgtaataaaaagttttttgattatataatggtttgatattggtttttttattttttaaatgagttattttttaattattgatttaaatggagttgatttatttttataaatagtatttttttgatttttattgttataaaatttataataaaattgtttttttatttatttttttttattgtttatattttttttggaaatatttaaatgagggtttgttttagatttttggggaaggaaggtttgtgagtagataatagtagaattaggatgtgtgggattgtttggtggttagtagaataatgtaaattggtttttttgtttaaagttaaatcgtgtgtattttttataagtggatatagtgttttttgtgtttgaattattatagttatgtagtggtttagtgagaattttttgtttcggttattataaaaataaaatagaaatttttttgttgttaggttaggaattagattataattgatgtattagtttattagttaattttttttaagtttaatattagaataggtaaaaaaaaaaagtattagtttttaaaaattattaataatagtggtataattttgtattttattattttttttttaattattttagtgtagtagatgtaagtagagttttatgtaattatttgagataaggatgaagaattgaaagataaataagtgatttattttaatggatttgttttagataggagaaatttgtaattttttttaggcgtgttttatggatttatagtggagtgaattatagatttgtataagttttgaaattgtgggtaattttatagtttttagatcggtttttcgtaataggtagttagtttttattgggttttttggatttttattttaaaaatggagaagatagattatagttattgattagggatcgtgggaggtgttacgtgatggtgaggtattatgttagggagttgagttttgatttttttgttgggtgattttttatttttgggttgttagatttattttttggatgtcgtgagtagatgttttatattagtattatttttttgttgaagaaaggtttgtttttgtatatattttaggagggggaaatgcgtgatatatgatggtattttttggaatgtttgatttttttggaaatttttttaatatgatttagaaattggttagtttaaggttggagtattttttaagttttttttacgtttgtttttttttaagagttgtttgttaggttttaatggtttatttttaggagtgaaaatgtaaagtattttgttaggtaaataaatttattgtttttgtattgtttttttgtttgataaattttaatatttgttttttagattgaatgtaaagttggatgttgttttaaaagtgtttttgattagtttttttttttagtgagtttgaaaaagttattattgtattaatttaaaaaaatatttttttagttattgttaaatacgtttttgtaaaggtatttttttttgttttaagtggttaattttatgttatttgaaggtttatattttttatattttgaagatagttgtgagaggtttaaagtgttgtattattaggtgttgtttatttgtttgtttgtttgttttttagtgttagtatattatgagttttttttatggattagaggtaattgttgggcgtataaatttttttaaaattttataagtattaagatagttggtgagatatttagatgttttttaattttgaaattgttttttaattttgaaattatgtgatttttgaaatttattagaatttgaatttagattttaatttttagaagagatgttgggttataaatagattggttggaagttatttaaagtagttaaagatgagatgtttttgattttaatagtttttttttattttttttttttttaaggttttatgtgaagtattttttttatggtaagggagaattttaagggtaattaaatagattttgttatgagggtaagagatattgggttttaaatatataaataattcgtttatttatttgatgttat

SEQ ID NO: 1926 - DNA, 2469 bp, Artificial Sequence
  chemically treated genomic DNA (Homo sapiens)
ataatattagatggataaacgagttgtttatgtgtttaagatttagtattttttgtttttatagtagaatttatttagttatttttagagtttttttttgttatggaagaaatgttttatatagagttttgggggaaagaaagatagaaaagaattattagaattagaaatattttatttttagttattttagatggtttttagttaatttgtttgtagtttagtattttttttaaaaattggaatttggatttagattttgataggttttaagaattatataattttagagttggaagataattttagagttagaagatatttagatattttattaattattttgatatttataaaattttaaagaaatttatacgtttagtaattgtttttggtttatgaagaaagtttatgatgtgttgatattgaaaaataaataaataaataaataaatagtatttaatgatgtaatattttagattttttataattgtttttagagtataaggaatatagatttttaagtagtatagaattggttatttgaaataagggaagatgtttttgtaaaaacgtgtttggtagtaattggagaaatgtttttttaaattgatataatgatagtttttttaggtttattaaaagaagaaattaattaagaatatttttaaaataatatttagttttatatttagtttaaaagataggtattgaaatttattaagtaaggggataatgtagggatagtgagtttatttgtttgataggatattttgtatttttatttttaggagtgagttattaaagtttgataaataatttttaaagaaaaataaacgtaaaagaggtttaggaaatattttaattttgagttagttaatttttaaattatgttagagaagtttttagaagaattaagtattttagaaaatattattatatattacgtattttttttttttggaatatgtgtaaaaataagtttttttttaataggaaaatggtgttggtgtaggatatttatttacggtatttaggaagtagatttagtagtttagaggtggagaattatttagtaggaaggttagagtttagttttttagtatgatgttttattattacgtggtattttttacggtttttggttagtggttgtgatttgttttttttatttttgaaatgggagtttaaggggtttagtgagaattgattgtttgttgcgagaagtcgatttgagaattgtaaagttatttatagttttaaggtttgtgtaagtttgtgatttattttattatgggtttatgaagtacgtttaagagaaattataggttttttttgtttgaagtaaatttattaaagtgagttatttgtttgttttttagttttttatttttattttagatgattgtatgagattttgtttgtatttgttgtattgggataattggaaggagggtgataaaatgtaaggttatgttattattgttgatgatttttaaaggttgatattttttttttttgtttgttttgatgttgaatttggaggaaattggttgataaattggtgtattaattgtgatttaatttttaatttagtaatagagagatttttgttttatttttgtaatgatcgggataaggagtttttattgagttattatatgattgtggtaatttagatatagaagatattgtgtttatttgtggggaatgtatacggtttgattttggataggggagttagtttgtattgttttgttaattattaaatagttttatatattttagttttattgttgtttatttataggttttttttttttaaagatttaaagtaaatttttatttagatatttttaggagaaatgtggataataaggagaggtaagtgaggaggtagttttgttatgggttttatagtaatgaaggttaaggaggtgttgtttatggaaatgggttagttttatttaggttagtagttaagaaatggtttatttgggaagtggaaaagttaatattaagttattgtgtaattaaaggattttttattgtatatatttatcgaatatattttatgtataaggtattatgttttgtattatgggtatataaaagtgagtaatatagtgagtaataaaagtgaatattttattttttaaaatatatatatatgtatataaaaagattaaaaggaaataaataatataatataaaagtgaaggatatagattataaaattataggaaattaggtggggagaattagcgtttttggttggattaattagggaagaatttttgaagaaggtagaaagtgagggagagtttaggtatacgtgtagtgagtagatttttgtgatgtgtatttttttttggttaggtaattgtgtattatgattatagtaatgaatgaaaggattttttaatggtaagtttaatagattttgttggttgatatttttaatgttga

SEQ ID NO: 1927 - DNA, 2231 bp, Artificial Sequence
  chemically treated genomic DNA (Homo sapiens)
tgataaatggtagtttatttatgattggagaattttaggaggattagtattggttttgtttttataggttgtgaaagtttagtattattttgtttatatatttagatatttaatttatattatttaatttaaattattcgttttattgtttttttgtaaatgaatttgtggataagcgtttttattaatggaaaaataaaaggttaaaatttaatagttttaaagtttatagtatatatgggaaagttatttgaatttttagttggtgatgatagtatttgtttttagaaaattgatataatttattaatgtttagtattgaaatataagagtttattgttgttgttgacgtattgttgttattttgatattttttaaaatgtagaatttgaattattgatgttatgaggtttatttagagagtcgttaaataaaaagttagatgatgtgaggataaagaagtttgagagtttgttggtttgtaggtgattttttgtgttttttttagttagtttttaggtaggagaggttattagagtagttggaatattttttataaaatagttatataatttaaagaagatattattgaggtattatttttaggtttttttttttgaaaaaaattaaattatattttgaattttttaggattgttttttttttttgtagggtttatttttttgaataaaattagtatttgttaatgattagaatgataatgtatgttttatgtttatatttatataattgtgttttttatttaaggttttgtttaatgtaatgatttttggatttgaagtgtattaaatgttaatgttttttttaatttttaatttttttttttataaattttgaagataaatattaatattttggtattatattaaagaaatatttaattattagtattgttattttgtttttattttgtatttttaatttttaattttaaaaaataggtgaatattttttatgttggtttttatgtttatataggttattgttttgttatggaggaatttaaaggttattattggttatttatttaattttttgaatacgtttttttttgtttagataagtttggtttttttgtttttcggatatggtaatatttttattgatttttgttagtaaagttatatgttattagtttttttagggttatacgtgtagtacggtagtttttaggtattatattgattgtaaagaagggtaggaatttttgtgtatgtttgtattatttatttttggggaataaagataatataagtggatgatttagaaaggtagtgttttttttttagttatatgttaattaagtttttttatagaaaaattgaagagtttagaagttagtgggtagtattagagtaaagtattttgtatgtggatgaatttagtttatttttggaatatgcgtttggaatttcgaaattttttaattattttgattgattattgttggaatggggagaggaggtaaagaggaaatgaagataagatttagattgggatagtttgttgatggaaattgttagggtgtagattttttttaaatgtttaatagaaattttagagattagataattgtagggatttatggaatagtaagttaaatttatttttttatttattttatttttaattagagtttttttgggggaaatttagaaatggaaattgtttaagtataaatattttgtatattataaatattgttgggtttgatattttgtagggagtaaagaaggggattgtagagatgtatggatttgagtttgaaatgtggttttatttttttttggttgtgagaatttggaaaattcgttgatttattaaattttatttaattttttataagatgtgaattataatttgttttgtagagttatgtgaatttaaaattagattttatttgtaaagtttttaaagtagtatttggttaatgtattttaggttaggatattgttggtattttgtttttaagatgtatgttattgattttttttttataagaatttttagtatgaaatttattttagtgtattatagttttatttttaaaggaaatttaatttagaaattaaggtaaattttaaaagttattaattaatttttttagttttaatattatttataggaaaataggaaaagaaaatttgtagaaggaaatagtgtaaatggagaaataaattggggtgagagaggagagaataaggaagggt

SEQ ID NO: 1928 - DNA, 2231 bp, Artificial Sequence
  chemically treated genomic DNA (Homo sapiens)
atttttttttattttttttttttttattttagtttgtttttttatttgtattatttttttttataagttttttttttttgtttttttataaatgatattagaattgaaaagattagttaataatttttgggatttgttttgatttttaggttaagttttttttgaaaataaaattgtaatgtattgaaataaattttatgttaaaaatttttatgggaaaaaaattagtagtatgtattttggaaataaaatattagtagtattttaatttaggatatattggttaagtattgttttaagaattttataggtaaaatttgattttgagtttatataattttgtaaagtagattataatttatattttatagaagattaaatggaatttggtaaattaacgaattttttaagtttttatagttaggaagagatggagttatattttaaatttaagtttatatatttttatagtttttttttttgttttttataaagtgttaaatttagtaatatttatagtatgtaaagtatttatgtttaggtagtttttatttttgaattttttttaggaaaattttaattgggagtgaggtgggtagagaaatggatttgatttgttattttatgaatttttgtaattatttagtttttgaggtttttgttaaatatttagagaaaatttatattttgatagtttttattagtagattattttaatttggattttgtttttattttttttttgttttttttttttattttagtaataattagttaaaatagttaaaaagtttcggaattttagacgtatgttttaagggtaggttaggtttatttatatataaggtattttgttttggtgttatttattggtttttaaattttttagtttttttgtgaaagggtttgattagtatgtggttgggaggaaaatattgtttttttgagttatttatttatgttatttttattttttaggagtgaatgatataggtatatatagagatttttgtttttttttgtaattaatataatgtttaagaattatcgtgttgtacgtataattttgggaaggttgataatatgtagttttgttggtaagagttagtgaaaatattattatattcgagaagtagaaaagttaggtttgtttggataaggaagaacgtatttagaaggttggatagatggttagtagtagtttttgggtttttttatggtaagataatgatttatatgaatataagaattagtatgagaaatatttatttattttttaaagttagagattagagatgtaggatgaaagtaaaatgataatgttggtaattaggtatttttttaatgtaatattaaaatattagtgtttatttttagaatttgtaaaaaaaaaaattagaagttagaaaaaatattaatatttaatatattttaaatttaaaaattattatattggataaaattttaagtaaaaaatatagttatgtaagtataaatatgaaatatatattattattttaattattagtagatattagttttatttaaagaaataaattttatagagaaggaaaataattttgaaaaatttaaaatgtaatttgattttttttaaaggggaaagtttagaaatgatgttttaatagtgttttttttgagttgtgtggttattttatagaaaatgttttagttgttttgatagttttttttgtttggaagttaattaagggggatataggaagttatttgtaaattaataaatttttagatttttttatttttatattatttgattttttgtttgacgattttttaagtaagttttatgatattaatgatttagattttatattttaaaggatattaaagtaatagtaatacgttaataataataataaatttttgtattttagtattgagtattagtgagttatattagttttttgggaataagtattgttattattaattgaaaatttaaataatttttttatgtatattgtgaattttaaaattgttaggttttagttttttatttttttattggtagaagcgtttatttatagatttatttgtagaaaaataataaaacggataatttaaattaaatggtataaattaaatgtttaaatatatggatagagtggtgttgggtttttatagtttatgaggatagagttagtgttggtttttttagggttttttagttatagataaattattatttgtta

SEQ ID NO: 1929 - DNA, 2334 bp, Artificial Sequence
  chemically treated genomic DNA (Homo sapiens)
ttagattttgggaataaaattaataattttttaaatatttttaaaatatagttttgatttttattttattaaaaattttgatttaatttgaggagattttgttttattttttaaattaaatgtttttattttttttgtatcgtgaatgttttgaatcgattagtaagataagaataatattaaaattaatagtgagggtagttttagtattattttgtttttttttaagattttttttggttattttgtttttttttttttgttagattttgagtttttttttttaaaatatggtttgagtatttttttgaagaagttttttttatgttttttattttgttttaattattttatggttagcgtaagtagtatagattttatttgtattttagttatatgtgtttttgttgtttttttttgtttttttattagtttataagttttattgtataaggtttatatatttatatttattgtagtatttataattatgttgtataatattttgtatatagagggaatttaataatttttgtagtttgatttttgggtttttattttggtttttgggtaattatttattagtaaataaattagttattagtgaaatagttatggtttttagagttaattatttgtatttttattgttggaaaaaataatatatattattttttttgtagagaggtatgcggttagaacgttattggtagatttcgtttgagagttttgacgtttgtaattttgttttggaaaggtgaattaatttttattttgatttatgtgtttttttaggtttttttagtttaaatgtataaaagttagagaaagttattattataatattgataataataatgataaagatatatatatatagttagtggttgaatatttattagtaagattgttggaaattaagtcgtattatatttgtcggagtatttaggattatttatttagtgtaggtttagtagttatgtttatttttgtttattttaggtatggtttttttaggtgttagggttattttttttttttttagtggttgttttttttgttggtacgtagtatttgttttttagttttaagtttgtggggtagttaggagagttttgtttttggttttcgttggttttatattttttggcgagtggttttgtacggtagtttagttttggggaattttttaagggagagggtttttttttttttttaatttttttatttttatttaattttattttatattggttttttattatcgttagttgttgttttgttaggtattgtggaatatttatatttttttttattatagggtttggatatataggcgttggagttagatacgttgtgttttaatttttaattttttatattaattgttttttttttttgaattttaattttgttatttataaaatagagatagtataataatatttgttttatggtggtgttgttagaattaagtagtaacgttattcgtaatgataatagttgtattgattaagggatttgtacgtgttgggtgttatgtagtgttttgtatttttttttggagtttagtatggcgtttagtttagaataagtagtttgtagttttttttttttttttttttttttttttttttttttttttttattttttaaattaaataggatttgggggtgtagtatttggttttttatgggggtttttttttttttgtagtattttttttttttttataggttatttgagagaatttagatttttatttttagatttttcgtttattagaaataggagtttttttatttttttgtttaagttttttatttaatagggtagttttatttttgtttttagttaggtttttaagttttatttttatgttggggttttgtatttggtgttttgttgttttagggaatatagatggttaatagttagagataaggttagttttgtgtttttttggattatagaatgtgtttttaagagttttttttttttattttagtatataggtaggttatttgtattaggaatgttgtaaaatattgattggatatagataattaatgtttaagtataatggtttttaacggagtaggagaaggttaggaattagtagggtatagttatttttttattttgggggaggtagttaagaggaagggtttttggggaaagagggagttgtatttcgtattaggggagggggtgagtggaatattaagatttattggattttaggggttattttattgtgggttagtttttgaagaatttttagtagattttgttatatttggttttggttttggtgtatatgtttttattgt

SEQ ID NO: 1930 - DNA, 2334 bp, Artificial Sequence
  chemically treated genomic DNA (Homo sapiens)
gtaatggaggtatgtgtattagagttagggttaagtgtggtaaaatttattaaaggttttttagaggttagtttataataggatggtttttgaagtttagtaaattttggtgttttatttatttttttttttgatgcgaggtgtagttttttttttttttaggggtttttttttttgattgttttttttaggatagggggatggttatgttttgttggtttttgatttttttttgtttcgttggagattattatgtttaagtattgattatttgtgtttagttagtgttttgtagtatttttggtgtaaatggtttgtttgtgtgttgaagtggaaggaaagggtttttaggggtatattttgtggtttaggaggatatagagttgattttatttttagttattggttatttgtgttttttggagtaatagaatattaggtgtagagttttaatatggggatggagtttggaaatttggttggaaatagaaatggagttattttgttaggtgggggatttgggtaggagagtgaaaaggtttttgtttttagtgggcggagagtttgggggtaggggtttgggtttttttagatggtttgtagaagaagggaagatgttgtagagaggaaaaagtttttataagggattagatgttgtatttttaggttttatttgatttagggaatgaaggagggaggagaaaagaaagaagaagagggggaaggaagttgtagattatttgttttgggttagacgttatgttgggttttaagaagaggtataaaatattgtatggtatttagtacgtataagttttttggttagtatagttgttattattacgagtgacgttattgtttaattttaataatattattataaggtaggtattattatattatttttattttgtggatgataaaattgaggtttagaaaagagaagtaattggtgtagggggttgaaaattgaaatatagcgtatttgattttaacgtttgtgtgtttaagttttgtgatagggaaagatgtaggtgttttatagtatttggtaaggtaataattggcgatggtaaagggttagtatggagtggggttgggtgagggtaggggagttagggagggaaagaagtttttttttttgaaaagttttttagggttgggttgtcgtgtaaagttattcgttaggaagtatgggattaacggaggttagaggtaagatttttttggttgttttataggtttagagttgggaggtaggtgttgcgtgttagtaggaagagtagttattagaagagagagaagtagttttggtatttgggggagttatatttgggatggataaaggtaggtatggttgttgagtttgtattgagtagatggttttggatgtttcggtaggtgtggtgcggtttggtttttagtaattttgttggtgggtgtttagttattgattgtatgtgtatatttttgttattgttgttattagtattatggtgatgattttttttgatttttatgtatttaggttaaaggaatttggaaaaatatatgaattaaaataaaagttgatttatttttttagggtagagttataagcgttaaaatttttaggcgagatttgttagtgacgttttgatcgtatgtttttttgtaaggaaagtggtatgtgttgttttttttagtagtggaaatataaatgattaattttggaaattatggttgttttattgataattaatttgtttgttgataaatgattatttaggagttagaatagagatttaaaagttaaattgtaaaaattattaagttttttttgtatgtagaatattgtgtaatatggttatgggtattatagtggatgtgagtgtgtagattttgtataatagagtttataggttaatgagaagataggaagaaataataggaatatatatagttggaatgtagatgggatttgtgttatttacgttagttatgggatgattagaataagataagagatatgaggaagatttttttaaggaggtgtttaagttatgttttggaaaagagaatttaaggtttggtagggagaaaggagtaaggtaattaggggaagttttggaggagagtaagatgatgttgaaattgtttttattgttggttttaatgttgtttttgttttattggtcgatttagagtatttacggtgtaagagagatagggatatttgatttaagaaatagagtagaatttttttaaattaaattagaatttttgatggagtagaggttagagttatgttttggaagtgtttgggaaattgttagttttgtttttaggatttga

SEQ ID NO: 1931 - DNA, 2500 bp, Artificial Sequence
  chemically treated genomic DNA (Homo sapiens)
tattaagtaatataaaaaatgttttatataaatattatattttttagatagtttaatatattaagaatttttttgtagttatttttatgtttttattttagatattttattttgttttaaaaaaaaaaaagtggagaaaaaaagtagttatattttttattttttaaaaatggtttttttggttgaaaagaaagaaaaatagtatataataaatattttgattttgaagtgtttggattatttttttaagtattgtagtgtttgagattagtaaaaaattatttttttagaaagttattgattgtttaatttttatgagtatcgttatggaatttagagataatacgaggagatatttttcgtttacgattatagatagtggaaagaattttgatttaagtattttaatttagtaaaatagtttagtagtttgtattttggttttatttatcgtttttgtttagttagtaattaatttggagaggattttttatgttttgggaggagtacgtggaagttggtttaagttatagtgttttatttgggaaggaggtgattttgagtttgggaaaattgtcgttaatattttatagttattagttttttttttaaaaaacgaattaaaattagaaattagtagtaaatattatttttatttatgttttataaattaggaaaaattagtataaagatatgtgaaatattttatttgggatatttgaaataaaattaaatgggaaaaaaaatatttttatatgtttataatatattaattttaataattaaattttaggtaaatatttttattttaagatatagtataatttttttaaaattaaaaagtaaaataaagtaaaattatcgtgaagggaaaaaataattaatcggttatttgagtttatatttggaaaaaaataattttttaggtatttaaatgtagagttaaagagtaatgaatatgtatatagtttaaatttataaattatataatttaatgttatatttttttttttgagatttggttaataaattaaatgttgtattttgtatatgaggaattaaagtttatttattggatttagtggttttagtgtaggatatttttgtgcgttgttatagaggtaggtatgtaatttagaaaaaattgaaataggtaatttgttatgttgatagttataagagaaagatttcgtgttaacggtacgtttttaattgtgtattttttttatttatagtttgtttattagagttttgagtaggttgtttattaggtcgggagtgttgatttagaagatagatgatttttagtatatgtaaatcgagtattgtaaaagttattttttattcgtgttagtagtttatagttagtttttagtagttttgcgttttagttgtaaatattttattagattaatgtatttagtataggtagaaaattcgatttattatagttatagtaatgaatttttattacgatgatagttttaattatattatgttcggaaaattagttaattattggtttttaaagaatatatatattttatatgtagaaaacgaggtttttgtgtgtgtgtgtgtgtgtgtgtgtgtgtgtgtgtgtgtgtgtgtgtgtgtgtgttttgtgtttttttttttttagtagtttaagagaaatgtgtagtgtagttttttgtcgatatgagttgtaaggtaatgatatttttgtttttttggtagttatatttttgtaataatttgaattatgttataatggttagaatgggtgtttttaatattttagtttttattattttttttttgttgttatagaaattagattgtaatatcgtttttttgttttaattttgtagtagtgtgggttaatattaggtttataagatattggtgatttgatagagtgaatgtttgattttggataaataaaataaaaagaaatattataatagtattattgtttaggagattttgtgtgatttttagagtagtgtgtttatttaggtgtgtgtatatattatggttgtatatattaaattagcggttgtttataatatatgtgtatagtttattaaagtcggttttgattttggttttaggtttgtatgtgtgtgtgtgtaagtatttttatttattttaacgtggtgggatttgtataggatagaaatagggtaagagtgattatttatttttatgttttattgtattttttgtagtaaattaatatatatcggcgaagggattttttttttttttttttttttgtaaagtggagtagggttttttattgtttattttatttattttgggatattggtatatttataggtattttttataagatgaaatatttattttataaatatgtggtttatttttagggatgagtagtaaataaatttagtcgggattaaatattaattagggttaacgaaggtttaggttataatttggttagttattgagagtgaaaaaaattgtaatggataatttgaggtttttt

SEQ ID NO: 1932 - DNA, 2500 bp, Artificial Sequence
  chemically treated genomic DNA (Homo sapiens)
gagaaattttaagttgtttattgtagttttttttatttttagtaattggttaggttgtggtttaagttttcgttagttttggttgatatttagtttcggttaaatttgtttgttgtttatttttaggagtaagttatatgtttgtagaatggatgttttattttgtaggaaatatttgtgaatatgttaatattttagagtggatgaaatgggtaatggggagttttgttttattttataaaaagaaaggaaaagaaaagattttttcgtcgatatatattgatttgttgtagaaaatgtaatggggtatgggaatgaatagttatttttgttttgtttttattttgtgtaggttttattacgttgaggtgggtagagatgtttatatatatatatatataggtttggagttaaagttagggtcggttttaatgaattgtatatatatgttgtgggtagtcgttgatttaatatgtataattatggtgtgtgtatatatttggataggtatattgttttgggaattatatagggttttttgaataatgatgttattgtaatatttttttttgttttatttgtttaaagttaaatatttattttgttagattattagtgttttataagtttggtgttggtttatattgttgtaggattgggataaagagacgatgttatagtttggtttttatggtaatagaggaggggtaatgaaaattgaaatgttggaaatatttattttaattattgtgatataatttaggttattataaggatgtaattattaaagaagtagaagtgttattattttgtagtttatgtcgataaaaagttatattgtatattttttttaggttgttaagaggaaggaaatataaaatatatatatatatatatatatatatatatatatatatatatatatatatatatagaggtttcgttttttgtatgtaaaatgtgtgtgttttttaaaagttagtggttggttggtttttcggatatgatgtggttgaagttgttatcgtaatggaaatttattgttgtagttatggtaaatcgagttttttgtttgtgttgaatgtattagtttaatgagatgtttgtagttggagcgtagggttgttggagattaattgtgagttattaatacgggtggaagatagtttttgtaatattcggtttgtatgtgttgaaagttatttgttttttgagttaatattttcgatttggtaaataatttgtttagggttttggtgaataagttgtaggtaagggagatgtataattggaggcgtgtcgttgatacgggattttttttttgtaattgttagtatgataggttatttgttttagttttttttgggttgtatgtttatttttatggtaacgtataagagtgttttgtattaaaattattgagtttagtaggtaaattttagttttttatatgtaaagtatagtatttaatttattaattagattttagaggggaaaatgtaatattgaattatatagtttataaatttgggttatatatatgtttattattttttaattttgtatttaaatatttagaaagttatttttttttaaatgtgaatttaagtaatcggttagttattttttttttttacgataattttgttttgttttgttttttaattttaaaaaaattgtattatgttttgggataaaaatatttatttaaaatttggttattaaaattggtatgttatgaatatgtaaaagtgtttttttttttatttaattttattttaaatattttaggtagaatattttatatgtttttgtgttggttttttttaatttatgaggtataaataagaataatatttattgttagtttttggttttaattcgttttttgggaaaaaaattggtgattatggagtattagcggtagtttttttaagtttaaaattattttttttttaggtggagtattgtgatttgaattagtttttacgtgttttttttaaagtatgaggggttttttttaggttgattgttggttggataggagcggtggatgaggttagggtgtaggttgttgagttgttttgttgagttgaggtgtttgagttaaagttttttttattatttgtgatcgtgaacgagaggtgttttttcgtgttgtttttagattttatgacggtatttatgagggttagataattagtggttttttgagaaagtggttttttattgattttagatattatagtatttgagaaagtaatttaggtattttagaattagggtatttgttatatgttgtttttttttttttttaattagaggaattatttttgaagaatgagggatatagttgttttttttttttatttttttttttttaaagtaaaatagaatatttggagtgaaagtataaaaataattataaaggaatttttagtgtgttaaattatttggggggtataatatttgtgtggagtattttttgtgttgtttggta

SEQ ID NO: 1933 - DNA, 2442 bp, Artificial Sequence
  chemically treated genomic DNA (Homo sapiens)
tgttttttttttttataattttaattatttaatttatatttatttttattgagttaatgaaagtaatgttattgttggtgagagtatatttaaggaaaaatatttttttttattttatataattatattttatttttttaaatttatattgatatatagttgaaaagttggttattattttttttttttgttatttattaatggtgaagtattgtgtttttttttgtaggtgttttaagattaggatgatatggtttttttagagtgtttttaggagggttatggtgtataattttataattttagaataaggaaataaaatatttaaaataaagatgtgaagaatatttttatagatggtatttataatttttgttataaatttaaattttgatttaattgtttagtattgtttttaataatttattgtatttatttgattttagcgttaagattatattgtttttttgaggttagattgtattttaacgttttgatattttttttaaatattaataaaaaagtggattttttgaagtttagtaattattagttggttaatttgtttggaaaattgtaatttttttttaagatttttaattttttatttaggattttaatttattttttaaaagattatttttataagtagtgttttatatggtaagtattaattacgtggatttgggggtaatagttttgtttttttattttttttttaaattttggaagttaatagatgatataaagtttagtagagttaatgattttaattttaattgttattatagtttttaataattgtatatttaaaatattaattagaaattaagagttttaatttgatttcgtaaaaagtagattgagaaatgattttaggtttttattatgatttaatgggttttatgtatttagaatgattttttttttaaggtaggtaaagagttttaatagattaaatatagagaagtatgttgaaagttatggtaggtcggcgttaagtaataaaattgaatttttagtttgttcggtattagttatgtgttttttagatgtcggaagaggagcgaaggaggattagaaatttttttattttaacgatggtttttttttttgtgttttattttattttttcgtttttagttatttttagtttttaattcgggttttatatttattttggttttagagtatagatttttttgtagttgggtcggcgcgttgcggcgttgaggagttgcggcgcgttttttttatcgcgattgtttatttgttaggcgttacgtgtgggcgacgttattgggttttatgtttttatcgtcgttatttgtttacgtgagttgttttttttttatcgttttcgttttttttattacggagaaaattttgtacgtttttttttgtgaaaagtagagtttttttttttttattattattagttgatgaggaaagaaaatgtttgttcgtatatttgcgtcgtattaggaggaggagggaggttatataaggattcgggttgtttagggggtggtttgaaaaaggaggcgttcgtatttaaataagaatgtttgaattaatgtagtttaatttaaagagttaattaggagtttataggtgtttaagtttgtagtgcgttgttagtgttatgttaacgacgtattttagttatataggttgttagttttaggtttttttataaatattttatgtttttgtttttttttttcgttggtaatagttttatggtgagaaaatttacgaagagtaataggaataatttttatgaaaatacgtagaatttttgatttaaggttattggttgtaagtttagtatacgtattaagtatgggttaaagatatgtttttttttttagaaggcggatgagtaataggtgtatttttttttatttatagttgtttttaaagcgaaaaggagtgaattcgtttatgatttagaggaagagagatgggttaaaagatgttaagttaaggattaatattcgttatattttggttttttgtaagttatgtaataagaggtttgagattttattaattttggagatttatttgggtataattgaaattataataaatttggtgtttagtgttatttttttttggtagtgttataaggtaattttaagggattagtatatagatattgttttagtttttttttgttgtttattttagtttatgtagtattgattaaaaattttggaatttagattgtttaacgtttatatttatatttaatattaaaatttattattgatagtttgtttttttaaatatttatgaaatttagtttttaatttgttttttatttttatatttatgtttttattatattttgtttaagttattaattggatattttaaatatttatatgtataaaatttttgtttatttatttgttttttttttttagtgtcgaa

SEQ ID NO: 1934 - DNA, 2442 bp, Artificial Sequence
  chemically treated genomic DNA (Homo sapiens)
ttcggtattagaaagaaagaataaataggtaggtagagattttgtgtatataggtatttgaaatgtttaattaataatttaagtaagatatggtgaaaatatgaatatagaagtgagggatagattgaggattagattttataaatatttagaaaggtaaattgttagtaatgaattttgatattggatgtagatataagcgttaagtagtttaaattttaaaatttttagttagtgttgtatgaattgaaataagtagtaaaagaaaattaaaataatgtttgtgtgttgattttttgaaattattttgtaatattgttaaaggaaaatggtattgagtattaagtttgttatagttttagttgtgtttaagtgagtttttagagttggtgaaattttaagttttttattgtatggtttatagagaattaaggtatgacggatattaatttttggtttgatattttttgatttatttttttttttttaggttataagcgaatttattttttttcgttttgaaaataattgtgaatagaagaaaatgtatttattatttattcgttttttgagagagaaaatatgtttttaatttatgtttgatacgtatgttaaatttgtagttagtagttttgggttaggagttttgcgtatttttataagagttgtttttgttatttttcgtgaatttttttattataaaattgttgttaacggggaagagggataagaatatgaagtgtttatgagggagtttgaaattgataatttgtgtaattggagtgcgtcgttggtatgatattggtagcgtattgtaaatttaagtatttgtggatttttaattagttttttaaattgaattatattaatttaggtatttttgtttgaatgcgaacgtttttttttttaagttattttttgggtaattcgaatttttatatgattttttttttttttttagtacggcgtaggtatgcgaatagatattttttttttttattaattggtggtaatgagaaaaagagaattttgttttttataagggaaaacgtgtaagatttttttcgtagtaggggaggcgggggcgatgggaggagagtagtttacgtaggtagatagcggcgatgaaagtataaagtttagtgacgtcgtttatacgtggcgtttggtaagtgaataatcgcggtgagaggggcgcgtcgtagttttttaacgtcgtaacgcgtcggtttaattgtaggaaggtttgtgttttggagttagggtaaatgtaagattcggattggagattagaaatggttagggacggggaggtggggtgaagtataggggagagaattatcgttgaggtgagggggtttttgattttttttcgtttttttttcggtatttggagggtatatagttaatgtcgggtagattgagagtttaattttgttgtttagcgtcgatttattataatttttaatatgtttttttatgtttagtttattgaaattttttatttattttaaaagagaaattattttaagtatataagatttattgaattatagtagaagtttgaagttattttttaatttgttttttacgaagttaaattaagatttttagtttttaattgatgttttgaatgtatagttattagaaattgtaataataattagagttggggttattgattttgttggattttatattatttattggtttttagaatttaaaaaaaaaatgaagagataaagttgttatttttaaatttacgtagttaatatttattatgtgggatattgtttatggaaatgattttttaaagaatgggttgaagttttagataaggggttgggagttttgaaaaaaggttgtaattttttaagtaagttagttaattagtagttattgaattttaagaagtttatttttttgttagtgtttgaaggaaatattagggcgttgaaatataatttgattttagaaggataatatggttttaacgttgaaattaaataaatatagtaaattattagaaataatattaaataattgagttaaaatttaagtttgtgataaagattatagatattatttataagggtattttttatatttttattttaaatattttgtttttttgttttagggttataaaattatatattatggtttttttaaagatattttaggaaaattatgttattttgattttaaaatatttgtaagaaagagtatagtattttattattagtaagtagtaaagaaaaaaaatggtagttaattttttaattatatattaatatgggtttaaaggaataaaatgtaattatatggaatagaaaaaaatatttttttttgaatatatttttattaatagtgatattgtttttattgatttaatgaagatgagtataggttagatggttgaggttatgagagagaagagta

SEQ ID NO: 1935 - DNA, 2386 bp, Artificial Sequence
  chemically treated genomic DNA (Homo sapiens)
ataatttaattattttttagtaatttgagtattgtgttttattaaaaaatattttaaaaaatgagttatttgtagaatttataaaggacgtttttttaaaaaatgaatatattttaaattgtttatataaatagtttttaatatatatattagaattagtaagttaaggttatttttgtaatagtttatttttgataaaattatttgtgaaataaaaaaaagaaaaagaaaaaattttatttgttgagtttttgtaaaagatattgtttaatttgttagattgattttttaattaaaatttaaaataatggaataaaaatttaatagtttaaaggttaaagttagttaatgtatatttttaaatttgtaattgatttatttataagtaaaaatatttataaagtttaattgattttttatttcgtatattgagaaatagtattttgtattttttgaataatttataagtttgaattttaaggtatatatatatatgtgtgtgtgtgtatatatgtgtgtgtgtgtgtgtgtgtatatatttatatatatgttgtatttatgtttaattattttggttataaaggttaaaaggataaagtggttataagttataatgggttggagaatttggatggaatgtggatttaaattattgtgttacgttaatttgttgaaattttattgttaaaattttgtattgttaggtagtaaaatagaagaaaaaaaaataaattgagaaagtgttaatttttaagtaagtttgataaagattgagttttatatgataaatattgttagtaagataggattttgttagtggaagaagtttaaatattaataatttttgttaggttgttgatataattatggtagatattttttaagatgtcgagatgattgttggtatttgttaataattttgttatagtgatagtaataaggttatgtttggaaatgtgatagttttggttttgtgtttttttgagtaatagtttaggtgtttagagaaagtgtgggaaaatttatatttttgtattgttattcgaatatagaaaatataggaggaaaatgagttgttattttaatttttatgatgttttgttgtttagtataattttatagtgcggttttgggtttattggtttatattttgatagataattaagaaagtagtagttttttttagacggtttttttttatgatttgtattttagttagaggcgattagttataaaaaaaatatgatggaaagatggtaagaagttaattagatggatggatggttgattgatagttttttggtattacgattttagattttagattatatagtttggtagttttttataagaattaatttttttgtaggttggtaaagttgttaaatgtgggattatatatagttttatataatttttgtaaagttgtatattttttttaaataagtatgtattttttttaattagggtttgtattaaataagttttaataatttaattataatttgtattattaaatttagtaatattaaaattttagataatttgtaggtatattagttgtgttagtagagaagtgattaaaaagttgagaagtattttgagttagtagagataaagtgagttaataattataatgtttgtgtaaatatgttttggaattttgaattgtatattgtttgtttttaagtaaataaaaatatagattttaaatttttttttcgtttttagattttgtatatatatatttggttattatttttgtttagggtataatatatgtttgtgtgtttgttattttagttaattttgaaatttttaaaaaataaattgttagtgttaagtttttagtttggttatgatattttatagtttttagttaataggagttaattttttataatattttatagtttggaagttttattaatgttttttgtgtattgtatgtcgtgtgtgtgtgtgttgtgtgtgtgtgtgtatatatatatatatatatttgttatatatatattaatatatattatatattagatatatatatattaatatatatattagatatatataatatatatattgttaaaagtaaataatttgttattagttcggtatgtttttatttgtagtttgaaataagaaattttttttttaaattgtaaagatattttagatttgattttaattttgaaatatgaagggtaggtaattattttattatatattgaagttttagtaaggaatattaatttaaggtagaaacgtgagtatatttttttattgtgggtaatgaattttttataaattgaggataattattaaattaatggtaggtttgaatgtttttagttgtttaaaattaaataatatatattttaaagtttta

SEQ ID NO: 1936 - DNA, 2386 bp, Artificial Sequence
  chemically treated genomic DNA (Homo sapiens)
tggaattttaaaatgtatattgtttagttttaagtaattaaaaatatttagatttattattagtttaatgattatttttagtttgtagaagatttattatttatagtaagaaaatatgtttacgtttttgttttgggttaatattttttattggaattttaatgtatagtgaaataattgtttattttttatattttaagattaaaattaaatttgaggtatttttataatttgaaagaaaaattttttattttaaattataaatgaagatatgtcgaattaatagtaaattgtttgtttttaataatgtgtgtgttgtgtgtgtttgatatatatattaatatgtgtgtatttgatatataatatatattaatatatatatgataagtatatatatatatatatatatatatatatataatatatatatatacggtatgtagtatataggaaatattggtgaagtttttaaattgtaaaatattgtgaagagttgatttttattggttagaagttatagaatattatggttaaattggaagtttgatattaatagtttattttttaaaaattttaaaattagttaaaataatagatatataagtatatattatattttgaatagggataataattaaatatatgtgtgtaagatttaaagacggagaggaaatttagggtttatgtttttatttgtttaaaagtaaataatgtataatttaaagttttaaagtatatttgtatagatattgtaattattagtttattttatttttgttggtttaaagtattttttagttttttaattatttttttattggtatagttaatgtgtttataagttgtttagaattttaatattgttaaatttagtgatgtaagttgtgattaaattgttgaaatttgtttaatgtaaattttgattgaaaagaatatatgtttatttaaggaaaatgtataattttgtaaaaattatatagagttatatatagttttatatttaatagttttattaatttgtaaaaaagttggtttttgtagaaaattgttaggttatgtagtttgaaatttggagtcgtaatattagagagttgttagttagttatttatttatttaattggttttttattatttttttattatgttttttttataattggtcgtttttggttaaaatgtaaattatgaggaagagtcgtttagaaaaagttgttgtttttttaattatttgttagaatatggattagtggatttagggtcgtattgtagagttatgttaagtagtaaggtattatgggaattggagtgatagtttattttttttttgtgttttttgtgttcgaatgataatgtagaaatatgggtttttttatattttttttgaatatttgggttattgtttaggggagtataaagttaaaattgttatatttttagatatggttttattgttgttattatgataggattgttgataaatgttagtagttatttcggtattttgggaaatgtttgttatgattgtgttaatagtttgatagaaattgttaatgtttaaattttttttattgatagaattttgttttgttgataatatttgttatatgaaatttaatttttgttaaatttgtttaaaaattaatatttttttaatttattttttttttttttgttttattgtttagtagtgtaaaattttagtaataagattttaataagttaacgtaatatagtaatttagatttatattttatttaaattttttaatttattataatttgtggttattttgtttttttgatttttgtagttagaataattaggtataaatatagtatatatataaatatatatatatatatatatatatatatatatatatatatatatatatatatgtatgttttaggatttaaatttgtgaattatttaagaggtataaaatattattttttagtgtacgaggtggaaaattaattaaattttgtggatgtttttatttataagtaaattagttgtaaatttgaagatatgtattaattaattttgatttttaagttgttaaatttttattttattattttgaattttgattaaaaaattaatttgataagttaaatagtattttttgtaggaatttagtaagtagagtttttttttttttttttttttattttataagtgattttgttaaaagtggattattatagggatagttttaatttgttaattttgatatatgtgttagaaattatttatgtgagtagtttaaagtatatttattttttaaaggaacgttttttataaattttataggtggtttattttttgaaatattttttaatgagatataatgtttagattattagaaggtagttaaattgt

SEQ ID NO: 1937 - DNA, 2300 bp, Artificial Sequence
  chemically treated genomic DNA (Homo sapiens)
attatcgtttattggatttaaaagttttattttattttttatttttatttttttgggaagttttaggatatatttttttttttttttttaataggtacggatatttttattttatttttatttttttttattttttattatattttaagttttagggtatatgtgtataacgtgtaggtttgttatatatgtatatatgtgttatgttggtgtgttgtatttattagtttattatttatattaggtatattttttaatgttatttttttttattttttttattttatgataggttttggtgtgtgaagttttttattttgtgtttaagtgtttttattgtttaatttttatttacgagtgagaatatgtagtgtttggttttttgtttttgcgatagtttgtttagaatgacggtttttagttttatttatgtttttataaatgatatgaatttatttagatgtatttttatttttttatttattattttgaaatttttaaaatagttatttagtattttttttttaaacgtgtttgttttatttttatttaagtttgttgtaattatatattgaatatttttaaattttgtttaagttgattttattatttttgttttaaattttaattacgttttaaatgtataaaaattatgtattatatataattatgaattataaataattaaatgtatttatttttaaaaatatgattgaagaaatttttttttttcgtaattttttttttaagattaaatgagtttttagtgtttgtttgatatacggtaggtttttaataaatgaagtatattttttatatttttttaaataaatagttgtttttttaaatttagatatgagtgtttagtaggtatgtatttttttgggttggatttattttatggatagttgttaaagattgatttttttatgttaattttttgaatattgtgtttgattgtgttgtaagttaaatagtataggattaaatgtttttatttttgagttgtgaagtgttgaaattgattaagaaatgaaggtagaatgttcgttttttgggagaataattagttagtttatgttgttgttatttttggttgtcgattggaatgtagttgttaaggtagttgtttaattgtttgtttaatttgaaaggatattgttaaatggtaaatattttttataataatattttatttttgttaagaataataatagtgtattttattgagttttaatggcgtgttaaatacgatagatttattattaggtaggtttataatttggattgaatatggatgtttatttttattttttatatatttagaaaaagaataaatgggtttttaaaggaagtttttatataaaatatttttatagtttaattatttgttgaaatgatagtatattaatttgagaaaatgaaatattttaaaaggaaagatgagagtttagaaatattataggaaaaaaataaggtttaagtattttaaatttttttaatgtggtttaagagagatttaatttatatttgtttaggataggtgagggtagtagtaatataaggaaatatattatttgttgaattttttgtaatttatgggttttaggatttttgagttatgtagttaatttatattgttaattagaatgttgatattaagtatttaataaataattatgttgaatttgatagattgtgaattaggtgaggtggggtgggaggttattagttgttatttaatggtaaaatcggtatgttaaatgtaggtagttaaaattaagaaaatatatttaaatgcggaagtataattttttattagaagttagtaataattgttatttatagaagttattgtgtaatttttataaatatttattaagattgtagaggtgaggggtggtggggggtgtatttttatttattaaattttatagttaaagttgaagtagagatgtttttgaaggtgaattgggttaattaaaggtatggttagtggagattttaatttattttttttttattgtttattagatgttaattaaattataaatgataatagtttaatagtaaaatgtatgtatttttataaagttgatatgattttttggataaagatagataaagtttaatatgttggataatggttattgagggtattaagatttgtgatttttttttttagggatatagaaaaatagtaaatataaattatggatgaaatttataagattatttttatagaaagggtttagttgttggagaaaaaattggttgtgtaattgattgaattgaagttt

SEQ ID NO: 1938 - DNA, 2300 bp, Artificial Sequence
  chemically treated genomic DNA (Homo sapiens)
agattttagtttagttagttgtatagttagttttttttttaatagttggattttttttgtggaagtgattttataaattttatttatgatttgtatttgttgtttttttgtatttttgaaaaagaggattataaattttgatgtttttagtgattattatttagtatgttgaattttgtttatttttgtttaagaaattatgttaattttgtagaaatgtatgtattttgttattagattgttgttatttgtgatttaattaatatttagtaaatagtagagaaaaagtaggttagaatttttattggttatgtttttgattagtttagtttatttttaaaaatatttttgttttagttttggttgtggggtttaataagtgagaatgtattttttattattttttatttttgtagttttgataaatgtttgtggggattatatagtaatttttgtgaatggtagttattgttgatttttaatagaaaattgtattttcgtatttgaatgtgtttttttaattttgattgtttatatttagtatatcggttttattattaaataatagttgataattttttattttattttatttggtttatagtttgttaaatttaatataattgtttgttaagtatttagtattaatattttaattaataatgtagattaattgtatgatttagaagttttgggatttataagttgtaggggatttaatagatgatgtatttttttgtgttattgttgtttttatttgttttggataagtatgagttaagttttttttaggttatattagagagatttaaaatatttaaattttattttttttttgtgatatttttagatttttatttttttttttgagatattttatttttttaagttaatatgttgttattttaataaataattaagttgtagagatgttttgtgtagaggttttttttgggagtttatttattttttttttaaatatatgaaaaatggaaatgagtatttatgtttagtttaggttgtgaatttgtttagtaataaatttgtcgtgtttggtacgttattggagtttaataaaatgtattgttattgtttttagtaaaagtaaaatgttgttatagaaaatatttgttatttggtagtgtttttttaagttgggtaaatagttaaatagttgttttaatagttgtattttaatcggtagttaagagtggtagtaatatagattggttgattatttttttaaaggacggatattttgtttttattttttgattagttttaatattttatagtttagaaatgagaatatttaattttgtattgtttagtttgtaatatagttaagtatagtatttagaaaattaatataaaggggttagtttttgataattgtttatgaaatgaatttaatttagagaaatatatgtttgttgagtatttatgtttaggtttaaagagataattgtttatttggaggggtatgggaggtgtgttttatttattgagaatttatcgtgtgttaggtaagtattgggaatttatttagttttagaaaagagattgcgagaaaagagaatttttttaattatgtttttaaaaataagtatatttaattatttgtaatttataattatgtataatatataatttttatgtatttaaaacgtggttaaaatttaagataaaaatagtaagattagtttgagtaaggtttgggggtgtttaatgtgtggttatagtaggtttggatggggataaagtagatacgtttagaaaagaaatattgagtaattattttaaaagttttaaggtgatgagtaaaagaatagaaatgtatttagatgagtttatgttatttgtagggatatggatgaagttagaaatcgttattttgagtaaattatcgtaaggatagaaaattaaatattgtatgtttttattcgtaggtgggaattgaataatgagaatatttggatatagggtggggaattttatatattagggtttgttataggatgaggggagtggggagggatagtattaggagatatatttaatgtaaatgatgagttaatgggtgtagtatattaatatggtatatgtatatatatgtaataaatttgtacgttgtgtatatgtattttagaatttaaagtataataaaaaataggaaaaaataaaaataaaataaaaatattcgtatttattaaaaaaaaaaaaagaaatgtattttagagttttttaaagaagtgggagtaaggggtgagataggatttttaaatttaataaacggtggt

SEQ ID NO: 1939 - DNA, 2441 bp, Artificial Sequence
  chemically treated genomic DNA (Homo sapiens)
gttttattttggtatataaatttaaaggataggaaatggaatagaataataaaaataaatttttaaatttagaattattataaatagagtagtataaagaggtagaaagttttattttatggtatgttgtatttgttttaaatatttgatttaaaattagatattgttggaaatattatatgatttttttattggtaggagttattttgaaatgattgtaatataaataggagtagagaagtttattaaatttttttttaaggatatttatgaattagggtattataaaattggaaatattgaaaaggtttttaaagatattgtttaatagtgaaagaaacgaagaagaggttatatttttgtttatttttcggttttttttgtaggttttttttttttatattttaaagaagttgttattagttttaaaaaaaaaaaaaaagtttcgggaaggtgattagggagggtgacgtagagttttgttaataggttaatttaagaatagttgttaaaattatatagaggagagttaatcggggagataattatttgttgtgttgtaggagattattaagtgagttttttaaggttataaatttaattatttagttgtatgaaatagttaattggtaagaaaatagttatgattttttgtttatttatgtttttgtttataggttattttttagattgaatggttgaatatagtattatagatttttatattataggaatgaaagtaaaatgtttttattaataataaatgttttttatcgtaaataataatttaaatttttatttttataaaagtttgatatataagaaaaggaaataaattagattttgtttatttaatgagataaatattttttttaagtgtgtatgttgcgtgtttttagttagtaagattttttttttaaggaatgatgaaagttaaaatattttttaaagtataattattaatagaaaataggaagttaatttatttgttttttgtgttagtattttattatttttttattcgtgtttttgttttttaggagggttaattgttgagtttaggtttttagaagggtattgaattgttttagggtttgttttagttgagttatttggtttgagaatttttgtttcgaaagggttatttggttgattaggttttttaaatagttttgcgtttggaatatattgtttttttattgtttttagtcggtacgtagggtttgtattttcgtgtgtatgagtttatatttattggtagttgtgttttgttttatttcgggagttagcgattttattttgttgagacggtttgtattaatttttttggaatttattagtttttgtaatggaatattattatggtaattgaagagtttgtgagttatttggattgtaagtttttaattgtgtatatagggggattttgttttgttaggaagttttaataagtgtgttataaggatttagaattaatttatttgtttatttttaaattataatagcgggagttgttattacgagtgtttaaggtttatggtaaaaaaatttcgagaatttttaatattttgaaatagattaaatagagattttgaaattaggtattattcgtatacgtgaaaatgtttagtgatttaagtgtttgtttgtggtggattgtttttgtgaatgattaaatttatattttttttaaagtggatgtttaagtaaataaagatcgtggtagaattgtgttttgtttacggtttttatatttaatttattttttttaatagggtggtggtttaaattatatttttattttattaggaattaagtagatttattatagtaaaagaatgagttttattcgattttaaatattttaatattaagtaaatatttttgtagtatataaaatgaataatttatttatagattgatttatttaaaagtttaaagtaatttttagattgagtatatttattagtatttttttattttaaaaaagttattagaaatttaatagtttagttatagttaagttaataatttagttcgattttaaagtatataaatattgtaaaggaaaataagataaaattaaattatattgttaaattgatataattgtagtatttttgagaatagatttttttattaaaattttttttggtgaaataattattcgatgtttatatatttatatatttattgttaaaggtaggattttgttaatattattataaaattatgattttattatcggattaaatagaaataaaagataattaggtataaaaatgtttaagaagaaaattaatgattaattagtaagtaaagaaatattggaatgttaagtatgaagtatgtttaataaattatgttaagtataaagtatgttttaattagtttatataatatagtttgtattttattaaattaatttgaaataaatatat

SEQ ID NO: 1940 - DNA, 2441 bp, Artificial Sequence
  chemically treated genomic DNA (Homo sapiens)
atatatttattttaagttaatttaatgagatgtaaattatattatatagattagttaagatatattttatgtttaatataatttattaagtatgttttatatttaatattttaatgtttttttatttgttaattggttattgattttttttttgaatatttttgtgtttgattattttttatttttatttaattcggtagtaaagttataattttgtaataatattaataaaattttgtttttagtaatagatatgtaaatatataaatatcggatgattattttattaagaaaaattttagtaagagaatttatttttagaaatgttgtaattatattaatttaataatgtgatttaattttattttgtttttttttatagtatttgtgtgttttaagatcgagttaaattgttaatttggttatagttaaattgttaaatttttagtgatttttttaaggtaaaaaaatattaataaatgtatttagtttagaggttattttaaatttttgagtaagttagtttatgaatgaattatttattttatatgttataaaaatgtttatttagtattgaggtatttggaatcgagtagggtttatttttttgttgtgatgagtttgtttgatttttagtagaatggaagtgtgatttaagttattattttgttgaagaagatgaattgagtatagagatcgtgagtagaatatagttttgttacgatttttatttatttgagtatttattttgagggaaatatgggtttaattatttataggagtaatttattataggtaaatatttgagttattaaatatttttacgtgtgcgaataatgtttgattttagggtttttgtttagtttgttttaggatattgaggattttcgggatttttttgttataagttttaggtattcgtgatgataattttcgttattataatttaagagtggatagatgaattgattttgggtttttgtggtatatttgttaaaattttttggtaggatagggtttttttgtgtatatagttgaaaatttgtagtttaagtgatttataggttttttagttattatggtgatattttattataggagttgatagattttagagagattggtgtaagtcgttttagtagagtggagtcgttggttttcgaagtgaaatagaatataattgttagtgggtgtgagtttatgtatacggagatgtaggttttgcgtgtcgattggaagtagtgggaagatagtgtattttaaacgtagagttgtttggagaatttggttagttagatggttttttcggagtaggaatttttaggttaagtggtttaattggagtaggttttggaatagtttagtgtttttttgaaaatttgggtttagtagttaatttttttggaaggtaagaatacggatgaggagatagtggaatgttggtataaaggataagtaagttggttttttgttttttattggtggttatgttttaaaaaatgttttgatttttattattttttaaaaaaaaaattttgttaattaaaaatacgtaatatgtatatttggaagaagtatttattttattaaataagtaaagtttgatttgttttttttttttatatattaaatttttgtaaaaataaagatttgggttattatttgcggtaggaaatatttgttgttagtggagatattttatttttatttttatggtgtaagagtttgtaatattgtatttagttatttagtttgaaaaatggtttgtgggtaggggtataaatagatagagagttatagttgtttttttgttagttaattattttatataattaaatgattgaatttatagttttaaaagatttatttggtaattttttatagtatagtaaatagttattttttcgattagtttttttttgtgtggttttgatagttgtttttgaattagtttgttaatagaattttacgttattttttttggttattttttcgagattttttttttttttttgaagttaatggtagtttttttagaatgtgagaaagggaagtttataagggagatcgaagaatgagtaagagtgtaatttttttttcgttttttttattgttaaatagtatttttgaaagtttttttaatatttttagttttataatgttttgatttatggatgtttttaaaaggaaatttagtaaatttttttgtttttatttatattataattattttaaaatagtttttgttagtaagaaagttatgtagtatttttagtagtgtttggttttaaattaagtatttgaaataaatgtagtatgttataaaataaagttttttatttttttatgttattttatttataatgattttaggtttgggggtttgtttttgttattttgttttattttttgttttttagatttatgtattagaataaagt

SEQ ID NO: 1941 - DNA, 2311 bp, Artificial Sequence
  chemically treated genomic DNA (Homo sapiens)
atatttgtgtttatttatttttttttgttttttataagaataattattattgtgatttttttttatattttattatttatttttttaaaagaatattttttattgtttaaacgttatataattataaaagtagagagattatatttatttttagttttagaaattatgaattgatagttaattttttttatttatatttttatttattttttttttaatttttttgttaaattatgttatttagatgtcgggtattatattataggattttttaatatattatggaaattgattattataaagtttttattgttagttttttttttttttaggttatggttgtttttttttttttggaatattttgatgttaaatgatgttttaggaattataaaattaaagtaagaagggaggtataagtttatttattttattattttaaataatgtaattgtaataaaaagtattttattttttttttttttatatttttttgaatttgtttgtattaattgaagtttattttttattttgattttgtttgtagaaatgtttatttttggggaattggttttagttttatttcgttttaattaggttaaaaaggatgatagttttttttttagtttaaaggaagtagagagtagaaataaatttattgaaaattattatgttagtagattaaatttttgtgaagttggagggtttaatataaattatagtaaatatagttttagttattttagttttagatatgttagtataaaaatttttttttttatttttatttgtgtttttgtatttatatttatattggataatatgtaaagatttatatatattttttttatttttaggaatttttgttttataataaagattaagagttttttatagtagatttataagtttacgttttttgtatttgggataattattttttattattttaagaattgttaatttagaattttttatttagtagtgtagtaatttaaggaaaagtgttgtttatttttgttagtgggttagtagattttttagcgtcgtttgtttttttttcgttttttttaggatgttttcgtattgttgttgtagagtcgtagttttttgaatataggaatttttgtttataatttttttggtattggttgagaaggtagtgatcgcgttgtttagtgattttagggtttggtagagattttaagaagagtgcgagaagaatgtagtgaaagtataggagttaacgaggtttgtatttttttttgatatcgattatcgtaaaatatttttttttagttataataaataggaatagtattaagaatgggtataaatatatagtttgatagaagaaatgagatttagtgtttaatagattagtagggggattataggttataataatttattttatattttaaaatagttagaaaatagtttgaatgttttttgaataaataaaatataaatattttaggtgatgaaggttttaattttattgattttatttttataaattatatgaatatattaaattattatatgtgtatttttaaaaataaataagagttatatttattttaaaaggtttgtgtttatgatttgtagtaagatatagtgaaaatgagaagaaagtgattttataaatatagaaattaaaaacgaaaatggagatatttttttaaataagaatgtattgttatttatttaaaaatttttaatttttttttaataatttaggtaatttgtgaagattattagttattttatgttaaatacgtatttaaaaattttatttttaatttataaaatttatatgtaatatgttataattattttaaaaaatatatataaaaagaattatggttgaagaagttattgtttattttaatagtaataataataataataataataataataataatgatatagtgttttagaatgtggtaggttttgtattatttgttttttatgtattgattttttttatttttttgagaattttaagaggtatgttattttattatttttattttatagattaggaaattaagatatagaaaaataatttgttttaggaaatttaaatatcggaaaagtagaatattagtttttttggttttttattattaatttagttgtttataaaaataattttattatattgaatttttttatttttttttattttttgtattaagaaattataaataagtaacgtaaaagtgtatttttattattaatatttaaataatagaaattttatttttttttttagatggtttttgttaatggtttgtttttt

SEQ ID NO: 1942 - DNA, 2311 bp, Artificial Sequence
  chemically treated genomic DNA (Homo sapiens)
agaaaataagttattgataaaggttatttggaagagggagtgagatttttattgtttaaatattgataatgagaatatatttttgcgttatttatttgtaattttttaatataaaaaatgaggaaaagtaggagaatttagtgtgatgaaattatttttatagataattaagttaataatggaggattaaagaggttaatattttattttttcgatatttagattttttaaagtaagttgtttttttgtgttttgattttttaatttgtaaaatgaaggtaatgaaataatatattttttagggtttttaggaagatgaaaagagttaatatatgggaagtaggtaatgtagggtttgttatattttgaggtattgtgttattattattattattattattattattattattattattgagatagatagtagtttttttagttataattttttttatatgtattttttggagtgattatagtatgttatatgtgggttttgtaagttaagaatagggtttttaaatacgtatttagtataaaatgattaataatttttataagttatttaaattgttaagggaaagttgaaagtttttagataaatagtagtgtatttttatttgaagaagtgtttttattttcgtttttgatttttgtatttatgaagttattttttttttatttttattatgttttgttgtaaattatgggtatagattttttaaaatagatataatttttatttgtttttgggggtgtatatgtgataatttaatatatttatataatttgtaaaagtaaaattagtggaattgggatttttattatttaaaatatttgtgttttatttatttaagaaatatttaaattattttttagttattttgaaatataggatagattattgtaatttatagtttttttattaatttattgaatattaagttttattttttttattaaattgtatatttgtatttatttttagtgttatttttgtttattatgattgagggaaaatattttgcgatgatcggtgttaaagaaaaatgtaggtttcgttggtttttgtgtttttattgtatttttttcgtattttttttaggatttttgttaggttttggagttattgagtagcgcgattattgtttttttagttagtgttaggaaggttgtgaatagagatttttgtgtttaggaggttgcggttttatagtagtaatacgaggatattttaaggagggcgaaggagagatagacggcgttggagaatttgttggtttattggtagaggtgagtagtatttttttttgagttgttgtattattaaataggaaattttggattagtagtttttaaagtgatggggagtagttattttagatgtaaaagacgtgaatttgtgggtttattgtaggaaatttttgatttttgttataaggtaaagatttttgagagtggagaggatatatatgggtttttatatattatttaatataaatgtgagtgtagggatataaatgaaaataaaaggagggatttttgtgttggtatatttaagattgagataattgaggttgtatttattatggtttgtgttggattttttaattttataaaggtttaatttgttagtatgataatttttaataaatttgtttttgttttttgttttttttaggttagagaaagaattattattttttttgatttggttagagcggggtgaagttaaagttagttttttagaaatggatatttttgtagatagagttaaagtggaaggtgaattttagttaatataggtaagtttaaggaagtgtgaggaaggaaaaaataaaatgttttttgttatagttatattatttaaaataataaaataaataaatttgtatttttttttttgttttggttttgtgatttttgaagtattatttgatattagggtgttttaaaaagaagaaagtaattatgatttgaaagggagagaaattaataatgagaattttgtgatgattaatttttatgatgtgttagaaaattttgtaatgtaatgttcggtatttgaataatatggtttggtaaaggagttgaggaaaggatgggtaggaatatagatgaaagaggttggttattagtttataatttttgaggttggaaataggtataatttttttatttttgtaattatatgacgtttgggtaataaagggtgtttttttaaagaaataagtaatagaatgtagaaagaagttatagtaatgattatttttatggaagatagaaaaaaatgaatgagtataaatgt

SEQ ID NO: 1943 - DNA, 2454 bp, Artificial Sequence
  chemically treated genomic DNA (Homo sapiens)
ttttgggattaagggattgttttattttagtttttcgagtagttgggattataggtgcgtgttatttagtttagttaatttttgtattttttgtagggatagggttttattattttgtttaggttagaaggattgtttgagattagtttgggtaatataacgaatttttgttagaaagggaaggggaaaagaaaggaaaggaaaagggaaaggaaaaaagaaaggaaggaagaaagagataaatataattgtgttatttagagaatagaggtattattgggtatggtgtcgggagtttgtagttttagttattgggggagttgaggagggaggattttttgagtttaggagatggaggttgtagtgagttataattatattatcgttttttagtttgggtgatatagagagattttgtagtaaattttaaaaattaaaaataaaaaagagaatagagatgttaaaaatttttaaggaattttattttgtgtttaaattacgagaattatttgtggttaggtgtgtttatggttgtattaattaaaagcgtgttatagttttattattggggaggttaaagagggaggatttttttgagttttggagttcgaagttaatttgggtaatatagttaggttttataattttttttttatttattttttttttttattatgtaaattttattatatagattttataatagaaaaaaaaaagaaaaagaaagaaaaaaggcgggcgtttattttgttttgtatttagtagttttaggtaagtgatagaataatttgaaaatttggtttagagggaggaaacgtagtggttagggattagaagcgcgtgagggatttatgaagtatttattttgtaagtattagtttttttttttgggagagatattgggtttgtttacgtttttttgagtttatggttaagattttcgttgggtattagcggatttttggtgtttagagttcggttttttttatcgggtgcgttgggaaaagggttgtttttgatagaagggatattttaagagtagtttaggaatcggtgtatttgggcggtttcggaagaagtcggggtttttggaggcggaggcgaggtttgggatttaataagaagggcgcggttagagaggaggggttggttaaaagtttttgaaataaggtttaggtagaatcgcggttttagttttttagttttagttcggtttttgggtttgttgtggtgtttttgttttttgtaggatcggtcgtagtatggacgtttttaggcggttttcgacgttcgtgtaattgatgtagttaaaagtaatgttagtggaggtgttcggttatttttttaagcggtttttttggttttattttgagtttttgaagaattcgaaggtagttcgttttgaggtttggttggtggaaaagattttcggtgagtggattaagaaggggtagtttttatgcggtttttttttgttatttatatttatagtttatatattttggttgcgttttagggcgatttttattagtagttaatgttttttggttgttttttttttttattttttttttttaagattttcgggagttatcggttttttatagtttttttgttattcgcgtaggtcggggcggagaacgtatttcgtacgtttagggtatgttttaaattttgatttacgtgaatcgattggattttaacggcgaggttgagattttggtatttgggaggtttttttattaggaggatataattaagatgattatgaatttggttgattattatcgttagttttaggcgaaaggtacggggttgggaatagggttatttggagtaaattttggtttcgtaggagtgattttggggttttttggttgttggggcggtagtttcgtttttttagtcggtttgcggttggtgggtgggggagggggcggttttcgttgttacggatttagaaggttaaattgaattttcgttttgggatttttggtttttattttcgtaggtcgtttgggtgattgtttttttttggagaggatatagagatatagttgtggtttttgtatattgttttttttttaggtttaggaaaggttttcgtttaggatgtcgttatttagaaggtcgagatttagcggtttttaatagaagttcgggaggtcgggacgtagcgttcggtggaggttcgggaggtcgggatttagcgttcggtggaagtttaggaggtcgggatatagggtttttcggtggaggtgtaggaggtcgggatttagtagtttttttaggttgttaataagtcggggatttagcgatttttcgaagttgttagtaaggtagtgatttagcggtttcgcgaggatgttcgggatttagttattagattatgaaggtattttaggttttggagttagagttagttaggggttaaagtgaaagttcgtattttcg

SEQ ID NO: 1944 - DNA, 2454 bp, Artificial Sequence
  chemically treated genomic DNA (Homo sapiens)
cggaaatacgggtttttattttaatttttgattggttttggttttagggtttgagatgtttttataatttagtaattgggtttcgggtattttcgcgaaatcgttgggttattgttttgttggtagtttcgggggatcgttgggttttcgatttgttggtagtttggagagattgttgggtttcggttttttgtatttttatcggagaattttgtgtttcgattttttggatttttatcgaacgttgggtttcggtttttcggatttttatcgaacgttgcgtttcggtttttcggatttttattgaagatcgttgggtttcggttttttgagtggcgatattttgggcgagggttttttttgagtttggaagaagagtagtgtgtagaggttatagttgtgtttttatattttttttaaaaaaggatagttatttaagcggtttgcgggagtaggagttagaaattttagaacgagggtttaatttggttttttggattcgtggtagcgagaatcgtttttttttttatttattaatcgtaggtcgattgggagggcgagattgtcgttttagtagttaggaaattttaggattatttttacggagttagggtttgttttaggtagttttatttttagtttcgtatttttcgtttggagttggcggtgatagttagttaggtttatgattattttgattgtgtttttttggtaagaaggttttttaaatattaagattttagtttcgtcgttagggtttaatcgatttacgtgaattaagatttgggatatattttggacgtgcgggatgcgtttttcgtttcggtttgcgcgggtagtagagaggttgtgagggatcggtggttttcgggggttttgggaggggaaggtggaaggaggagatagttagagggtattggttattggtgaggatcgttttggaacgtagttagaatatgtgggttgtgggtatgggtggtagaaagaagtcgtatgggggttgtttttttttggtttatttatcgaagattttttttattagttaaattttaaggcgaattattttcggattttttaggaatttagagtggaattaggagaatcgtttagggaggtgatcgagtatttttattggtattgtttttggttgtattagttgtacgagcgtcggaaatcgtttgggagcgtttatgttgcggtcggttttgtaggagataaggatattatagtaaatttaaaggtcgagttggagttgggagattagaatcgcggttttgtttgggttttattttaagggtttttggttagttttttttttttagtcgcgttttttttattgggttttaggtttcgttttcgtttttaggagtttcggtttttttcgaggtcgtttaagtgtatcggtttttgggttgtttttagagtgttttttttgttaggagtagttttttttttagcgtattcggtaggaggaatcgggttttgggtattaggaattcgttggtgtttagcgggagttttaattatggatttaggaaggcgtgggtaagtttagtattttttttagaggaaagaattaatatttgtagaatgaatattttataggttttttacgcgtttttgatttttggttattacgttttttttttttggattaggtttttagattattttgttatttgtttgagattgttgagtatagagtagaataagcgttcgtttttttttttttttttttttttttttttttgttatagggtttgtgtagtgagatttgtatagtaaaaaaaaaaaatggatagaaaaaaagttatggggtttggttatgttgtttaggttggtttcgaattttagggtttaaaaaaattttttttttttagtttttttagtagtgggattatagtacgtttttaattaatgtagttatgaatatatttaattatagatagttttcgtggtttggatataagatgagattttttgaaaatttttgatatttttatttttttttttatttttaatttttaaaatttgttgtagggtttttttgtgttatttaggttagggggcggtggtgtgattatagtttattgtagtttttattttttgggtttaagagattttttttttttagtttttttagtagttgggattataagttttcgatattatgtttagtgatgtttttgttttttaaataatataattatatttgtttttttttttttttttttttttttttttttttttttttttttttttttttttttttttttttttttgataagggttcgttatgttgtttaagttggttttaagtaatttttttggtttgggtaaaatgataaaattttatttttataaaaaatataaaaattagttggattaggtggtacgtatttgtagttttagttattcggaaggttgaggtgggataattttttgattttagag

SEQ ID NO: 1945 - DNA, 4898 bp, Artificial Sequence
  chemically treated genomic DNA (Homo sapiens)
aatttatgtatttttttttcgggagggttttatttttttagtgttttgattttattttttaggtattgagattatagttgtggtttagttgtagaagttagtttagtagattggttttttgttagagataggaagtgggggaagagttgtgcgttttgttggttattaaggaggggtgggcgttagaggttggagttgggttagattttgtggttttgcggaatgaattgtaagggaggagttgtgagttggtttgttttattttgaagggtattgtgaggggtagagttcgtgtaaggtagttttgttttttttgttgtttggaaggttttggggtggagagtggggaataagttttggaaggtaggaaagaatattgaggtgggagtttggaaagttgggatttggtaaggttttgttattaatttattatatgatttgtattagtttttttttttttttggtttttgttttttaatttttgaaattggaaaatgtattgtattttttgtggtagatatatttttagggaatatattagtagataagttagtttttgtttttagggttttttattttattaatagatgagtaaatatagaataggttaagtgttgaaaaagtttgggtagaataataaaatggtgttgggggtagagagtgagaagtttgggacggttttttttagaagttgatataagtagaagaaacgaggaaagggttaatgtgggtatttaggggatgtatattttgggtagaggaaagagtaagggtaaaggttttgaggcgagaaggtgtttggtaaattaatcgagaaaaggaagtagtatggttggtagggaataagtaaggggagatgagggttaaggtaggtggggtttagtttatggagattgagggattttgcgttttattttgaattgatcggtgggtttcggggaagttgggtttgggtttgggtgtagagtttatttggtgttgtgtatatgtgtgtgtgtgatagtgttgggtgggggaatatttttgatttttttttatttattttggttttttggataggttttttaggaagagataataatagggtcgggtttagggtgaggtatgtgaaatttggagtgaatgaggtatttggtttaggtttaaaatttaagggggtattaaaaaatttagtaattaagataaaataatatttttttgtaatatgtataaaaatttaaattaatgttaaaaagtttatgataaataaaatgttaatattttagataaagataggatttgattttgaatttgcgtgattaattattttaattttggttttgtttttaatataattttatttaaaaaaaataaggtagttggtttaaagaattgtagtttgtttatttggtatattaaaatattgttttaaaatattttttattagtttgggtacggtggtttatgtttgtaattttagtattttgagaggttaaggtaggtagattatttgaggttaggagttttagattagtttggttaatacggtaaaatttcgtttttattaaaaaaaattagttaggtgtggtggtaagtatttgtagttttagttgttttaatttgggaagtggagattgtaatgagttgagattttattattatattttagtttggcggatagagtaaaattttgtttttaaaaaaaaaattttttattttggtattttcgaaattttgtatattaggtgagtgttttatttattttattttagttttggttttgggttttagtgtttattttttttgaggttgagaggtaaagggatttttttaaagaaatatagtagatggtgggtttggaaattgggtttttatgttaggtttttagtttggttattatattttattatgttttgaattggaatgttgattttaatgtgttgatttttaaaaattttttatttaagtataatagttatataaataagtgtttgtattataaatgtttagtttgttgtatttttataaaatgagtatatttgtataattagtatgcgtgattaaatttaaagtataatttatatttttaataaaatagatattagtattgggttagatttagaggatttttgagattaagtaggcgatttggaatagtaaggtttcgggattgagttgatgtagagtttaggggttttggattgagacgagaaagtagggggaggggtgtagtattgaggtttggggttcgggagggggttttatacgcgggaggaaacggagagagacggtgaggattgttttcggaggtgggtgaggtttagcgtgcgcgtttaggtaagtaggtaagaatgtagtagtcgttaggtttaggcgcgggcgcgtttcgttcgggtgatttagttcgtgttaggaagcgggagttggtttagttttttagagttttcggatagtagtcggatttcggtcggtttttggggtattaggatagattttcgcggttagtagttcggtttggggggcggaatattttttttttgtttcgttttattttttttcgggtcgtaattattttagtttatcgttgggacgtggtcgcgggtgtcgagagcgttgtcggcgtcgtgggggttatttcggttttggtttcgacggcgttttaggatttgcgatagtcgtaagtagcgattatgggggttaggagagtttaagaagtggggagttgggacgttcggttttttgcgttttagttttttatttttagattcggttggattcgggattagaaaaggtggtttggtgtcgtcgttgttttttagtgtgtttattggttttcgtggcggggagtttagacgcggtttttaggcggttttagataagtacggtcgagacgttgttattttagggggttgttttatttgagtattattttacgggttcgtttagttttatttggagagtcgtaggttttaaagttttttttattttcggggattaggtttcggggtcgcgttgagggtttttgaatttttttggattgtttggtagcggtttttttttattattacggtttattatttagacgcgtcgttcggttggttttatcgggagaggttttttttttttttttttttttcgaatttttattttagaagttttcggatttagtttggattttaaagaagggttgaattcggaggatttttttttgtttttaaagtcggttttttgatatatatttttacgtatagttggtaggggtaggagggtcgaggatgttttgggttgttgcggtatagggtaggttggttggttattaatcggatttttcggatagataattttggcgttgtgggcgggtggtttgggagtttagatttttgtttttggtttaggatttcgggaggagatcgagggggtgggtaaaacgtgattgagaaatttgatcgcgtttatttttggggtaaagagatttggaggtcgtaattatttagatagttttacgaagtggttgaggttttttttttttttttgattttttagaaatttttgtagagtttggataggtaaaggaaaacgtgtagttcgcggattttcgggttttagagagtagggagtcggggagattgaggtttcgtttcgagagcgcggaggaagcgcgtttagtcggttttttgtgggggttcgggtttcgggcgtttcgcggatagacgtgttcggtttttggttgggttaagttcggcgcgggggaggggattcgtagaggggcgattgagaaggcgaggagggggcggggagagggtgggttagggaagaggggaggggagaggcgagtaggggaggagcgaggggggttggagggagagaaggaagaaggaaggggcgaacggcgtgagttggcgtcgaaatgggagaaagtagcgagtgagaggggaaggggcgttaggcgagtattcgggagttagcgggatttgggtaggggcgttcggagtaggcgcgtatggcgggtttcgcgcggggattcggttggaagagagcgtagtacggttcgtacgagtgagtggacgtgggaggcgcgtatttgcgggggaatcgttttttgttcgttttcggcgtcgttcgttgagttttgtttttcgtaggttcggggtcgatgtattaggtgagcggttagcgtttttttggttgcgacgcgttttatggagtttttagcgtagtttcgggtttaggtaggatcgggagtggcgagcgaagttggataggggcgggtgggcggttgaaggggttagttattagttttttttttcgtttttagacgcggggagatcgttttagggagtttggtgggggtagggacgaaaagtttgggtttgaggatttggtttaaggagagtagggggttgggcgagggaggtagggttttgaatagaggttgcggttgcgttaagttggttttaatttttcgtaattttcgatattagatatatatatatatatatataaatatatatatatatatttcgcggtgtttgttcgtttgggatttgtgttttaattgtttttgtttagtgtgtaaatatttgtgggggtttggtgtgggggagggggcgttgtttgaatttttttttatttttttttttttagtttaattagagtttagcgtttttcgaaaatttttgtttgtcgcgagcggttgtaggatttagtttttttttttttttttgttattttttttttttcgttttttttttttttcgtgtcggttagttttcgtcgtttttgttttgtgtatatatacgtattttaatttagtgtttttagtttaagtgaaatgtttcgtttcgcgtttggcgtcgtttgtaatttattcgcgatttttgggggagttttttacgttaagtacggtttgtgattttttg

SEQ ID NO: 1946 - DNA, 4898 bp, Artificial Sequence
  chemically treated genomic DNA (Homo sapiens)
tagggagttataaatcgtatttggcgtgagaggtttttttaggaatcgcgggtaggttatagacggcgttaggcgcgggacggggtattttatttgggttgaagatattgggttggggtgcgtgtgtgtgtatagggtaggggcggcggggattggtcggtacgagagggaaggaaggcgagggagaagggatggtaagaaagaggggaggggttgggttttgtagtcgttcgcggtagataaaagttttcgggaagcgttgggttttggttgggttgggggaagggaagtagagaaagatttagataacgtttttttttttatattaggtttttataaatatttatatattgggtagaaatagttgagatataaattttagacggatagatatcgcggagtgtatgtgtgtgtgtttgtgtgtgtgtgtgtgtgtgtttggtgtcgggagttgcggggagttggagttaatttggcgtagtcgtagtttttgtttagggttttgtttttttcgtttagttttttattttttttggattaagtttttaaatttagatttttcgtttttatttttattaagttttttggaacggttttttcgcgtttggggacggagaggagaattaataattggtttttttagtcgtttattcgtttttgtttagtttcgttcgttattttcggttttatttgggttcggggttgcgttgggggttttatagggcgcgtcgtagttagaggggcgttggtcgtttatttggtatatcggtttcggatttgcggaaaatagggtttagcgggcggcgtcggaggcgggtaaggggcgattttttcgtagatgcgcgttttttacgtttatttattcgtgcgagtcgtgttacgtttttttttagtcggattttcgcgcggggttcgttatgcgcgtttgtttcgggcgtttttgtttaggtttcgttggttttcgggtgttcgtttggcgttttttttttttttattcgttgtttttttttatttcggcgttagtttacgtcgttcgtttttttttttttttttttttttttttagtttttttcgttttttttttattcgttttttttttttttttttttttggtttatttttttttcgtttttttttcgtttttttagtcgtttttttgcgggttttttttttcgcgtcgggtttggtttagttaggagtcggatacgtttgttcgcggggcgttcgaggttcgagtttttataggaagtcggttgggcgcgtttttttcgcgttttcggagcggggttttagttttttcgattttttgttttttgaggttcggagattcgcgggttgtacgtttttttttgtttgtttaaattttgtaaaagtttttggaaaattaggagaaagagagaaattttaattatttcgtggaattgtttgaataattgcggtttttaaatttttttgttttaaagatgggcgcgattaagttttttagttacgttttatttattttttcggttttttttcggggttttaagttagggatagggatttgggtttttaggttattcgtttatagcgttagagttgtttgttcgggaaattcggttagtgattaattagtttgttttgtgtcgtagtagtttagagtattttcgatttttttgtttttattagttgtgcgtgggaatgtgtgttagaaaatcgattttgggggtaaagagaggtttttcgaatttagtttttttttgggatttagattgaattcgagggtttttaagatgagggttcggggagaaaggggagggagggagtttttttcggtggggttagtcgggcggcgcgtttggatggtgagtcgtggtggtaggaagaagtcgttgttaggtagtttaagagggtttaggggtttttagcgcgatttcggaatttggttttcgagaatggggaagattttggagtttgcggttttttaggtggggttgggcgggttcgtgggatgatgtttaggtggggtagttttttggggtgatagcgtttcggtcgtatttgtttagggtcgtttaggagtcgcgtttgggtttttcgttacgagggttagtgagtatattggaaggtagcggcggtattaggttattttttttagtttcgagtttagtcgggtttggaagtggagagttgggacgtaggaggtcgggcgttttagttttttattttttggatttttttagtttttatagtcgttatttacggttatcgtaggttttggggcgtcgtcggggttaggatcgggatggtttttacggcgtcggtagcgttttcggtattcgcggttacgttttagcgatgggttggggtggttgcggttcggaggaaggtggggcgggataagaagagagtgtttcgttttttaggtcgggttgttagtcgcgggggtttgttttagtgttttaggagtcggtcgggattcggttgttgttcgggagttttggagagttgagttaattttcgttttttggtacgggttgagttattcggacgggacgcgttcgcgtttgggtttggcggttgttgtatttttatttgtttatttgggcgcgtacgttgggttttatttattttcgaaggtaatttttatcgttttttttcgttttttttcgcgtatagggttttttttcgaattttagattttagtgttgtatttttttttttgttttttcgttttaatttagggtttttaaattttgtattagtttagtttcggagttttattattttaagtcgtttgtttgattttaaaagttttttgaatttggtttagtattaatgtttgttttgttggaaatgtaaattatgttttaaatttaattacgtatgttggttatataggtgtgtttattttgtaaggatgtagtaagttgaatatttatgatgtaggtatttgtttgtatgattattatatttgaataaaaagtttttaaaaattaatatattaaaattaatattttagtttagagtatgataggatatgatggttaggttggaggtttggtatgggagtttagtttttagatttattatttattatatttttttggggaaatttttttgttttttagttttaggagggatgagtattggggtttaggattaggattggggtgaggtaagtgagatatttatttggtgtgtaagatttcggggatgttaagataaggaattttttttttggaggtaggattttgttttgttcgttaggttggagtgtggtggtgagattttagtttattataatttttattttttaagttaaagtagttgggattataggtgtttgttattatatttggttaattttttttagtagagacggggttttatcgtgttggttaggttggtttggaatttttgattttaagtgatttgtttgttttggttttttaaagtgttgagattataggtatgagttatcgtgtttagattgatgaggaatattttaaggtaatattttaatatattaaatgggtaaattatagttttttgggttagttgttttgttttttttaaataaagttgtattggaaataggattaggattaaggtaattaattacgtaagtttagggttagattttgtttttatttaaaatgttggtattttgtttattatagattttttggtattaatttggatttttatatatattgtaggaaaatattgttttattttaattattgagttttttgatgtttttttaagttttgaatttgagttaagtgttttatttattttaggttttatatgttttattttagattcggttttgttattgtttttttttgaaggatttgtttaggaagttagggtaaatgaggggagattaaaggtgtttttttatttaatattgttatatatatatatatgtatagtattaagtgggttttgtatttaagtttaggtttagttttttcggggtttatcgattagtttagaataaagcgtaaagttttttagtttttatgaattgggttttatttgttttggtttttatttttttttatttattttttgttagttatgttatttttttttttcggttaatttgttaggtattttttcgttttagggtttttgtttttgtttttttttttgtttagaatgtgtattttttagatatttatattggtttttttttcgttttttttgtttatgttagtttttaagagaggtcgttttagattttttattttttgtttttaatattattttattattttatttagatttttttagtatttggtttattttatatttgtttatttgttggtagagtgaaaggttttgagagtagggattggtttgtttattagtgtattttttagagatgtgtttgttatagagagtgtaatatattttttaattttagaggttggaaaatagaggttagagaggggaaagagttaatgtaagttatgtagtgagttagtggtaaaattttattaaattttaattttttagatttttattttagtatttttttttgttttttagggtttattttttattttttattttagagttttttaggtaataaaggggatagaattgttttgtacgggttttgttttttataatattttttaaagtggagtaggttagtttataattttttttttgtagtttatttcgtaagattataaggtttggtttagttttagtttttggcgtttatttttttttggtggttagtagaacgtatagttttttttttattttttgtttttggtagagggttagtttgttgggttggtttttgtagttggattataattgtggttttagtgtttggagaatggggttaggatattgggagaatgggattttttcggaagagggatgtataaatt

SEQ ID NO: 1947 - DNA, 2417 bp, Artificial Sequence
  chemically treated genomic DNA (Homo sapiens)
ggtcgagacgggtagattacgaggttaggggatcgagattattttggttaatacggtgaaattttatttttattaaaaatataaaaaaattaggtaggtttggtggtaggcgtttatagttttagttattcggtaggttgaggtaggagaatggcgtgaacgcgggaggtagagtttgtagcgagtcgagatcgcgttattgtattttagtttgagtgagagagcgaggttttattttaaaaaaaaaaaaaaaaaagatattcgattttatttttatttaatgttaaatgaggttggaggtgaatgttttttttattatatttaatttatttttttttcgaattgattattttttaattgcgtatttttttttttgtttaggaaattattgtatttaggttaatttaatttatggggaaggtggtaaggagggtagaaagtgtgtgggtttaatattagagtttaaattttttttttattgtttattagttgtgtaattttggatagattttttagtttttttaagttttagttttttttgtttgtttgtttgtttgtttttgagataagagttttgtttttgttgtttaggttggagggtaatggtttaattttagtttacggtaattttcgttttttgggtttaagtaatttttttgttttagttttttaagtagttgggattataggtttttgttattatattcggttaattttgtatttttagtagagacggggtttttttacgttggttaggttggttttaaattttcgattttaggtgattcgtttattttggttttttaaagtgttgggattataggcgtgagatattacgttcggtcgttcgttatgaaatgggggtaaaaattgtttataggtttgtggagagaagattataaatttgtaaagtttttagtattgtgtttagtatgtggtaggtgtttattaaatcgtggttgtttttattatgatgttaagtatgggaatacggaggatatagttggagaggagatttgatgatttttttggtggagggtggttagggaaggagtggaagagagagttggggagaggaaattgtggttataaagaggaagagagaggtagagttggaggtgatattaggggagagagaggagtgggttcggcgatggttatgttgggcgaggtgtggagagtatagttgtgttatttattagttgtttttagtttagataatttttgtgtttattttatttttgtttgtttatcgtttttgtcgggttggatatttttattattacggttatcgttgttatattgtcggttgttattttttgttttatttttttttttgtttatgatatggtagaaggtggtaagggaagtagttgtttttcgttagtagtttttttgttattgaaggttgaagttgtttataggtatgggtaaagagtttaggttttaaagatagatgagttgggtttcgtttttagttttagtatttaggagcgggatgattttagtaagggagatgatttagttaaagttttagtttttttatttgtatagtagggataatagggttgttgagaagaaggaatgagattatgcgtggtaagtatttagtttagtataatgtttggtatatagtaagtgtttaatatacgttcgtgttcgttatttttaaggttaaataggtttgtgatttgtgtagttatatagggttttatgtttaggacgggttttaaatttggttaatgttttgttattattattttgaaacggttttttttttttttttttaagagatagggttttattttgttgttaagattgtaggattgtagtggtatgattatagtttattgtagtttcgaatttttgagtttaagtgattgttttattttagtttgttgagtagttaggaatataagtaggtattattagttattttattttttaattttttttttttttattattttttagagatagggttttattatgttgtttaggttggtttcgagtttttggtttgaagagattttttcgtttttgttttttaaagtgttgggattataggtatgagttattgtacgtagttttgaaatttttaatagtttttgaataagggttttgtaaattatgtagttagttttggttattattaatatatatttattgagtttgttggttggtagtggttatagaaggggatatttgtttagtagtttgttaaagatgtgggatattagacggttttgggagttttaaaggagggatttaaatatagtgatgtggtattatgttaggttgttagtaattagagattaagagggtagtgagatttttatatatatttttattggggtcgggtatagtggtttatgtttgtaattttagtattttgggaggtcgagatgagtagatta

SEQ ID NO: 1948 - DNA, 2417 bp, Artificial Sequence
  chemically treated genomic DNA (Homo sapiens)
tgatttgtttatttcggttttttaaagtgttgggattataggtatgaattattgtgttcggttttagtgagagtatgtgtgggggttttattgtttttttagtttttaattgttggtaatttggtatggtgttatattattgtatttaaattttttttttgaggtttttaaggtcgtttaatgttttatatttttaataaattattggataggtgtttttttttatagttattgttagttagtagatttaataaatatatgttaataatagttaggattagttatatagtttgtagagtttttgtttaaaaattattaagaattttaaggttgcgtgtagtggtttatgtttgtaattttaatattttaggaggtaaaggcgggaggatttttttaggttaggaattcgagattagtttgggtaatatagtgagattttgtttttaaaaaataataaaaaaaaaaaaaattaaaaaataaaatagttggtggtgtttgtttgtatttttagttatttagtaggttgaggtgagataattatttgaatttaggagttcgaggttgtagtgagttatgattatgttattgtaattttatagttttggtaatagagtgagattttgttttttaggaaaaaaaaaaaaaaatcgttttaaggtggtggtgatagagtattaattaagtttgggattcgttttgagtatgggattttgtgtggttgtataggttataaatttatttggttttgaaaatagcgaatacgaacgtgtattgaatatttgttgtgtgttagatattgtgttgggttgggtgtttattacgtataattttattttttttttttaatagttttgttatttttattgtgtagataaggaaattgaagttttagttgagttattttttttgttgaggttatttcgtttttaagtgttagagttgggaacggaatttagtttatttgtttttggagtttgagttttttatttatgtttgtggatagttttagtttttagtggtagggaggttgttggcggagggtagttgttttttttgttattttttgttatattatgagtaggaaggaagatgaggtaagaaatagtagtcgatagtgtggtaacggtgatcgtggtggtaagggtgtttaattcggtagaggcgatgggtagataaaaatgagatgggtataggaattgtttgagttggaggtagttgatagatagtatagttgtgttttttatatttcgtttagtatggttatcgtcgaatttattttttttttttttttgatgttatttttagttttgtttttttttttttttttatggttatagttttttttttttagtttttttttttattttttttttggttattttttattagggaggttattaggttttttttttagttgtgtttttcgtatttttatgtttagtattatagtaagagtagttacgatttagtgagtatttattatatgttaggtatagtgttagggattttataagtttgtaattttttttttataaatttgtaagtaatttttatttttattttataacgggcggtcgggcgtggtgttttacgtttgtaattttagtattttgggaggttaaggtgggcggattatttgaggtcgggagtttgagattagtttgattaacgtggaaaaatttcgtttttattaaaagtataaaattagtcgggtgtggtggtaggagtttgtaattttagttatttgggaggttgaggtaggagaattgtttgaatttaggaggcggaggttgtcgtgagttgagattgagttattgttttttagtttggataataagagtaaaatttttgttttaaaaataaataaataaataaataaaaaaaattgaggtttagagaggttaagagatttgtttagggttatatagttggtgagtagtgaggaggagatttgggttttggtgttaagtttatatattttttgttttttttattattttttttatgggttgggttggtttgagtatagtggttttttgagtagggaaggagatacgtaattgagaaatggttagttcgagggaggaataaattgggtatggtgagagagatatttatttttaattttatttggtattaggtgggggtggagtcgggtgttttttttttttttttttttgagatggagtttcgtttttttatttaggttggagtgtagtggcgcgatttcggttcgttgtaagttttgtttttcgcgtttacgttatttttttgttttagtttatcgagtagttgggattataggcgtttgttattaagtttgtttaatttttttgtatttttagtagagatggggttttatcgtgttagttaggatggtttcgattttttgatttcgtgatttgttcgtttcggtt

SEQ ID NO: 1949 - DNA, 2464 bp, Artificial Sequence
  chemically treated genomic DNA (Homo sapiens)
atttttgttataaaaatttagttttttaagtatggtatattttttttttaagggttagaaatgaattttaaattattttgttgtatttttttattagaggaagaattgtttttttttttttttttttttttttttttttttttttttttttttttttttttttttttttgagatagagtttcgttttgttgttttagttggagtgtattggtaaaatttcggtttattgtaatttttattttttgagtttaagtgattattttgttttagttttttgagtagttgggattataggcgtatgttattatgtttagttaatttttgtatttttaatagagatagggttttattatgttggttaggttggtttcgagtttttgattttaagtgatttatttattttagttttttaaagtgttgggattataggtatgagttatcgggttaggtaggaattgtttttttttttttttgttatttagaaattagtaaattttatgatggttatttatttataatttatttttaagaatattttgttaatgatattttaagtaagatgtgataatagttatataaagtagtttatagtatgtagtgtgttttaatgtttttgagaagtagtaataatttttgtttttagatggtttttagttttttttcgtgttatttttttgttttagattgtggtttaattgtttataaggatttaacggtatgtaaatagttgttagttggtttttttaaaagaggtattgttgattggaaagattggtttatatttaaattttgttttttttgtaaatgttagatttttttaatagtattttagaggaaattttgttttgaatatagttattgaatttgattagattatagatatagtattatttatattgtttaatgttaagatatagtatttttgattttttgtatgttataacgttttgaagattgagttattgatgagaaatttttgtagttatatatttttttatagtttttgttttttatttaagtaggttttagggtttatggtaagatgatttttttggggagaaagagtttgagatttagaaatttaatttgtataatgaattttggtttttttttttttttagggatttgattttttttttttttttttttttttttttgttataggattttatgttttattttagcgtagtttggttgattgatgttttattttttatatgtattgatatgacgtgtgattgtttaggtatagttggagaagttggagaagatagtattttatttttttttttagaattaattattgattggagggttaatgttttaattttgatgtgatttagtaggttatgcgagggttgtttttaataggagtagtgtttttttttttttgcgtagtttttgatttagttcggtatgttttttggtgatattgttgttcgttatatggtttagtgttgtaaatatttttatataattatatttgtttatttaatttttaagtgtttttttaatagagaaaataattattttatgagtttaaaatttgtaaattttttgtattttttaaaagattttttttaattataaaaattttttttatgttttattttaatattttataaattttgtttagtttgttgattttgtatttgaaatttatattataataaaataaagataaaatttaatatttttttttagatgtattgttaagtattttaatatagtttgttgaatattttttttttttttgttgatttgaaatgttaatttttttatatattaaatttttatatagatatatggttgtggttttgtttaatatttttttttattgatttgttggtatatttttatgttattatttatgtttaattattgtaggatgaatatatatagatatatgtatatttatttgtttatattagagtagtttttttttattgtttttgttttttaaaattattatagttatttttgtttatttattgtttagtatattttgtttttagtaatcgattgtaagaaatgaatgtaataatttttttaaatggttttgatgttgaaaagattgtaaaaaaatgaagtatatattggttaatttagtatattttttgaaagatattgtttaagattttatattgattttgtaagattattttagggaaataagtgtgttattgtggtggatatatttattataattttattatttgaggatgtattttattattttgatgatggttttaaatttattttattttaatataaagtggattttgtaattatagtttttgtttattaattgtgatacgtggattttattattttgttgtttttgaggtattttttgtatttgtttttattaggtttatgaaatttgtgaattgggtatttttattgaatttttaattttttattatttttaaacgatcgaataggttaaaaatgttgtagattg

SEQ ID NO: 1950 - DNA, 2464 bp, Artificial Sequence
  chemically treated genomic DNA (Homo sapiens)
tagtttgtagtatttttagtttattcgatcgtttgaagatgatgaaagattaaaagtttagtaaaaatgtttaatttataaattttataaatttaatggaagtaagtgtaaagaatgttttagaaataatagggtgatggaatttacgtgttataattagtggataagaattatgattgtaaagtttattttgtgttagaataaggtggatttggagttattattaaaatgatgagatatatttttaaatggtgagattgtggtgggtgtatttattataataatatatttatttttttggaatgattttgtaagattaatatggaattttaaataatattttttaaaaggtatgttaagttggttaatgtgtattttatttttttatagtttttttaatattagagttatttaaaaaaattattatatttattttttataatcgattattggaagtaaaatatgttgaatagtaaatgagtaaggataattataataattttaaaagataagaataatgagagagaattgttttgatatagatagatagatatatatatatttatatatatttattttatagtaattgaatatagatggtggtatgggaatatgttaatagattagtggaaaagaatattggatagagttatagttatgtatttgtatggaaatttggtgtatgagaaaattggtattttaaattagtagagaaaaaagaaatatttaataaattatgttgggatatttggtaatgtatttgagggaaaatattaaattttatttttattttattgtaatgtaaattttagatgtaaaattaataagttaaataaaatttataaagtattagaataaaatataaggggaatttttgtaattgaagaaagttttttagaaaatataagggatttgtagattttgagtttataaagtgattgttttttttattaaaaagatatttaaaaattgaatgaataaatgtaattatataaaaatatttgtagtattgggttatgtggcgagtagtagtgttattaggaaatatgtcgagttgggttaggaattgcgtaaggaggaggagatattgtttttgttgaaggtagttttcgtatgatttgttgaattatattaaggttgaagtattggttttttaattaatgattagttttgggagaggggatgaggtgttgttttttttaatttttttaattgtgtttgaatagttatacgttatgttagtgtatatagagaatgaagtattagttaattaaattacgttggagtggagtatagagttttgtgatagaagaggaggaggaagagaaagaagaattagatttttaaaggagggaaaaagttaggatttattatataaattaaatttttaagttttaggttttttttttttaaggaaattattttgttatgagttttagggtttgtttgaatggagagtaagaattataggaggatgtgtagttgtaaaaattttttattaataatttaatttttagaacgttatgatatatagaaaattaaagatgttgtgttttagtattgagtaatatgggtggtgttatgtttgtagtttggttaaatttagtaattgtgtttaaaataaaattttttttggaatattattgagaaaatttggtatttgtaaaaagggtagagtttaaatatgagttagtttttttaattaataatattttttttaagaaaattaattaatagttgtttgtatgtcgttgaatttttgtgagtagttaggttatagtttaggatagaaagatgatacggggaaggattgagggttatttgagaataaaagttgttgttattttttagaggtattgagatatattgtatgttgtagattgttttgtgtaattgttgttatattttgtttgagatgttattggtagaatgtttttaaaaataaattatagataaatagttattatggagtttgttggtttttagatagtaaaagagaaaagaagtagtttttgtttggttcggtggtttatgtttgtaattttagtattttgggaggttgaggtgagtagattatttgaggttaggagttcgagattaatttggttaatatggtgaaattttgtttttattaaaaatataaaaattagttgggtatggtggtatgcgtttgtaattttagttatttaggaggttgaggtaggataattatttgaatttaggaggtggaggttgtagtgagtcgagattttgttaatgtattttagttggggtaatagagcgagattttgttttaaaaaaaaaaaaaaaaaaaaaaaaaaagaaaaagaaaaagaaaaaagaaaaaaaaaagaagtagttttttttttaatgaaaagatataataagatagtttgaaatttatttttggtttttagagaagaagtgtgttatgtttggaagattggatttttataatagagat

SEQ ID NO: 1951 - DNA, 2443 bp, Artificial Sequence
  chemically treated genomic DNA (Homo sapiens)
agaggttgtagtgagttgagatcgttttatcgtattttagtttgggtgatagtgcgagattttattttaaaataattaaataaataaatatatatatatatatatatatatatatatgggtcgggtattgtagtttatatttgtaattttagttttttgggaggttaaggtgggtggattttttgagtttaggagtttaagattagtttggttaaattttatttttataaaaaatataaaaattaatttagcgtggtggtgtgtgtttgtggttttagttatttgagaagttgaggtgagagaattattagagtttgggaggttgaggttgtagtgagttgtgtttatgttattgtattttagtttgggtaatagaatgaaattttgttttaaaaaaaaatattttatagtaatagaagggaatttttatggaaattatggattttgggtgataatgataaatttgtgtagatttattgattgtaagaaatgtgttattttggtgagggttgttgataaggggtgcggggtaggggtagggggtagtaagcgggggtagggaatttttttttttttttttttaatttttttgtgaatttaaaattgtttttaaaaattaagtttttaatagaaataaatatataataaattttaaaaatattaagatttgaatgtcgaaaaaatttgtaattgttttaataattatagataataatagtatatagattatattataatcggcggttttttcgtatgtagttcgttttattcgtagtgtgaaagttttattagtttcgattttaagtagtgcgttttttttaatttttttttacgttttggtttttattttatttttgaggtttatagttgtttaagttatggtatgtgtagagagagatttttttttgttgattgtatgaaaaattgtgtaaaaggggttgttatttaaaaaagcgtgtgatattgggagagattttgtatagtgagtagggttttttatgagtttattttggattttttattgagaataggatgttttgttaaggatgggtaaagaggggtatagtagaaagataaaaggatgtgttagttataaaaattacgtgggttaaggatagggggttgtaatgtaaagattggaatttgtagtacggtaaattagagcgtggtaagattagcgttttagattttagataaggttatttttttttttaggaaagacgatttttttattaatataagcgtttggcgtttttttttttcgtttaggcgttttggttggaacgaggaaatttaaaagtgttacgaaagaataaaagtggtttaaattttgaaaatttttaaaattaaaagattgtaatttaaaggaagataaagagtatgatttttaatttttttaagttattttatttatttttagtgttaaaaatttaatgttagttttatatagtaatttatttattgtagttgaaatttgaggtgtgaaaagtttcgtgttgataaagatttgtattagttgttgtcgttaaataatatgtaaaaatttgtagtttaattttagttttagaataaataagcgtttttttaaatttatttaggagcgtaggttgttattaggtttataggtgtgttttgaaattagatattattaagaaattttatcgtgttaaaatgaataaggagtcgggacggtataatttattattttttaatgtgttttgggaattgttttaataagtgtggaagtgttttagcgagatgttgtatttagtttttattgtgtatatattaagttagcgtgcgtgtgtgtgtatgtatatatgttcgtgtttgtattttatattagaaggttttaggaaaagagtgataaataagatgaagcggtaagagggtattaaagattataattaaaggcgtttgagagtagttagttggttttagtttatttttttaattagttttatttattttgttgtttcggtgtagtagatattgtgtagggtttcggtagagatataggggttacggagatataagttattttcggggaatttttagtttaattaatatataaatagtagtgatattcggtagaagcgttataaggtagggtaggttataaggtagggtaggtgaagtgttttggtggttttgggtgatagttattgttatatattattttttaggagttttggggttatttgaaaaaaaaagagatttgatgaattagttttttttttaggggtgaaagttgtttagttttttgtggtaaagaaatataaaatgaatggaaaaaagaagaggttatatgggtgaattattaaatgtaaggagtggaaagatattatatttgtgtaaggaatatataaagatttttttaatttttagttataatatttataatgataaattatatattagttttgtgaattttatgtgtaat

SEQ ID NO: 1952 - DNA, 2443 bp, Artificial Sequence
  chemically treated genomic DNA (Homo sapiens)
gttatatataggatttataaggttagtgtgtaatttgttattataaatgttatgattaaaaattagaaaaatttttgtgtgttttttatatagatgtaatatttttttattttttatatttaataatttatttatataatttttttttttttttatttattttatatttttttgttataagaaattgaataatttttatttttggaagaaaaattagtttattaaattttttttttttttagatggttttaggatttttggaagatgatatgtggtaataattgttatttagagttattaaagtattttatttgttttgttttgtagtttgttttgttttgtagcgtttttgtcgggtgttattgttatttgtatgttaattagattgggggtttttcgagagtggtttgtattttcgtgatttttgtgtttttgtcggggttttgtatagtatttgttatatcggagtagtaaaataaatggggttggttgaaggagtaagttaaggttagttaattgtttttaagcgtttttaattatggtttttggtgtttttttatcgttttattttatttattattttttttttgagattttttaatatagaatgtagatacgaatatgtgtgtatgtatatatacgtacgttggtttaatatatgtatagtggaagttgaatataatatttcgttgggatatttttatatttgttaagatagtttttaaaatatattaaaaaatgatggattgtgtcgtttcggttttttgtttattttagtacgatagaattttttgatagtgtttgattttagagtatatttgtagatttagtgatagtttgcgtttttgggtgggtttggaaaagcgtttatttgttttgaagttaaaattaaattgtaagtttttatatgttgtttagcggtagtagttgatgtaaatttttgttaatacggaattttttatattttaggttttaattatagtaagtggattattatgtaagattggtattgggtttttggtattgaaaatgaatgaagtagtttggagaaattaaaagttatgttttttatttttttttgagttataattttttaattttaagaatttttagaatttgggttatttttgttttttcgtagtatttttgagttttttcgttttagttaggacgtttggacggaaaagggaagcgttaagcgtttgtgttggtgaggagatcgttttttttggagagggaagtggttttgtttggagtttgaaacgttaattttgttacgttttagtttgtcgtgttgtaagttttagtttttgtattgtagttttttgtttttggtttacgtggtttttgtagttggtatatttttttgtttttttgttgtgtttttttttgtttatttttgataaaatattttgtttttagtgaaagatttaggatgaatttatgggaagttttgtttattatataaggttttttttagtgttatacgtttttttagatgataattttttttgtataattttttatataattagtaggaaaaaatttttttttgtatatattatgatttagatagttatgggttttaaaaataagatgggaattagaacgtaggggaagattaaaaaaaacgtattgtttaaaatcgaagttaatgagatttttatattacgaatgggacgagttgtatgcgggaaaatcgtcgattgtaatgtggtttatgtgttgttgttatttatggttattagaataattataaattttttcgatatttagattttagtatttttagagtttattatgtgtttatttttattaaagatttaatttttaagagtaattttaagtttatagaagaattaagaggaaggaagagagagttttttgttttcgtttattgttttttgtttttgtttcgtattttttattaataatttttattagaatggtatattttttataattaatgaatttatatagatttgttattattatttaaagtttatagtttttatgagggtttttttttgttgttataaagtatttttttttgaaatagggttttattttgttgtttaggttggagtgtagtggtatgaatatagtttattatagttttaattttttaggttttagtgatttttttattttaattttttaagtagttgggattataggtatatattattacgttgggttaatttttgtattttttgtagggatggggtttggttaggttggttttgaatttttgggtttaagggatttatttattttggttttttaaagagttgggattataggtatgagttatagtgttcgatttatatatatatatatatatatatatatatgtttgtttgtttgattgttttgagatggagtttcgtattgttatttaggttggagtgcggtggggcgattttagtttattgtaattttt

SEQ ID NO: 1953 - DNA, 2189 bp, Artificial Sequence
  chemically treated genomic DNA (Homo sapiens)
tgttattgtattttagtttgggtgatagagcgagattttgttttaaataataataaaaattaaagtatttattagagtttttggaatatattatttgtggataaggggaattattgtatatatagatttttgtgaagaatattgttaataatttaagagtaattatttatttagggtttataatgagtttagtattggagttttttgtttatttttggaaattttttgtttagatgtaaatatagttgaatttttatttttttttgttgatagttatttatttatattttttttattagagatagaaagaaaagaataaagattaaaaaattttgttgattattttttttttttattttttgagaagtgttaatagaattgaaaatattagtaaggaaaaacgttttcgaggaatagagttaattggatttttaaaatgttgttatgaaaggtgtatttttgggatatgaatttgattttttttttttttttttttttattttttttttttttttttttttttttttttgttttttaaaattattcgtattttttttatgaggtatgtagattttggattatttttttattttttagttaattgtattttaaaatagttttaataaggttgggtacggtggtttagtttgtaattttaatatttggggaggtcgaggcgggcggattatttgaggttaggagtttgagattagtttgattaatatggatttcgtttttattaaaaatataaaattatttcggcgtggtggcgtatgtttgtaatcgtagttattagggaggttgaggtaggagaatcgtttgaattcgggaggtagaggttgcggtgagcggagatcgcgttattgtatattagttagggaaacgagagtgaaatttcgttttaaaaataaataaataaataaataaaaaacgttttagtaatagtgtttttaagaatttggttttttagttttttggtagagaagatttattgttgtcgttagtttttaagatggtatttgttggaggcggtaggtagaggttttaagtgtggattttaattttcgtggggattgaatttttgcggttgttgtttgtttaggtacgtttgttttttatgaattttttttatttatagggttttaaattttatgtcggcgggaggaggaaggagattgggtataatttattagattttcgattgtaagagttggaggtcgtttgcgggtttatttgtattcgggtttgtttttatttttttagaatgtaaattttttgagggaatgtgtcgtcgttattttttagttttttgagtgtatttagtttttttttaatttaaaattttttatttacggtaattgtgagaatgataagaattttttttattttttatatcgtaaatagttgtaatgtttagtgggatttatttttgtcgttattaattttgttattttagttacgtgagtttttcgtttgttagttaagtaaaatggtttttttgtagtcgtacggttttttggtttttgtttagggtttcggggattttttttagttattgttttgtatttatttattagatcgtcgttttggtgggcgtttttggttttgtttttcgcgtttagtttgttattgcgcgtttagattcggaattttagtttcgaagttttcggtggtcgggaataaagtcggttttgtttattgttgtttggtaaagtaggcgtttgttagtatttattgaatacgtttatgtgtttagaaacggttttattggttgggattatttttttcgatgtttatttgtttagaattttttttttgggatgtcgatttttttaatacgtgttaggagttttttttcggttcggaatttttagagtgtttatagtggatagggtatttggatatattttagattaatttacgttttttcggaggattttagaggttggaagtttttttaagattaggggcgtagtgtttttttggtttgcggaagagttagaggagtggggataatatttaatattagtttttattatcgttagcgcgatttttcgtcgtcgttttatttatttgacgcgcgtagtggatcgcgatttaggggtatagggtttttcggggattagcggttggagcgtttcggtcgagtattcgtagtttcggcgtcgcggtttcgtttcggtttcgtt

SEQ ID NO: 1954 - DNA, 2189 bp, Artificial Sequence
  chemically treated genomic DNA (Homo sapiens)
ggcggggtcggggcggggtcgcggcgtcgggattgcgggtgttcggtcggagcgttttagtcgttggttttcgggagattttgtgtttttaaatcgcggtttattgcgcgcgttaggtgagtagagcggcggcggggagtcgcgttagcggtagtagaggttgatgttgaatgttgtttttatttttttgattttttcgtaggttaggggagtattgcgtttttaattttggaggggtttttaatttttggggtttttcggggaaacgtgggttagtttggggtgtatttaggtgttttgtttattgtgggtattttggggatttcgggtcgaggaagggtttttggtacgtgttgaaaaagtcggtattttagaaggaagattttgggtagatgggtatcggggaaggtagttttaattaatgggatcgtttttgagtatataagcgtatttagtgggtgttaataagcgtttgttttgttaggtaatagtgagtaaaatcggttttgttttcggttatcggaagtttcgaggttggggtttcggatttgggcgcgtaatgataaattaagcgcgggggatagggttaggagcgtttattagggcggcgatttggtgggtaggtgtagggtaatggttggaaagggttttcgaagttttgagtagagattaaagggtcgtgcgattgtaggaaggttattttgtttggttgataggcggaaaatttacgtggttggagtagtagggttggtgacgataagggtgaattttattaagtattgtaattgtttgcggtgtgaggggtgagggggatttttattatttttataattgtcgtggataaagggttttgggttggagagagattgggtgtatttaaaggattgaaagatggcgacgatatatttttttagaggatttatattttggaagggtggggataggttcgggtatagataagttcgtaggcggtttttagtttttatagtcgaaagtttgatgagttatgtttagtttttttttttttttcgtcggtatgaggtttggggttttgtggatgaaggaagtttatgggaggtaaacgtgtttgggtaagtaatagtcgtagagatttagtttttacgggggttagaatttatatttagggtttttgtttatcgtttttagtaaatgttattttgaggattagcggtagtagtaggttttttttgttagagaattggaaggttaggtttttgagggtattgttattaaggcgttttttgtttgtttgtttgtttgtttttgagacggagttttattttcgtttttttggttggtgtgtaatggcgcgattttcgtttatcgtaatttttgtttttcgggtttaagcgatttttttgttttagtttttttagtagttgcgattataggtatgcgttattacgtcgggataattttgtatttttagtagagacgaggtttatgttggttaggttggttttaaatttttgattttaggtgattcgttcgtttcggtttttttaagtgttgggattataggttgagttatcgtgtttagttttattaaggttgttttgaagtgtagttggttggaaagtggaagaataatttaagatttgtatgttttataaaaggagtgcgaatggttttgaaagataggaaaggaaagggagagagaggaaagaaatagagaggaagaaaggaaggaaattaaatttatattttaggaatgtattttttatgataatattttggagatttaattaattttatttttcgagggcgtttttttttgttggtatttttagttttattaatattttttaaaaagtgaaaggaaaaaatagttaatagggttttttggtttttatttttttttttttatttttagtaagggagatgtgggtgagtggttgttagtaggaaaaggtgagagtttagttatgtttgtatttgagtaggaaatttttaaggatgagtagggaattttagtgttgggtttattgtgagttttgaataagtgattgtttttgggttgttagtagtattttttataaagatttgtgtatatagtggttttttttatttataggtgatatgttttaagagttttagtggatattttggtttttgttgttgtttgaggtagaatttcgttttgttatttaggttggagtatagtggta

SEQ ID NO: 1955 - DNA, 2367 bp, Artificial Sequence
  chemically treated genomic DNA (Homo sapiens)
tggtttatagttttgtaggttgtataggaagtatggtgttggcgtttgtttttggtgaggttttaggaagtttttaattgtggtggtgggtgaagggggttaaagtattatatggtaagagtgggagtaggagaggagggggtttttagacgtttaaatatttagagtttaggtgaattgattgagtgagaattaatttatattaaggggttggtgttgaattgtttatgatatgattgatttatttttgtgatttagtattttttattaggttttttttttaatattggggattatattttatatacgttttggagggatatatatttaaattatattagtatatatggtttttaaatgttatttagtttttttttatgcgatgttagaaggttgacgtttgggggtgtgtagttttttaggatattttttttgaagggttgtagtaatattttaagtgttatatatttatgtgttatgttagtgttagttttaaggatgtgtaatagttaagggttgagttatttgggattaaatattcgttttgtatagatagtgtttatggtgtggattaatttgtttttgtttgttgttgggattgggtgtcggttgttgtcgtttttatttttcgggagtttttgttggttttatagggtagtattatatgaaggttgtttttcgatgtttagcgttgaggtgtgaagattgtattgtgttcgagatacgagttttacgtggttgttgttttttttatacgttttgtgatggatttttttttattaggtggttttttgtttgtggttagtatatatatataggatatgaaagatatagggtatgattataagttatgtatttttttagggattaggatatatagagagagttttttttgttgtttttcgtttatattataacgaatatttagttggagagttaagagaggggttagggttgagaggttaagagttttggggtttttgattatttttcgtcgtcgggagaaagaggaatttgtaaggtttaagcggatggtatggatgtatgtaatgaagatcgggaagtagattttgggtgggagagttgttttaagtagaaaaatagttaatttaaatttatttttggttgagtttgagcgttagagtaaggtagggaagagtgttcggaatgttgagttagtttaggttgttgtaggttgtattgtatggattttagtattagtaatgtgtgtatagaaaagtcggtttttttcgttgttatcgattgtttattaaagtgaatttgggtagcgtcgattttgttgttgaaagtatttgattttttgttgtatggattttttttttagggttaattgtgattgtagatttaattatcgagaaaatttgtattttataggataatttttttggttttatgtttatattaattgaaatattagatagatttttgtaagtattataggtatgtttggtttttaagttttagtagagatttttttttttattaataatatgaaatagatttaaaagaaatataataaagtaatgtttttttgattttttttgtgttgattttgtatttttttaaattgatattaatttttaagtatatttaattttaagttttttaataaataatatatttagtagaaatttatttatatgttatttataatttggagaatttttgtttatgttgtttttgttgtaatggggagttatagtattttgattatagaaatatatattaaaattatgattagaatgtaagtaaaaaaataatgtggtatgtagttgtttaatagtattggatgtaaaagaattaaatagtataatatataataatataaaagataatttttaagtatgtgttaggttttttttgatgaattgtaaagaagggataataatatatattattattatttgttattattttattaaagaagtttggttttggtttttagtggatagaggtatagataggtggagttgtatttgtggatgtatacgtatgtatatatataagttcgtatgtttagatcggtagttttgagtatttaggttagttaatattattttattttttatgttttagttgatattatttttgaattataaaataaaatgtttaaatattagaaaataagtattttatgttttttttggaggtaggaatatttttttattggttgataaagtgtattttatatttgaagttagatttttatttttttatgatgaggattgtgatttaatacgttagttggttttggtttttttgatttaaggatatataatattttaagagtatttggaatgtttagtttaattaagatggttttagtatgaatgggaaatcgggata

SEQ ID NO: 1956 - DNA, 2367 bp, Artificial Sequence
  chemically treated genomic DNA (Homo sapiens)
tgtttcgattttttatttatattgaaattattttagttaagttaagtattttaaatatttttgaaatattgtgtgtttttagattaagagagttaggattaattgacgtattgagttataatttttattatggaagaataaaaatttaattttagatatgaagtgtattttgttaattaatgaaaagatatttttgtttttaagagagatatagaatgtttgttttttgatgtttagatattttattttatagtttaaaaatagtattagttgaaatataaaaaatgggatgatattaattggtttgagtgtttaaggttgtcggtttagatatacggatttgtatgtgtgtatacgtgtatatttataggtatagttttatttgtttgtgtttttgtttattggaggttagaattagatttttttaatgggatagtagtaaataataataatatatattgttattttttttttgtaatttattagaagaaatttggtatatatttgggagttgttttttgtattgttatgtattgtgttgtttaatttttttatatttagtgttgttagatagttatatattatattgtttttttatttatattttaattataattttggtgtgtgtttttatagttaaagtattgtgattttttattgtaataaaagtaatataagtaaaaattttttaaattatgaatagtatgtgagtggatttttattgaatatattatttattaaaaagtttaaaattaagtatgtttaaaaattaatgttagtttagggaaatgtaaaattagtataaaaaaaattaggagaatattattttgttgtattttttttaagtttgttttatattgttaatggaaaaaaaaatttttgttgaagtttaaaaattagatatgtttgtggtatttataaaagtttgtttggtgttttagttggtatgggtatgaaattaagaaaattattttatagggtataagttttttcggtgattaagtttgtaattatagttggttttagggaaggaatttatgtagtagaaaattagatatttttaatagtagagtcgacgttatttagatttattttggtaagtaatcggtgataacggaaaggatcggtttttttgtgtatatattgttggtgttaaggtttatgtagtgtagtttgtagtagtttgggttggtttagtatttcgggtatttttttttgttttgttttgacgtttaggtttagttagaggtagatttgagttggttgtttttttgtttagagtagtttttttatttaggatttgtttttcggtttttattatatgtatttatgttattcgtttaggttttatagatttttttttttttcgacgacggaagataattagggattttagaatttttgattttttaattttgattttttttttagttttttagttgagtgttcgttatgatgtgggcggagggtagtagggagaattttttttgtgtgttttgatttttgggaaaatgtatggtttgtagttatgttttgtgttttttatgttttatgtgtatatgttaattatagataagagattatttgataaaaagaaatttattataggacgtgtgaaggaggtagtaattacgtggaattcgtgtttcgaatatagtgtagtttttatattttagcgttgggtatcgggaggtagtttttatgtgatgttattttatgaggttagtaagggttttcgggaaatgaaaacggtagtagtcggtatttagttttagtagtagataggagtaggttaatttatattatggatattgtttatgtaaagcggatatttggttttagatggtttaatttttggttattatatatttttaaagttgatattggtatagtatatgggtatgtaatatttaaagtattgttgtaattttttaggaaggatgttttggaaagttgtatatttttaggcgttagttttttgatatcgtatgaggaggggttaaatgatatttggagattatgtgtgttgatgtggtttggatgtgtgtttttttaaaacgtatgtgaaatgtgatttttagtgttagaggggaggtttggtgggaggtattagattatagaagtgaattagttatgttatgaatagtttagtattaattttttgatatgagttagtttttatttagttagtttatttgagttttgggtgtttaaacgtttgggaattttttttttttttgtttttatttttgttatgtgatgttttggttttttttatttattattataattggaagttttttgaggttttattagaagtagacgttagtattatattttttgtatagtttgtagaattgtgagtta

SEQ ID NO: 1957 - DNA, 2309 bp, Artificial Sequence
  chemically treated genomic DNA (Homo sapiens)
atataatttgttggttttgttgttagttttaatttattgattttattattgttttggggttagttttttattttttagttgtttaaattttttattttatatatttgaattttatgataaattatttttaatattgttttgtttgtaattttattatttttggatttttgtttattgaatttgtttggttaaattttatttttttttatttttgtgtgtaattatataattggttattattggtaaaaattttaaaattatttatagagatagtttagtaggtcgtattatgttattagttagttttatgcgttttttttatggttttttatttattttttggttgatattggtgttttttttttttttttaatttgtattagttcgggttttattttttcgttgagtattagttttgtttttttttggtttttggtaaggtgggggtgatttgaaggaagtttcggttttttttttttgttttgtttacgggtgtttcggtttttgtatttagggttttgttttttatattggggattacgatgtatattttcgtttcgtagagttagttcgtggtttggtttgttcgtttcgtgtgtagttttttgttagtatagttttgtttatttttaattttattgttttttttttggattttttttattagtaaatatatatgttgttatttgttttattttaaaatataattaaaataaaatagagtattttggattgtattttttgttagttattattttcgagtttttggtttgtgtagttgattttacggttaggtttttttttacgttttcgttattttaaatgcgggtatcgcggcgttaaatttgttttttttattgttgttaataatcgtagtttggtcgaatttagtgatttatttttgttttaattttttttggtttttcggtagcgtttaacgtgtgcgatttttttttttttttgtttttagtttttttcgggattcgcgaggcgtttttttttttattttttttttaggagtgtgtttttagtttcgtatttgttttttttatttttagtgtattttcgtcgtaggtattattttttgatttgttatgttattcgtttttttttttattgtatttacgttttattatttgttttggttcgtataatgttagttttgtaaggggtttttttaaggttttatttttaattgattaatgtcgaggatggggagtaatgcgtgtattagagggggttgggtatacgtaggtttgttgttggatggaggagaggtagtattttttgtatgtttgggtggtttttatttttaggtttgcgataagtattttttatttttttattttttgacggagttagttttatttattacgtggacgtgggtgttgtttgtggattaaggttagtgttttgttggttttttttattgtttggtattagtattatatagattaatagattttgttgtttttcgttcggaggggttggtgttgtggttggggtatcgttttgggtaggtttcgttttaggttatgtagtttttaggtttttttttgggaggggttggtttttataaagggggaaaattatgaaatggtaaatttgagttacggtagtatagaggatagtttttgaaggtataagtaggaagggtataatgttttttaaaagagaaaattatatggattttattgatttattattgagttttgagattattgatatttatatatgtgtttacgttgttgtgagttatggggaaaaatggaggagtaaaatgattaagtggtagggtttgtaagagttttttattgtagggatgggttgttttgaggagatattgtttaggtttgggtgtttcgggttaaagttttgatttttgtagggttgtgttttgtggatgatatgtggtattggattgtttattgataggtaggaattatgtattgagaggtgggaattgttggtcggggggtgggaattgttggtcgaggggtgggaatcgtttgttgaggggtgggaattattggttggggagtgggaattgggtattgagaggtgggaattgttgattaggaggtgggaattgttggttcgggggtgggaattatgtattgagaggtgggaattgttgattaggggatgggaattgtttgttgaggggtgggaattgtgtattgagaggtgggaattgtgtattgagaggtaggaattgttggttagggggttggaattgtttgttgaggggtgggaattgtttattgagaggtaggaattgggttgagtgtttagtttttttgttttgt

SEQ ID NO: 1958 - DNA, 2309 bp, Artificial Sequence
  chemically treated genomic DNA (Homo sapiens)
gtagaataggaaaattgagtatttagtttagtttttgttttttagtgggtagtttttattttttagtaggtagttttaattttttggttagtaatttttattttttagtgtatagtttttattttttagtgtatagtttttattttttagtaggtagtttttattttttggttagtagtttttattttttagtgtatagtttttattttcgggttagtagtttttattttttggttagtagtttttattttttagtgtttagtttttattttttagttagtagtttttattttttagtaggcggtttttatttttcggttagtagtttttatttttcggttagtagtttttattttttagtgtatagtttttatttgttagtgagtagtttagtgttatatgttatttataggatatagttttgtaagggttaggattttggttcggggtatttaggtttgggtagtgtttttttagggtagtttatttttatagtgagagatttttatagattttgttatttggttattttgtttttttatttttttttatgatttataatagcgtggatatatgtgtaagtgttagtgattttagaatttagtgatgagttagtaaagtttatgtagtttttttttttggaaagtattatgttttttttgtttatgtttttaggggttgttttttgtgttgtcgtgatttaggtttgttattttatgattttttttttttgtgagaattaattttttttagaaaggagtttgggaattgtatggtttggggcggggtttatttagggcggtgttttagttatagtattagttttttcgggcggagaataataaggtttattggtttatgtaatgttggtgttaaataataagaaaaattaataaaatattgattttggtttatagataatatttacgtttacgtggtgggtgggattggtttcgttagaggatgggaagatgagaagtgtttgtcgtaggtttggagatggggattatttaggtatgtaggggatgttgttttttttttatttaataataagtttgcgtgtgtttagttttttttggtatacgtattgttttttattttcggtattgattaattgaaaataagattttggaagaattttttgtaaagttgatattgtacgagttaaggtaggtaataaagcgtagatatagtgagggagggggcggatggtatgataagttagagggtgatgtttgcggcggggatgtattgagaatagagagggtaggtgcggggttggagatatatttttgagagggagatgggagagagggcgtttcgcggatttcgaggaaggttgaagataggagaagggaggggtcgtatacgttaaacgttgtcgaaaggttaggagagattaagatagaaatgaattattggattcggttaggttgcggttattgataatagtgggaagagtaggtttggcgtcgcggtgttcgtatttggggtggcgagaacgtgaaggaggatttggtcgtggggttagttgtataggttaggagttcgagggtggtggttggtagaaagtgtagtttaaagtattttgttttgttttgattgtgttttaaaatgggataaataatagtatgtgtgtttgttgatggggagaatttaggagaaaaatagtgaagttgagggtgagtagagttgtgttggtagaaagttgtatacggggcgggtaggttaggttacggattggttttgcggggcggggatgtgtatcgtggtttttagtgtggagggtagggttttggatataggggtcggggtattcgtggatagggtagggggaggagatcgagattttttttagattatttttattttgttagggattaggagagagtaaggttggtgtttagcgggagggtgaggttcgagttggtgtaggttgaggagagggagaaggtattagtgttagttaggagatgggtaggagattatgagggaggcgtatgaggttggttggtggtatgatgcggtttgttggattgtttttgtgggtggttttgagatttttattagtgatgattagttgtgtaattgtatatagagatggaagagaataagatttaattaagtaagtttaataaatagaaatttaaaaatggtgagattgtaggtaaggtagtgttaaaaatgatttgttatggaatttaaatatgtaaggtggagagtttggatagttggaggatgggagattgattttaaaatagtgataggattaatgggttagagttggtagtagggttagtagattgtat

SEQ ID NO: 1959 - DNA, 2697 bp, Artificial Sequence
  chemically treated genomic DNA (Homo sapiens)
gttggcggggttcgtttttttttttgtttttatttggagaattttgggggaattgttggttagagtttttaggtatgtttagaatggattattttttttagggtttacggaatcgtataagttatttaggttttttcggatttttgtagagtcggtggtgggtatagtaaatatttaggttttttgtatttttttgagttttgttttttttattttttatttttttttagatttttttttttattgagttttttttcgtttcggcgaggagggggcgtcgagggggcggggcgtcgtgcgggggtcggaggggagggggcgtcgtggggcggggtttggcggcggcggcggcggcgcgcggggattcggaggtattgggcgcgcgcggtttcggttcgggacgtttcgggacgtttcggggtcgggtttcggttgcggttgttgttgcggcgttcgcgtttcggtgcgtttcgttttttgtgttcgtcgcggagcgtagtttgcgcgttcgtcgtgcgtttttagtttttttttttgagttcgtcgcgatgggagttgcgcggggattttcggttagatttcgtcggttgtttttgtttagcgttttgttgttgtcgttgttgggcggtgagtattcgagagttgggggtatagagtttgggaagcgcgggagtttcgtgggtaaaaggttgcgttcggggcggtgggtttgggcggttggaacggttttggagtagtggagaggttcgttgggggtgtaggtttgcggcggaagggcgtaaggagttcgggtgtcgggaggttggcgaagtttttagggacgcggttagggtattttttttattcgcgtcgcggggacgtatttttagtttttttgagtttttttggtttgagtcgagagtttgttcgagaattgtcgagagttgttggttttcgggtttagatggggagttttttgtcgggggagaaaagattattcgtatttatcgtggggagcgcgatggagaaaaaggaattttttattttattcggtagggtcggtttaggtaagagttgttggtttggggttcgatgtcggatagatttgcggcgcgtaaagcgcggagttttgttatttacgtcgattcgacgttttcggtttttttttttcgagtttttgggtaaagttgagattttagatggttttgcgggtgagggcggaagaagggaagagttaggggtcgtttttatttatggtttttagttattggtttggaattttgcgtttatttcgtgttagggtcgaattcggggattcgagggttttaggttgtcgcggtgattaatgtgtgaaggtcgttgttaaaatcgggtatggtttggttgtaaaggtgcggacggggtttgttttgtttttttttggatttttattttgattgtttttatagaggaaaggaagtatttttaagggaagaaaggtaaaaagagtttattttggttttttttgggggggggttttagtattttaacgagggtgtggtttttattattagggtagatagtatcgtttttttaattttcgtagtttttattttttggtttggttatatttaagagttattattgaggtgttgaagtgttttataggaaagtattaagttattcgtatattttaaatagttcggattggaaataaagttttcgattttttataatattttttggtggttttcgaagtagtttttttttggggagttttgtcgaggagatttgttttaggtgattattttttattttttttgaaggtggtaatgggaagggtatgggtaaggaattgtttttttaatatttttttggtttgttagttgtggaggggttttggtgttggtggaattaatattttttttgtttttagttgtaaaaggagaggtaaatgtaatttaggaaagagattaatttttagggatttggaggaggtgtttttggagttgtttcgttttttttgtgatgtgtgtggtggttattgttcgtggtagaatttatatttgtttttagaggaagtatggaagtttttttgtatagttaggatgggggtttagttatttgggcgagtagtttaagtttataggttttttggttgttttggttgggttttggtgtgtgggtttgtttaatgaggttgtttttattgttgttgtttagggtattagagttaaggggagtttttggtgaagatggggtttttgtttaataaatgttgaatttttaaattttttttatgagaagatgattttgatgttaattgatttaatttggtgattggttggtgtttagtgtgtgtgcgcgcgtgtgtgtgggggattttgttgggggaagttagggtaggttgagggtttaggataggaggtttgtagtttttttaggggtggggggatgttttgtgtttaataaaggaatattttaatgagagttttaaattaattttattaaatgtgttttgttgtggaatttgtttatgtgttgtaaataattttagtggaggtcgaggcgtttgttgttttttagtgaaattttgggatttaatttatttttagacgtatgattttaggggtaacggttttttaatagattatagtagatgtttgtattttattgtttaattgtgtaattaattggagttgtagtgagattttattgttaataaggttggagtaagga

SEQ ID NO: 1960 - DNA, 2697 bp, Artificial Sequence
  chemically treated genomic DNA (Homo sapiens)
tttttattttagttttattaatagtgggattttattataattttagttaattatataattaaataatgagatgtaaatatttattgtgatttattaaaaaatcgttgtttttgaagttatgcgtttgggggtgggttgagttttaggattttattagaagatagtaggcgtttcggtttttattgaaattgtttatagtatatggataggttttataataaggtatatttggtggaattgatttaaggtttttattaaaatgtttttttgttgagtataagatatttttttatttttgaggagattatagattttttgttttaagtttttagtttgttttaattttttttaataggattttttatatatacgcgcgtatatatattaaatattaattagttattagattaagttaattaatattagagttatttttttatggaaggaatttaggaatttagtatttgttgagtaagagttttatttttattagaaattttttttgattttagtattttgaatagtagtagtgaaggtagttttattgggtagatttatatattaaaatttaattaggatagttagggggtttgtgagtttgggttgttcgtttagatggttgggtttttattttggttgtgtaaaaaaatttttatattttttttgggagtagatgtggattttgttacgagtaataattattatatatattataagaaaaacggggtaattttagaaatattttttttaaatttttggagattggttttttttttgggttatatttatttttttttttataattgggggtaggggagatgttgattttattagtattaaaatttttttatagttggtaggttagaaagatattagaaaggtaattttttatttatgttttttttattgttatttttaaaggagatggaaggtgattatttaggataggttttttcgatagagttttttaagagaaagttgtttcgaggattattaaggagtgttgtggagggtcgggggttttatttttagttcgggttatttgggatgtgcgggtggtttggtgtttttttgtaaggtattttaatattttagtgatgatttttaggtgtgattaagttaggaaataaaagttgcgggagttgggggggcggtgttgtttgttttggtgatgagggttatattttcgttaaaatgttaaggtttttttttaagaaaagttagaatgagttttttttgtttttttttttttagaaatatttttttttttttgtgaggatagttaggatggaaatttaggaaggagtagaataaatttcgttcgtatttttgtagttaggttatgttcgattttggtagcggtttttatatattagttatcgcgatagtttgggattttcggattttcggattcggttttggtacggagtgggcgtagggttttagattagtagttagaggttatggatgggggcggtttttaattttttttttttttcgtttttattcgtagggttatttggggttttagttttgtttaggaattcggaggagggaagtcgggaacgtcgggtcggcgtaggtaataaagtttcgcgttttgcgcgtcgtaggtttgttcggtatcgggttttaaattagtaatttttatttgggtcgattttgtcgggtggggtggggaatttttttttttttatcgcgttttttacggtgggtgcggatggttttttttttttcgataagaaattttttatttgggttcgagagttagtaattttcggtagttttcgagtaaattttcggtttagattagaaaaatttagggaggttggaaatgcgttttcgcggcgcgagtgggaggggtattttgatcgcgtttttggaggtttcgttagtttttcgatattcgggttttttgcgttttttcgtcgtaagtttgtatttttagcgagtttttttattattttagggtcgttttagtcgtttaaatttatcgtttcgggcgtagttttttgtttacgggattttcgcgttttttaagttttgtgtttttaattttcgggtatttatcgtttagtagcggtagtagtaggacgttgagtagaggtaatcggcggggtttggtcggggattttcgcgtagtttttatcgcggcgggtttaggaaaaggagttgagggcgtacggcgggcgcgtagattgcgtttcgcggcgggtataggaggcggagcgtatcggagcgcgggcgtcgtagtagtagtcgtagtcggagttcgatttcgaggcgtttcgaggcgtttcgagtcggagtcgcgcgcgtttagtattttcgagttttcgcgcgtcgtcgtcgtcgtcgttaagtttcgttttacgacgttttttttttttcggttttcgtacggcgtttcgttttttcgacgtttttttttcgtcgaggcggggaggagtttagtagggggaggggtttggagagggatggagaatagagagagtaaggtttagggaagtgtaggggatttgagtatttgttgtatttattatcgattttgtagggattcgggagaatttaagtgatttgtgcgatttcgtggattttggggagaatggtttattttgggtatatttggaggttttggttaatagtttttttagaattttttaggtgggggtaggggaagaggcgggtttcgttaat

SEQ ID NO: 1961 - DNA, 2405 bp, Artificial Sequence
  chemically treated genomic DNA (Homo sapiens)
tgtgtaagtttcgattaaatatagagtttttattttttgtgtaagttatttaagagaaaggattttattttttaatttttatttttttagtagaagttattattgttagtttaattttaaatttatatataaattacgaagtttaataattttttaaaaataagttttttaaaaatattttttttgaaataatgttttattgattttgaaaattttttttagttgttgttatgtttaatattttttattgatgatatatgtggtgatgatggtagtgtaaagaaaaagtttgaggaaatatatacggtgttgatattttattaaaatgaatgtagtatttatttataattgtaatttaatttttaagtaaaaatttgattttttattattatttttttaagtttggtttattataggtttaaagtttgtatgaatttatatagttgttttgaggttttgtatatttttttgttttcgattgtttgatttttttttaaaggggtatttttgtattgaagtaaaatataattattaatattagtttcgggggaaaaagaaattaataaatttatagtttgaaatgttttaatattttgtatttaaaattttgcgtattttttagaagttataaaaataaaagttattttttgtaaaaaaaaaaaagaaaaaaagattgagaataaattgttatgattttagaaaacgatagtagacgtgtaggtgttaatattagagagtttattttcgaataaaatggtgttttttaaatagcgattatttatatgttttagaatttttttttgggtatgggtgtttttatattgttttattattataagatgtaagtcgtgtagtagaatgttttttgtatggtatttagttaaaagtgaaataagttgtttattgatagagaggttatttatagaatatatttatttatattagtgttaggtagtaattgaaaggtaatgtaaagaagtaatttttttttattttgtttggagtaattttgatttggagagttatgtatatattttacgttaaggaggtgatgaaagttttattttttatagcgatgatatttggaagaagatataattgttatcgtgagttttttaattatttttggagattaagtgtgagacgtagtagtgtaggatgattggattacgtaaaacgagatagatgttatttgtgagttacgcgtaagttgttaagtgttaaaatgaatatttttattaaacgatggagtttttatattatttgtagtttggttagatttgaaagatgagttgattgtttttagatagtgcggtaaataggtagggatttggaattttttttggttgtatgagtaattattgttttatatttaaattagaaatatgggtttttagttaggttttgagattgtttttaaaggatgttgttgtatttatgttgaagcgtggtttgttttttttgttttatttataagggttatagagttttgagaaagaaattattagttttttttatattatggtaaagaaatgtaaaatttatgattttttgttaggaaataaaagggtttttatattttaaaataatggttataatattgtgggtagaatgtttttaagaattgttaggaggtagtattggagttttgtttttttgcgttttgaggttttagaattaattttttatttataatttatttttttatttttttattggtattaattttattattatttttattttaatttttaattgttgtgattatatagtaatatagtaatatattttatagagtttatggggtatatgatatattttgatataggtatttaatatgtaatgattatattaaggtaagtgggatttttattattttaagtatttattttttgtgttataagtaatttaattatatttttttagttatttttaaatgtataattaaattattattgattatagttattttgttgtgttattaaatattagattttatatatttttttttttttttgtatgtattaattatttttatattttttttttttttttattattttttttagtttttggtaattatttttttattttttattttaatgagtttaattgtttttatttttagtttttataaataagtaggaatatatgaagtttgtttttttgtgtttggtttattttatttaatataaggatttttagttttatttatattgttgtaaatgataggattttatttttttttttggttgaattttattttgtatttgtattatatttttttatttatttgtttgttgatggatatttaggttgttttttaattttggatattgtgaaatatgttgtaatatatatgggtatgtagatattttttcgatagattgatttttattttttgg

SEQ ID NO: 1962 - DNA, 2405 bp, Artificial Sequence
  chemically treated genomic DNA (Homo sapiens)
ttaaagaatggaaattagtttatcggagaggtatttgtatgtttatgtatattgtagtatgttttataatatttaagattaagaaataatttaaatgtttattaatagataagtggataaagaaatgtggtataggtatagaatagaatttagttaaaggaaagaatgaaattttgttatttgtaataatatggatggaattggaggtttttatgttaagtgaaataaattaggtatagaaagataaattttatatgtttttatttatttgtgggaattaaaaatggaaataattgaatttattgagatggaaagtaaaagaatggttattagaagttgggaagggtagtgggagaaaagggggagtgtggggatggttaatgtatataaaaaagagagagaatgtataagatttagtatttgatagtataatagagtgattatagttaataataatttaattgtatatttaaaaataattaaaagggtataattggattgtttgtaatataaagaataaatgtttgaggtgatggaaattttatttattttgatgtgattattatatattagatgtttatattaaaatatattatgtattttataaattttatggggtatattattatattattatgtaattatagtaattaaaaattaaaataaaaataataatagagttggtgttagtaaaaagatgggagaatgaattgtaaatgaaggattggttttggagttttaggacgtagagagatagagttttaatattgttttttggtagtttttgaaaatattttatttataatattgtggttattattttagagtatgggaatttttttgttttttaataaaaagttataagttttatatttttttgttatgatgtgaaaggaattgatgattttttttttagaattttgtggtttttgtgagtgaaatagagaggataggttacgttttaatatgaatgtagtagtattttttggaaataattttaagatttaattgaaaatttatgtttttaatttaagtatgagatagtaattatttatatagttagagaggattttaagtttttgtttatttgtcgtattatttaaaaataattaatttattttttaaatttgattaaattataaatggtatgagaattttatcgtttaataaggatgtttattttggtatttagtagtttacgcgtggtttatagatggtatttgtttcgttttgcgtaatttaattattttgtattattgcgttttatatttagtttttaggagtaattgaaaagtttacggtgataattgtgtttttttttagatgttatcgttataaggagtggggtttttattatttttttgacgtaggatgtgtatatggttttttaggttagagttgttttaagtaaggtaaagagaaattatttttttgtattgttttttagttgttgtttagtattggtgtaaatgaatatgttttataaatggtttttttgttagtgggtaatttgttttatttttggttgggtattatatagaaaatattttgttgtacggtttgtattttgtggtaatagggtaatataaaggtatttatgtttaagaaaggattttaaaatatgtaaatagtcgttgtttagaaggtattattttattcggaggtaagttttttggtattagtatttgtacgtttgttatcgttttttgaaattatgatagtttgtttttaattttttttttttttttttttttgtagggagtggtttttatttttgtaatttttaaagggtgcgtaaaattttaaatgtaaagtgttgaaatattttaagttgtaggtttgttagtttttttttttttcgaggttagtgttaatagttgtgttttattttagtgtaaaaatatttttttaaaaaaaaattaaataatcgaaaataaggaaatatgtaaagttttaaagtagttgtgtaaatttatataggttttaggtttataatgagttagatttaagggaatgatagtggaaaattagatttttatttaaaaattaaattataattatgagtgagtgttatatttattttagtaaaatattagtatcgtgtgtatttttttaagttttttttttatattattattattattatatatgttattagtgagaaatgttgagtatgataatagttaagaaaaatttttaaggttagtaaaatattattttaggaaaaatatttttaaaaagtttatttttaaggggttattaaatttcgtaatttatgtatagatttgggattgaattagtaataataatttttgttgaagagataaaaattagaagataaaatttttttttttaagtagtttatataaagaatgggggttttatatttagtcggggtttatata

SEQ ID NO: 1963 - DNA, 2393 bp, Artificial Sequence
  chemically treated genomic DNA (Homo sapiens)
attaatattattagatgtgggattttttaatagtagagattaaagttgagtttttaatatagtattattttttcgggaatattagttaattatttggtgatagattgattatattaggttttttatattatagaaggagaattgatttgttttttttggaatagatattattttgaatatggattagttttttttgttagaatatgtattagttagtattatttgtatttataaaattgatggattgattttttagaaatttattggttttattaggtaatttatgattacgaaatatgtgggttatggtaataagttggtaagaggtttattaaaaatttagttatagatggtattaattaggggataatattttaaaaggatagattttattttatagaatgttagagggagagagggagatagggagagagggattgatatatgggtattgttttttttattagtttaggattaaggaatggttgtgaggtgattttttttattattttatagttaataatttaattgtaggatttttgtttttcgttttaattttgagttttgttggttgtgtgttttagtgttaataataatggagtttttgaattggtagttgaaataagtatttggttttttggggttttttttgttattgaaataaagaatagtatttaattgttgtagttatagattttgattataaaagggaaattagattgttattaaataatagggttagggaagtttgtgtttaaatttaggagattttttgagatgtcgtttaatatttttatgttttatattaaaagttaatggaatatgtagggggcggtttgagaatttagaatatgttttgttttttattatttttattttatttttttttagggaggtagcggacgttggagttttttaggttagaagtttaggggtaggggtatggtgggggcgttttttttatttcgagaaaacgtagcggtggttacggggaggggcgttattatgtagtatttaggtttggattttagttagtagtattagtttttttttattttcgggtagcgatatcgttggtgtagatcgttttaggtgcgttttcgtttagttttattgtttttagttttagtttgggttcgtttttagtttgttggagttgttggatgtgtttaggtttttaggtattttggtttttttttattcgtttcgcgaagatcgagggaaagtagacgcgttttcgcggtaattcggagtttgtagttcgtagggattttatcgttttaggtgtaggcgtgtatatgttagttgtagaaaatattatattaaattagtttgagggagttaaagtaaattataatattttaggcgttagagatttttttattatagaatttgtttgtttggatagtatgatattttttttataagattttattaataagttgtataaatagtttataggtttagtattatatatttgagaaaagagtttttttaacgttatattaaaattttttttagttaatagaaatagaggttagaatattatagagtaaaatttagaaagtttgaatacggaaggaaattttatatattaggtttcgaatggtttggtgttagttatttttataaattttttgtgtttttattatataatatttttcggcgtttttgtttttgatgttaatattagagatgtatgaattgaatcgcgttaaagttagaattcggtttcggttatattaggtatggtttaggtaattttagttatttaggaggttaaggtaggagaatcgtttgaattcgggaggtggaggttgtagtgagtagagattgtgttattgtattgtagtttgggtaataagagtaaaatttcgttttaaataaataagaaaataaaaaatattttttaagtgtattgttttttaatagaattaatggagttgttagttttttttagaaattttttttttatggaaatgtgttttttttgttaattaggaagtttgttgaatagattttttggttataaatttttaagagtggttaaagtattttaatggatagataagaaaggtaaagatgaattttttattttttttggtttttgtatagtagttgatttagttatatttaaatttttatttatattgaaatttatattaaaaataaataaataaaaaataaataaaaaataaataaaaaataaataaataaaaaataaataaataaaaaataattttaaaattaaatataaattagattttatatttatagtttgggatgttaaaaagaaaagttgttttgggatatgttgaagtaaaattgtgtgtatgggggatttggttgttaatatattttgttgagttaaaaattgtgtttagatgagtaag

SEQ ID NO: 1964 - DNA, 2393 bp, Artificial Sequence
  chemically treated genomic DNA (Homo sapiens)
tttatttatttgaatatagtttttgatttaataaagtgtattagtagttagattttttatgtatataattttgttttagtatattttagaataatttttttttttggtattttaaattgtaggtgtaaaatttagtttgtgtttagttttagagttgttttttgtttgtttgttttttgtttgtttgttttttgtttgttttttgtttgttttttgtttgtttgtttttggtgtaggttttaatatgaatggaggtttaggtatggttggattaattattgtataaaagttaagggaagtggaagatttatttttgttttttttgtttgtttattaggatattttaattatttttgggaatttatggttaggaagtttatttagtagattttttaattggtagaggaagtatatttttataaaagaagagtttttggaggaagttagtagttttattagttttgttggaagatagtgtatttgaaaggtgttttttgtttttttgtttgtttgagacggagttttgtttttgttgtttaggttatagtgtaatggtataatttttgtttattgtaatttttatttttcgggtttaagcgatttttttgttttagttttttgagtagttgggattatttgggttatgtttagtgtggtcgaagtcgagttttgattttggcgcggtttagtttatatatttttgatgttgatattagaagtagaaacgtcggagaatattgtatagtagaaatataaaagatttatagggataattaatattaagttattcggagtttgatatgtgaagttttttttcgtgtttaggttttttgagttttgttttatggtattttggtttttatttttgttagttgggaaggattttaatgtaacgttaagaaaattttttttttaggtgtgtgatattgagtttataaattgtttgtgtagtttattaataaaattttgtggaaaaggtgttatgttatttaaataggtaaattttgtaataggagagtttttgacgtttgaaatattatagtttgttttgatttttttagattggtttggtgtgatattttttgtaattggtatgtatacgtttgtatttggggcggtggggtttttgcgggttgtaggtttcgggttgtcgcggagacgcgtttgttttttttcggttttcgcggggcgggtggggggaggttagggtgtttggaggtttgaatatatttaatagttttagtaggttgagggcgagtttaagttggggttgaggatagtagagttgaacgaagacgtatttgagacggtttatattagcggtgtcgttgttcgaaagtgagagaaggttgatattgttagttggaatttaggtttgggtgttgtatggtggcgttttttttcgtgattatcgttgcgttttttcggggtgagaaaggcgtttttattatgtttttgtttttggatttttggtttaagaagttttagcgttcgttatttttttgggagggagtggggtgggggtggtggggagtaggatatgttttggatttttaggtcgttttttgtatgttttattgatttttagtatgggatatggagatattaagcggtattttagagaattttttgggtttagatatagatttttttagttttgttgtttagtagtaatttaattttttttttgtaattaggatttatggttgtagtaattgagtattgttttttgttttagtggtaggagaagttttaaaaggttaggtgtttgttttagttgttaatttaagggttttattgttgttggtattaagatatatagttagtagggtttagagttgggacgggaagtaaaagttttgtaattgagttgttagttatggaataataaggggaattattttataattattttttgattttgggttggtggaagaaatagtatttatgtattaatttttttttttttgtttttttttttttttttggtattttgtaagatagaatttatttttttagggtgttgttttttaattggtattatttgtagttgagtttttggtaagttttttattagtttgttattatgatttatatgtttcgtggttatgggttatttggtaaggttagtgaatttttagggaattagtttattagttttgtgagtgtagatggtgttggttagtatatattttggtagggagagttaatttatatttagaatagtgtttattttaaggaggataaattagttttttttttatgatgtaaggggtttgatgtaattaatttgttattaggtggttggttgatgttttcgggggaatggtgttatattggagatttagttttggtttttgttgttggaagattttatatttggtaatgttggt

SEQ ID NO: 1965 - DNA, 2378 bp, Artificial Sequence
  chemically treated genomic DNA (Homo sapiens)
attggttttgaatttttggttttaagtgatttttttgttttagttttttaaagtgttgggattataggtatgaattattatatttggttatttaatttatatttttaagaaaatattgagattagtagaagtagttatattatttttgaaaatataaaagttataatatatttttttttttaaaaaaaaaatttgtaaaaattttgtaataaatttattttacgggtatgttttgattgagatagttggaaatttataattatttttatttaatttaatattgtaaatatttattgtatgtttattacgtgttaagtattatattaaaagttgggaaaataaataatttatgtatttgttttcgagttattattagatagggtaagtgtggaggttatttggatttaagaaaggaattttagtatttttaagtggatttagtaagtgttttttttcgttgtaaaatttttaaatttttacgtttatttgaaatagaatttaatttataaatatataatttttagaatatatttattatatagggaaaagtatttaagcgtatttgttgtttagtttaaaagtatgagatttgatttgtttgttatatagataaaatatatttagtataggagagtttatttttaatttggttacgtgattttaatatttttttttaatgtttatttttaagtttagaataatagaaataaatattcgtatattggtttttttaaaattttatatttggaattgtattttttttatgttaattataaatgtaattttttattagtttatttattaattttttttaaaaataaatttagattttttttattttttataattaaaattttttaattatagaggagagttgtgtgtatttatttagttatgtttttgttttttttttttttttttttttttttgtttttattttttttttttttttttttttttttttttttagttttttttttgggatatcgagggataaagttgtaaggtattattatagattttttattttttttttttgtttattagaacgttaataagagatataatatttagaaaatagagagtagagatttttttggattaaatagtattttttttttttgtttttgtttttttgtgatttaagggagaaatgattttttttttttaagtgattttatttttttttgttaagaattcgtggatatgttatttggttagagtttagtttgtagttattacgtaggtaatttatttacgttagattataatttatttaattcgtttgtgttttagttaaatgtgtattagagtaaaagtttagatttgattatgggtaagtttaatgattaatataagttatttaggttttttttttagggtttgttagtaatgattaaaggaaaagtgttttatatttttttttatttattgtatgtgttttagataagaattttaagtaaaagtttatttagtgagataaataggtatttaatattgaaagaatttgttagtaaattagcgattgaatagagggtttaagagaaaggattattagagggtagatttttatttatgaatagttttttattttttatttcgaagagtgattcgtaaatattaggttatgggttgttatttatatatttattgtaggggtatgggtttaaagaagtatagaagggaagtaatttggtttaagttttgttgagaaagggttgattgattttttttatttttttattttttatttttttttttgattttgtttttttaattaagaggaggtttttgatttgtatttattattttttagtcgtatttagattatgggttttagttatcggttgaattggtgggtttaggaaggttaataatatttttttatttggtttatgtttgatttttttgtttttgttttattgtttattttgatttatattttttaatttttgattatgtttgtttacgtttggcgatatttgattagaagacgtttttattttttatttttttttttttttttgagggagaagttattttggtaaaatttgatagttttgagtttttatttttaaggattagtagtagatttggagaagtatttttagtaaaattagattaaagttatggaaatacgattataattttgatgatagtagtaaaattattttttagaaagtgtggaagtttatattaattttgttgtatattatagtttggtaattcgtgataagttgaaaaatttttgtagttttgaagttagtggtgtagagagagggtgtttggttagattggggtaggtagggggttagttattttattattttgtttgtttgttgaattttttttagtttttattttggattttttttatg

SEQ ID NO: 1966 - DNA, 2378 bp, Artificial Sequence
  chemically treated genomic DNA (Homo sapiens)
tatggaagagatttagagtggaaattgagagaggtttagtaggtaggtagggtggtggggtgattgattttttatttgttttaatttggttaagtattttttttttatattattagttttagggttataaaaattttttagtttgttacgggttgttaaattgtgatatatagtagagttgatgtaaatttttatattttttagaggatagttttattattgttattagagttgtggtcgtatttttatggttttaatttggttttgttggagatgtttttttaggtttattgttggtttttgaaggtggagatttagggttattaaattttattaaaatgattttttttttaaaggaaagggagaggatagaagataaggacgttttttggttaggtatcgttagacgtagataaatatgattaggaattgggggatgtgaattagaatgggtagtgggataggaatagagaagttagatatggattaagtaagaaggtgttgttgatttttttaggtttattagtttaatcgatgattgaggtttatggtttgggtacgattggagggtgatgagtataagttaaggatttttttttggttaaaaaagtaaggttaagagggaggatgaggagtagaaaaatgaagagaattaattaatttttttttagtaagatttggattaagttattttttttttgtatttttttagatttatatttttatagtgggtatatgaataatagtttataatttggtatttacgagttatttttcgggatgaagagtgagagattgtttatgaatggggatttgttttttagtggtttttttttttgagttttttgtttaatcgttgatttgttggtaaatttttttaatgttgaatgtttgtttgttttattgggtggatttttatttaaaatttttatttggggtatatgtagtaagtggagaaaaatgtaagatattttttttttggttattattaataagttttgaggaaaaagtttgagtggtttatgttaattattaaatttatttatggttaggtttgaatttttattttggtatatatttggttgggatataaacgagttaggtgagttatagtttaacgtgagtgagttatttgcgtggtggttgtaggttgagttttaattagataatatgtttacggatttttgatagagagaaataagattatttagaaagaaaggattattttttttttgagttataaggagatagaaatagaaaaaaaaggtattgtttgatttagaaaagtttttgttttttgttttttaggtgttgtattttttgttaacgttttggtgaataaaaggaagaaatgggagatttatagtagtgttttgtaattttgtttttcgatgttttaaaggagaagttgagagggaagggaggaagaagggaagagggagtgagagtagagagaggagagagagagaggagaataaaaatatgattaaataaatgtatatagtttttttttgtggttgaaaaattttagttatgagaaataaagagagtttgagtttatttttaggaagaattagtggatagattaataaaaaattatatttataattgatatgaaaaagatgtagttttaaatgtagggttttaagaaaattagtgtgcgaatgtttatttttattgttttgagtttgggagtaggtattaagaagaaatgttaaaattacgtagttagattgaaaatagatttttttgtgttgagtatattttgtttgtgtaataagtaagttagattttatgtttttggattaagtagtaaatacgtttgggtatttttttttatgtggtagatgtattttgaaagttgtatatttataagttgaattttattttaaatagacgtaaaagtttgggaattttgtaacgaaaaggaatatttgttgaatttatttgaaaatattagaattttttttttaaatttaagtagtttttatatttattttatttggtaatgattcgggggtaggtatatagattgtttgtttttttaatttttagtatagtgtttagtacgtagtgggtatataataaatgtttgtagtgttgaattaaatagaaatgattatagatttttagttgttttaattagaatatgttcgtaaggtgagtttattgtaaagtttttgtagattttttttttgagggggggagtatattgtagtttttatatttttagaaatgatgtaattatttttgttaattttagtgtttttttaaaaatataaattaaatggttaggtgtggtggtttatgtttgtaattttagtattttgggaggttgaggtagggagattatttgaggttaggagtttaagattagt

SEQ ID NO: 1967 - DNA, 2351 bp, Artificial Sequence
  chemically treated genomic DNA (Homo sapiens)
gattttttattgtgtttttgatatttgggtttaggttttttttattatttttttaattttttttttttttaaggtatttttaattattttattttgtttaaaattttgtaatatttttttattgtttatagggtataatttaatagttttatatagtaaataaagttgttcgtaaattagatgttttttatgtgttaggttttattattttttttattaatatttttatttcgttttgattatttaagggttttaaaagtattatattgttttttattttttttttttttttatattttttttgtttaaaatgttttagttttttttgtagggtttttttagtattatttttgttttttagattttgattttaggaattttaatgttgtattatatgatttgtttgtttgtttttgtgtttattttttcgttggattgtaagttttttgagagcgagtttagtattttttattttggaatttttatatttgtgatattgtataagttaaaatagatatttagtgagttagtagttatgttttataaagttttttttatatttattattttatttgatatgtttagaaatggcgttttttagaaattaggtgtaattggtagagtaggtttgaggtatttttatattgttaaatgataaaattaaaattaagaaatatttagaagtggtagattagggttatataaagaaaaatagtagaagattttttttaaatttttgtattatttttatattattttttttgttagattatgtgatttttgagtataggattaaaagtaaaagaaattggaaaataaaggtaaattatatagtaagaaagtagaaggatttttagatgtaatataataaatgaatttattttattatttttttgttagttattttttaaaaaatttatttttataaaagaattttttgaagtgttttttatttttaaattaaataaaaaaatttttaaaatttatgatttatttatttttttgttttttatagtttttagttttaaatttttaaaatgttattaagtattatatttaattttataataaatttatattttaggtaggatgttgtttataggatttatgttgggtgatgtttgggtgatttaaatagggaaataatatttttttaagttatattagtttttaacggtgttattggttacgcgtagagaggtaaatttatgagtagtattggggagttaatgaacggttggttagatggtgtttgttagaaggtgttgattttttagataattgggattgttttttgggagtaaatgagaggtgtagtagggacggattgtattttaattatatagaaatagatagatttattgttaatgaaaataattatatagttaggtatatttttttttttttgattttgtttgttttatttggtagatatagacgaggatttagttgaaattataatattatattaaacgacgtaatggagtaaatatgaaaagttatttataaattattagtatttttaattaggaaaaattaaatagaataaggaaaaataatgtaaattagtggtaaattaatttggaattaataagggtattttgattgttatagtatgaattatttgaaaataaataaaatttgaaatataatagtgatttgtagatgttattgaaatatttaaattggtggagtttattaaggatattttggtatttttgattttttagtataatatatttgaaatgaattatttttattaatttgattatttttatttgttgttttgttgaattgcggaagtttttttattatatgtttagtgatatttttggtaggtaaattttgatatttaatgtttatattttagtagatataataagtagaaaattttattgatttttttgttgttattagagaatattatttaaatatttgtttgtttgttgtggttatttttaggtattgtataaaattagttaaataaatgttattataaaattatggatagtttgtttggttatagtaatagatttagtagattgggtaattttattttttattagttatgtgattttaggtaagttgtttagtttttttttgttttggcgttttggttaaagtgaagattttatgaaatgaatgtaaagagtttgatatagtagttagtatgtagttaattttcgtaatgttttttttttttgattataaagagtttttagtttaggttatttatttattttttttttatgtttttattttttttgattgtatatattgggtttgtttttaattttgtgtttattttaaataggtttttagaaatttagagcgatgtatttgaaaatttg

SEQ ID NO: 1968 - DNA, 2351 bp, Artificial Sequence
  chemically treated genomic DNA (Homo sapiens)
taaatttttaaatatatcgttttgaatttttagaagtttgtttaggatggatataaggttgaagataaatttagtgtgtgtaattaaggaggatggaaatataagaaggaaatgaatgaatgatttggattgagagttttttgtagttaggaaagagaagtattacgagagttgattatatgttagttattgtgttaaattttttgtatttattttatagaatttttattttaattagggcgttaaggtaaggagaggttaaataatttgtttgaggttatatagttggtaagaaatagagttgtttaatttgttgagtttgttattgtgattaaataggttatttatagttttgtgatggtatttatttaattgattttatgtaatatttaagagtaattataataggtagataaatgtttaggtaatattttttgatagtaataaaaaagttaatgaagttttttatttattatatttgttgaaatgtgggtattgagtattaaggtttatttgttaaagatgttattaagtatgtaataggaaaattttcgtagtttagtaaagtagtaagtgaaaatggttaaattagtaaaagtggtttattttagatgtattatgttggaaagttaaaagtgttagaatatttttaatggattttattagtttgaatattttaataatatttgtaggttattattgtattttaaattttatttatttttaagtagtttatgttatagtaattaaaatatttttattaattttaggttagtttattattaatttgtattatttttttttattttatttgattttttttaattaagaatattaatagtttataggtagttttttatatttattttattgcgtcgtttaatatgatgttatagttttagttagattttcgtttatgtttattaggtaaaataaataaaattaaaagaggaaaaatatgtttggttatgtgattatttttattagtagtgaatttgtttgtttttgtgtgattgagatgtaattcgtttttgttgtattttttatttatttttaggaaatagttttagttgtttaaaaagttaatattttttgataggtattatttggttagtcgtttattaattttttaatgttgtttatgaatttgtttttttacgcgtgattagtgatatcgttgagagttaatgtggtttaaaggaatattgtttttttgtttggattatttaggtattatttagtatgagttttatgggtaatattttatttgggatgtaagtttgttataagattaaatgtaatatttgataatattttggaaatttgaagttgagggttgtaaagagtaaaaaaataaataggttataaattttgaaagtttttttgtttggtttgaagatagaagatattttagaaaatttttttgtgggagtaaattttttgaggagtgattaataagggagtgatgagatagatttatttattgtgttgtatttgaaaatttttttgtttttttgttatatgatttatttttattttttagttttttttgtttttaattttatatttagaggttatatagtttagtaggagagataatgtgaagataatgtaagagtttgaggaaaattttttgttatttttttttatgtaattttagtttattatttttgaatattttttaattttggttttattatttgataatgtaaaaatgttttaaatttgttttattagttatatttggtttttaaaaggcgttatttttaggtatattaaataaggtaatgaatgtgaaaaaagttttgtaaaatatagttgttggtttattgggtatttgttttggtttatataatattatagatgtagagattttaaaataaaaggtattaaattcgtttttaaggagtttataatttagcggagagatggatataaaagtaaataaataaattatgtgatgtaatattaggatttttaaaattaaggtttaaagagtagagataatgttggaggagttttataaaggaggttgggatattttgggtagaggaaatgtggaaaaaagagagaggtgagagatagtatggtatttttgaaatttttaagtagttaaaacgggataaaaatgttggtagaagaaatggtgagatttgatatataagaagtatttggtttgcgaatagttttgtttgttgtgtaaagttgttgaattgtattttgtgggtaatgggagggtgttgtagagttttgaatagaatgagatgattggaaatgttttgaaagaagggaaggttgaaggaatgatgagaggggtttaagtttaggtgttagaggtatagtaaggagtt

SEQ ID NO: 1969 - DNA, 2435 bp, Artificial Sequence
  chemically treated genomic DNA (Homo sapiens)
atttttttaaatatatttggggtagaggtattggaaaaaagcgaaaatgtgaattaaaggaaagaaatattgtaatttaggagaatgttttttgttaggtatttatagttaaggtagtagggtgtgcgtgtatatatatatatatatatatatatatacgatgttatttttgttttagtgcgagatagttttacgggtgtcgggtatggtgatatataatggatattaaaatcgtatagttagttttagtaaattaggtaaattagagattatttgatggtattttattgttgttattgtaattatcgtaattttttttggtaatggtgtttcgtgatgaagtgttgtttttataggataattgtgaaagatatcgaaagatttagggatgtagtatttggttttaaaagttttttagatttaaattggtattttattttattttgaaaatttatgagagatttagattatgtcggtttaaatggaaaggtgaaagtagggtaattttaatttatgaattatttaattttagtttggtgaaattgttatttatgaattgatgttttgatagttttttcgtagagtttttattacgtttgttatttttatttttttatttacgattttttttttagttatcgagtttgttttttagggtttagttttataaattaagtattttaaattggtaataatttaaatgtgtcgttgtttcgaatcgttgtttttataggttgtttttttttgttttttttaaattattaaaaattatatttatgatgatatttgttgggtttttcgattagatgaattaaaatatatatatatatatatatatatatattatatataagggtattattgcgaagaagagttatgtttcgttaatattataagagaagagaaagtgatgttttttgtttttttttttgttgttagtatgatttattttagttgtatagtattacgtagaaaggagttagggttaaaggcggtttgtttggtattttgatttttagttagagttgatgaggattgtatggtaggtaggttaatttagataattgtatatttagcgagtacgattatttaggaaaataaggaaaagtcgttggatgatcgaaattagattgttattttttcgggttttatttgtatatagattgtagtcgtaacgattttttatttgatggttggttgtgttattgttagtcgatagttgtttcgtatttagagaggattgggagtgatttaggttagggagtttggttttttttttaaatcgtgcgttaattgaggagtggggatttgcgttagtttcgtgattagttttaaatgtgagttggggagttatatagtattagtgcggtgagtcgttcgtataggttttagttagataaattatagtaagtatttttttttttgttttagtttttatttttgtaggtagagtagcgtggtataagaagtttttaaattatttatatatatggtgggagattagtcgtgttttattagaggcggtttggttataagttttcgagtagtatttgtttagttgaaaatttacgttgttaagttagaagttatcgtgtatatttaggatgtatttttgtttttggttaaataaaggtaaatattttttatgtaagatatgttaagtagtagtaggagaagaaaattttaaaattttgttgttttgtgtttagttgtttgtttttgttttgttgtattgcgattgggaaattgtaggagttggagttggtagttgcgataatgtagaaagtagtagttttgatatagtagttagttgatttgcggggtgttattatttaatgttttttgtagaattagattagtttttaaggtggtattagatagatgatttttaatggaaagagaggtttaaggagtgtagtttttttttatttatatttggtagggatattttatattgttttttttttaagtagagtttttaatttatagtttttaggatttaattatttttgttttgtttgttaagatggtaggtaatttttagggtgattattttaatgtgaatataagttaaagttatcgttgtttttttcgttttggttggttttagcgttgtgagaatgattgcgggagaatttttgtttatattttgtttgaaaaatatattttttttttaataggtagaaatggttttaagttatttgtatgttgtaatgaattagttaattgtatttaatagaatggtaagagtaagagggaaaattcgaaggtaaattagtttagtattagttttaaattatggtttagttgttgtaaggtagtgtgtatgttttatcgtgaaacgtaggttgtataatttaattaatttgataatggagtaaaagttttatatggtattattttagtggtttgaggaattgttaaaataagaaggt

SEQ ID NO: 1970 - DNA, 2435 bp, Artificial Sequence
  chemically treated genomic DNA (Homo sapiens)
gtttttttattttagtaattttttaaattattggggtaatattatataaggtttttgttttattgttagattaattgggttgtataatttgcgttttacgatagagtatgtatattgttttatagtaattggattatgatttaaggttagtgttgaattaatttattttcgagtttttttttttgtttttgttattttgttaggtataattgattagtttattatagtatataagtagtttaaggttatttttatttgttaaaaaagaagtgtgttttttaaataaaatgtgggtaggaattttttcgtaattatttttataacgttgaaattagttaaagcgagaggggtagcgatggttttaatttatgtttatattggggtggttattttaagaattatttgttattttagtaagtaggatagaaatagttaagttttaaaggttatgaattaaaaattttgtttgagagaaaagtaatgtaagatgtttttgttaggtgtggatggagaaaaattgtattttttaagtttttttttttattgaaggttatttgtttggtgttattttagaaattggtttgattttgtagaggatattgaatgataatatttcgtaagttagttgattgttgtgttagagttgttgttttttgtattatcgtaattgttagttttagtttttgtagttttttagtcgtaatgtagtaaagtagaagtagataattaggtataaagtaatagagttttaaagttttttttttttgttattatttagtatgttttatatgaggagtatttatttttgtttagttaggagtagagatgtattttgaatgtatacgatggtttttaatttggtagcgtgaatttttagttgagtaggtattgttcggagatttgtaattaaatcgtttttgatggagtacggttggttttttattatgtgtgtgaatagtttgggggttttttatgttacgttgttttatttgtaggaataaaggttaggataaaggagaggatgtttgttatggtttgtttggttggggtttgtgcgagcgatttatcgtattgatgttgtgtgattttttagtttatatttaaggttggttacggggttggcgtagatttttattttttagttagcgtacggtttaaaggagaaattagattttttgatttaaattatttttagttttttttggatgcgggatagttgtcgattagtagtgatataattagttattaagtggagaatcgttgcgattgtagtttgtgtgtaggtggagttcgggagaatgatagtttaatttcggttatttaacggtttttttttatttttttaaataatcgtgttcgttaagtatatagttgtttggattagtttgtttgttatgtagtttttattaattttggttggaaattagggtgttaggtaagtcgtttttagttttggtttttttttgcgtgatgttatgtagttaggatgggttatgttgataataaagaaggaagtagaaagtattattttttttttttttgtgatgttagcggaatataattttttttcgtagtgatgtttttgtgtgtggtgtatgtgtgtgtgtgtgtgtgtgtgttttaatttatttaatcgaagagtttaataaatattattatggatgtgatttttaataatttggaaaaaataaaaaaagatagtttgtggagatagcgattcgaaatagcggtatatttaggttattgttaatttgaaatatttggtttgtgaagttgagttttaagggataagttcggtaattgaggaagagatcgtagataaagaaataaaaatgataagcgtaatggaggttttgcgaagggattgttagagtattagtttatggatggtaattttattaggttgagattgaataatttatagattgaaattattttgtttttatttttttatttaagtcggtatgatttgaattttttataaatttttaagataaagtaaaatgttaatttgaatttgaagagtttttaaaattagatgttgtatttttgaatttttcggtattttttataattattttatgagaatagtattttattacgaagtattattattagggaaaattacggtgattataatagtaataatagaatattattaaatgatttttaatttatttaatttgttaagattgattgtacggttttgatatttattgtatgttattatgttcggtattcgtgaagttatttcgtattggaataaaagtggtatcgtgtgtgtgtgtgtgtatgtgtgtatgtgtacgtatattttgttattttaattgtgaatgtttagtaaagaatatttttttaggttataatattttttttttttggtttatattttcgtttttttttaatgtttttattttaaatgtgtttggggaaat

SEQ ID NO: 1971 - DNA, 2423 bp, Artificial Sequence
  chemically treated genomic DNA (Homo sapiens)
gtatttgttattatttatttataatagtaaagatatggaattaatttaaatgtttattaataatagattagataaaatatggtatatatgtattatggaatattatgtagttataaaaaaaaataagattatgttttttgtagggatatggatggagttagagggtattatttttagtaaattaatgaaggaatagaaaattaaatattatatgtttttatttataagtggaggataaatgatgagagtatttggatatatagaggggaataatatatattggggtttattagagggtggagggtggaaggagggaggggattaggaaaaataattattgggtattaggtttaatatttgggtgatgaaataatttgtagaataaatttttatgatataagtttatttatataatatatttgtatatgtatttttgaatttaaaataaaagttaaaaaaaatagaaaaaaaagaggaatgtttgtaatttttgtaaatatattattttttaaaagttatttatttttttaaagtattgtatttagaatgttagattattgtttagaaagttggtaatattagtattcgttatttttttatttatcgtgtaagagatttttatattagacggagtttaggttgggaattattattttttttaatttttgttaatttgataagtgtggaatgtgttttttcgtatttatatttttttgattattggtgagagagaatattgtattttattatagatgttatttgattttttgttttatgtttatttttttttgttggtttggtagtttttttttattgatatataagtatttgaaattatttttaaggatttgtattaatttgttgtttttcgtatatattgtgattatttttttttttcgagttagtttttttttaattttttttgagagattttagatggtcggtttattttttgatttatttttaagtttaaataatattagaaataatatttgaaatgtttagattaatttttttgtagtgattttattgggaggttgtattagtatttagatatttttatatattgaggaaaaatagatagtcgtgtttaaggattttagagggtttgttattatttatttataatttttttagaatttatgagttttaggtttttattgtagtggtaagcgttgagtgtttacgggggtgtgtgtgggataggatgtggtttgagttttgtgatttttatttcgattttatgcgtcgggaatttttgtagttttgtgattggtttgtgggggtttgggttaagtttttgttaagatattaaaagattgtagaggtgggtaaagattttaggtttttagattagtaatttataaatattagttatgattatatagttaagggtcgtttatttgttttttttttttttagtttgttttgtgtaaataagttttaagtaggagaagatgaaggtgagtgagttttagagagggtatggtagttatttttttgttttatttttagattttgttttttatttttttttgtaagattttaatttttgttttttttttttttgttagtttttttaaattttgtttttttttttttttgaattttttttatttttatggatgggtattttttgcgttgaatatgattagggaagaaagggtttttatatgattagggaagaaagggtttttatattttttttaggtggaggttttttggagatttttttggttatattagtttttgttttagagttgggtttgaggttgggatagcgatgggttttagagtaggtggggattggggtttggaggagaagttgagtggatttgttttagatatagtttagtaataattttttgaagaggaggaaaaaacgaatgtggaagttttaaggatggataaaattagagagttattagagaaatataaaatatgaaaaaaaaaattagagttttaaaataattggatttggagttaggtattttggattttggttttagttttatgtttaatttatggttcgttattttattgataagatatatgtgtttggtagtagaaggggtagtttaggaaaggataataatgaatgcgataatttggaggtagaaaataattatgaagttaggtaaaggtaaatttttatttatataatgggttattatttttgattttggataaattaatttttgttattttattgtaaatttatgggtaatagtaattattttatgggtgggtgaataataattattatgtatataatatattttataaaatgtagttttaataatatttttttatttttcgtttttaaaattaattagataatattttgggtgaatttttattttgagaattgatatggtttttatgttatttgtggtgtttaattgagtgtggagattttgggt

SEQ ID NO: 1972 - DNA, 2423 bp, Artificial Sequence
  chemically treated genomic DNA (Homo sapiens)
gtttagagtttttatatttaattaagtattataggtaatataaaaattatattaatttttaaaatagaagtttatttaggatgttatttagttaattttagaggcgagggatggggagatgttattagaattgtattttgtagaatgtattatatgtataataattgttatttatttatttataaggtagttattgttatttataaatttataatgagataatagaggttaatttgtttaaagttaaaagtggtaatttattatgtaaatgaaagtttgtttttatttaattttatgattattttttgtttttaagttatcgtatttattattatttttttttaaattgttttttttgttgttagatatatgtgttttattaataaggtaacgagttatgaattgggtatagaattgaggttagaatttaagatgtttgattttaaatttagttgttttagggttttgatttttttttttatgttttatgtttttttgataattttttgattttatttatttttaaaatttttatattcgttttttttttttttttaaggggttgttgttgagttgtgtttgagataagtttatttagttttttttttaaattttagtttttatttattttaaagtttatcgttgttttagttttagatttagttttgaagtagagattgatgtggttagagaggtttttaggggatttttatttgaagaaggtatggagatttttttttttttagttatatggagatttttttttttttagttatatttaacgtaaggaatatttatttataggaatgaagaagatttaaggagaaaaaaaagtaaggtttaggggaattggtaaagaagaagaaagtaggagttggagttttataagaaggagtggagggtagggtttagaagtaggatagaagagtaattattatgttttttttgaagtttatttatttttatttttttttgtttgggatttgtttgtataaagtaggttaggagaaggggaagtagatggacgatttttaattgtgtagttatgattagtgtttgtagattgttagtttgggggtttgaggtttttgtttatttttgtagttttttggtattttggtagggatttagtttaagtttttataggttagttatagggttgtaaggattttcgacgtatgaggtcggggtgaggattatagaatttaaattatattttgttttatatatattttcgtgagtatttagcgtttattattgtaatgaggatttgggatttataagttttgggaaaattataaatgggtgatagtaagttttttgaggtttttaaatacggttgtttgtttttttttaatgtatggaagtgtttagatgttgatgtaattttttagtaaagttattgtaaaagggttggtttagatattttaaatgttatttttaatattatttgagtttaaaaataaattaaagaatgggtcggttatttaggattttttaaaaagagttaggaggaaattggttcgaggaggggaaatagttataatgtatgcgaaggatagtaaattaatataaatttttagaaatgattttaagtgtttatatattagtaagaaaaaattattagattaatagaaaaaaatgggtatgaggtagaaaattaaatggtatttgtggtaggatatagtgtttttttttattaataattaaagaagtataaatacgaaaagatatattttatatttattagattggtaaaagttaaaaggaatggtgatttttagtttgggtttcgtttggtataggagttttttatacgatgggtgggggaatggcgaatattaatgttgttaattttttggataataatttgatattttgaatgtagtgttttaaaaaagtaaataatttttaaaaaataatatatttataaaaattgtaagtattttttttttttttttattttttttaatttttattttaagtttaggggtatatgtgtaggtgtgttatataggtaaatttgtgttataggggtttgttttataaattattttattatttaggtattaagtttagtgtttagtagttattttttttgattttttttttttttttattttttattttttaataggttttagtgtgtgttgtttttttttatgtgtttaggtgtttttattatttattttttatttataagtgagaatatgtggtatttggttttttgtttttttattagtttgttaaggataatgttttttagttttatttatgtttttgtaaaggatatgattttgtttttttttatgattgtatagtattttatggtgtatatgtattatattttatttagtttattattggtgggtatttaggttgattttatgtttttgttattgtgaatagatagtggtaagtat

SEQ ID NO: 1973 - DNA, 2464 bp, Artificial Sequence
  chemically treated genomic DNA (Homo sapiens)
tattgttttttattatttttagatgaggttattaagttgtaggaaaataagtttagggtttttattgattttatattatgatgatttgtataattgttttattatatattataatgtaataataatagaaataaagtgtatgataagtgtaatgtatttaaattattttgaagttatttttttttattggtttatggaaaaattattttttatgaaattggtttttggtgttaaaaagatttggaatagttgttttaatttttttattatttttatttattttttgtatgttgttttgggttaagggttgtggaaatgtttatggggtttttgttttattattttaaattatgtgtaaattttaagaaatttgtgagataaagtatttggttagtgggaaaaaaaaaattgataacgtttttaatattaattggagtgatagtttggtaattggttttttgagaaagttttagtatattttgaaaattggtaggtagttttagagtgagttaattagttaggaatgatttttaatatttattatttttaatagtttatttttggagaaaagatagataatgaatattgggaaatttatggtgttgtaatttgatttttgtgttatttgggggaaatgaggaagatgagttataatttattatttaaagttttttttttataatgtgttgttgtgaaagatttgataaataatgattgtttttttagggattaatttaattaaagaagtagaaaataggaagaatagaaaatttgtgtgattaagtaatgtttaattttatttgaaattggttttattattttggtgataggaatagaaggttttatggagtttttttatagtaagaaattaggtttgtaatagggtgtaatagagtgatattttatatttgatgttttgtaaatgtagagtttgtaaatgttttttttttgatgtttttttaaggtaagttataaatgaagttttattgttttaaaaaagtagtttgttaatagttgtttaggttttttatgggattgcgttttattgagtatttgaagaaagtatttattggaaatgggtttttttgggagattgtttggatttcgagtgtttggcgtttatgtttttatatttggttgttgttttttgtttttttttggttgtaggtgtgagtgtttgtttgtttaaatttcgtttagtattgtttggaaaaataaaataatatggttatttgtttgggtattgaatgttttttttgaattttggttttgtttattggtttagaggcggaatgggtggggtaagtttcggtgtgagtttgggaagtttcgagaagacgttatgggttgggtttgttaggttggggttgtttttggttttaatttttttggaatgttttgagggttaggagcgttgttattgatggttatgggagttgttaggttgtggtttttttttttatagagaatgttagaggtattcgggaaggtatttgttagggttttgatagatgtaaagtaagttttatttatgttgtgtttttatttggatatttggaaggtgtttagtatagaaaagttacgagttagatgagatattagtttgatgtcgattttttttttaataatggttgtttgttttcgttttgatgtttgttagtaggtaaagggggtgtgtttttgggatttgggtagtagtagtttttgggaaatttagggtttgttatttgtggttatttgatttttggtaaattatttaatttttttattttatattttaaggatagtaaatttatgtagtagttaggttgttagaagaaatgatgttgataattaaatgtgaagttttgatatggttttttttcggtattatagttatttgttttttaaagaattggtataatgttgggggtagaaaaattatattatgtagtgatgttgtttagttaggtatataggtagagaagagttgtttttatttttagttttttaggtttgtttagggttgtttagtgtggttgattttgttttgtttattgttatgtaatttggaatttataatattattgtatgatgtgtagatttggaatttattgtagtattttttttttgaaggttgtattgtgtagtagtttttaaatttgagtatgtattagaattttttggtggtagtgttaaagtagattgttggattttatttttagagtttgattttataggtttggggtggggtttaagaatttgtatttttaatatgttttgaggtgttgttgttgttattggtttagggaatatatttagagaattattgttttagtgtgttggaaggagtaggagttttggagttaagtagatttaaatttagttatggtatttatttaatgttgtgattttgagaggttttttttaatttttttaagttttagtgaattcgtttgtaaaatgggaataatatttattttaa

SEQ ID NO: 1974 - DNA, 2464 bp, Artificial Sequence
  chemically treated genomic DNA (Homo sapiens)
ttgaagtaagtattatttttattttatagacgagtttattaagatttggggaaattaagaaaaattttttaaggttataatattaagtaagtgttatagttggatttaaatttgtttaattttaaagtttttgttttttttagtatattagagtagtggttttttaagtatgttttttgaattagtagtagtagtagtattttagaatatgttagaggtgtaaatttttaggttttattttagatttatggaattagattttgagagtggggtttagtaatttgttttaatattgttattagggggttttgatgtatgtttaagtttggaaattattgtataatatagtttttaagaaaaagatattatagtaggttttaggtttatatattatgtagtgatgttgtaggttttaggttatatgatagtgagtaagatagggttagttatattgagtagttttggataaatttaaggagttaaggatagagatagtttttttttatttgtatgtttgattgagtaatattattgtatgatgtggtttttttgtttttaatattgtattagttttttaaagagtaagtagttatgatatcggaaaagaattatattagagttttatatttggttgttaatattattttttttaataatttaattgttatatggatttgttgtttttgagatgtggaatgaaaaggttaggtaatttattaagggttaagtgattataggtgataaattttgggttttttaaggattgttgttatttaggttttaggggtatattttttttatttgttggtaggtattaagacgaagataggtagttattgttggggagggagtcgatattaagttggtattttatttagttcgtgatttttttatattgagtattttttaggtgtttaggtgagaatataatatggataaggtttattttatatttgttagagttttggtaaatgttttttcgagtgtttttggtattttttgtgagaaagagagttatagtttgataatttttatagttattaatggtaacgtttttgatttttaagatattttaaaaggattaaaattaagagtaattttaatttaatagatttagtttatagcgttttttcgaaattttttaaatttatatcgaaatttgttttatttatttcgtttttgggttaatgggtaggattaaaatttaggaagaatatttaatgtttagataagtaattatgttgttttgtttttttaagtagtgttgagcgaggtttaaataaataagtatttatatttgtagttaaggaagggtaagaagtagtagttaggtgtgggaatatgaacgttagatattcgggatttagatagttttttaggagagtttatttttagtgaatattttttttaggtgtttagtgaagcgtagttttatggggagtttgggtaattgttggtaagttatttttttaaagtagtaagattttatttatgatttattttgagaaagtattaaaagagaggtatttgtagattttgtatttatagggtattaggtgtggggtgttattttattatattttgttataagtttggttttttgttatgggaagattttataggattttttgtttttattattagggtggtggagttagttttaaataaaattaaatattgtttagttatataagttttttattttttttgttttttgtttttttgattaaattagtttttaaaggagtaattattatttgttaaattttttataataatatattataaaaggaggattttaaataataaattatgatttattttttttattttttttaaatggtataaaggttaagttgtagtattatagattttttagtgtttattatttgttttttttttaagggtaggttattaaaggtagtgagtattaaaagttatttttaattaattagtttattttggagttatttgttaatttttagaatatgttgaagtttttttagagagttaattattaaattgttattttagttaatgttaaaaacgttattaatttttttttttttattagttaaatattttattttataagttttttaggatttgtatatagtttgagatggtagaataaagattttatgaatatttttatagtttttagtttaggataatatataagaagtgagtgaaggtggtgggagggttagagtagttgttttaaatttttttggtattagggattagttttatggaaaatgatttttttatggattagtgagggagggtggttttaggatgatttaagtgtattatatttattatgtattttatttttattgttattatattataatatgtaataaaataattatataagttattataatgtagaattagtgggaattttgagtttgtttttttgtaatttgatggttttatttgggggtgatgggagatagtg

SEQ ID NO: 1975 - DNA, 2499 bp, Artificial Sequence
  chemically treated genomic DNA (Homo sapiens)
atgattttatattttgtttttttaggaaaaagaatgtttaaaaaattaaaatacgaagaaatttgggtataaattattgaaggttttagagtttgttgtatttatttaaatattattgtttttatatatgtataattattttttttgagtttaaaaaatgggtggaaaatttaatttttttattttaatttgagattttttttataaaagtttattgaagaaattttttttatttttgggtagtaattaaggaatattttagttaagtttttaaagagtgggtttatttttttaattgtattttaatttatatttatttttggttaaaataaaagtataaataagatttttttaatttaattataagttagatttgtagtaaattttttcgttttagattatttttttttttatagtttttagataaattgattttgatttagttagtaatttaatgaaatttattagttgattgtaagaagttcgtttatatatattagttatttttttagtaaatatttatggaaaataaaagtaatgttttttttataaataaattttattttttttttgtaatttaaggcgggttgttagatcggttgtataatagatattggggagtttattggtcgggagttttaagaggagagtagttattttagttttttttatttaattttggttttacgttagaagttgtgtagtagtgtagtagaatagggtttggtaaaatttttgttagtaaagcgttttttgtgtcgggttgtggttcgttatcgatatttcgttcgttattaaggttgggttttttattgatttttttttttttttgtttttataggttcgcgcggtcggatattgtgggtgtgcgtgttggatttttttcggatgtttttcgattaatatggatgttttattattttttgtagtggaaggttgttttttggcgtagtgagtgaagaatatgtagcgattgttaatgggtttgggaagcggagatttttttttttttttatgattatgtcgtgatcgtgtttgcggttattattcgacgtatttttatttttattcgaatttaggagtcgaacgttagatcggggaagtgggtgtcgtgcgtgtgggtatagaaatattatgaagattattttttcgattttaagtaatttagtttttaggcgtatcgttaaatttttgttttgtttattgtggattggatatttttaaggaattatatatgtattaagatttggtaagattttttattttttttggttgtttggtattcgtttttaggtagtcggatgtaaataggcggttcgttttgtttggcggtgggtttcgtggattttgatttgtttattgttttgtcgttttttggggtttttaaagaattttttgtgtttttatttttttttttttttatttttatttttagtcgcgggagggtgaagggagggttaatgtgtggtagtggtttttgtattatttttttatagtagtttgttacggagatgatgatgacgatggaggtacggttagtcgttattttcgtttgtttttttcggcgttttgcgagtttggaggggtgcgcggttcgcgtaaaagtgcgcgtcggggttgtacgttttttagtttgcggggttggtgagttaatatttggtaattttttggcgagttgcgtttgttcgttttcgttagtgattagggtagtttttacgtgtaaatgaaaggtattaatttttttgatttttttttttagagagttttttcgattgtttttatcgtttttttagtttttggtgtttttattgggatgtagagttttaaaaaatgttttaagattcgaggttttatttaatatagggaggttgttatttagttggaacgaaatagcgttaaaattagaacggtattttgtttgtttttaatttgttgagttttttttttatagttttttggacgttatggattaattaatgaaggatagtatttggggcggtggggaagagtagttgtttaaggagggttgattaagtttgtattttttattttggtaagacgaaagacgttaggtagttatatttttttatggaaatgtattgtttttttaagaattagggtttttttggagtttgaaggaaaatttaaacgtgggattttagtggaaattttggttagagggttagagtgattgtttggagaaaatgaagcgtgggcgatgtttaggttttttggatggttaaaggagttttagtaggagtagaattagttagggaaagttttttaaagtagataagaggaagaaaggagaaagttaataggataaatgtttttattgtaggtattttttttgatagtttaagtggatttagattaaagagtgtaggatattatgtaattttgagtatttgtttttgagataaaagtagatatattaagttattcggttaaatttaaattgaagagtgattgtttgtattttttattatgttaatagta

SEQ ID NO: 1976 - DNA, 2499 bp, Artificial Sequence
  chemically treated genomic DNA (Homo sapiens)
tgttgttggtatgatagaagatgtaggtaattattttttagtttaaatttgatcgagtgatttaatgtgtttgtttttattttaaagatagatgtttaggattatatggtgttttgtattttttggtttgaatttatttgaattgttagaggaagtgtttataatgggagtatttattttgttggttttttttttttttttttttatttgttttagggaattttttttgattagttttgtttttattaaaatttttttggttatttagagaatttgagtatcgtttacgttttattttttttaagtaattattttgattttttgattagggtttttattggaattttacgtttagatttttttttaagttttaaagaaattttgatttttagaaaagtaatatatttttataaaaaaatgtaattatttaacgtttttcgttttgttaaagtgaaagatgtagatttagttaattttttttaaataattatttttttttatcgttttagatattattttttattaattagtttataacgtttagaaagttgtgagagggggatttagtaagttaaaaataaataaaatgtcgttttaattttgacgttatttcgttttagttaagtagtagtttttttgtgttaagtagaatttcgaattttagaatattttttaaagttttgtattttagtaagggtattagggattggaaaagcggtgaaaataatcgaaaaggttttttggaaaaagaaattaaaagggttagtattttttatttgtacgtgagaattgttttggttattggcggaagcggataggcgtaattcgttaaagagttattaggtgttaatttattagtttcgtaagttgagaggcgtgtagtttcggcgcgtatttttgcgcggatcgcgtatttttttaagttcgtagggcgtcgggggagataggcgggagtggcggttgatcgtgtttttatcgttattattattttcgtggtaagttattgtggggaggtaatgtagagattattattatatattggttttttttttattttttcgcggttaaaaataaaaataaagaagagaagaaatgaaagtataaggagttttttaaaagttttaggagacgatagagtagtgagtagattagaatttacggagtttatcgttaggtagagcgaatcgtttgtttatattcggttgtttgggagcggatattaggtaattaagagagatggggaattttattaaattttaatatatgtgtggttttttgagaatatttaatttatagtaaatagagtaggagtttaacggtgcgtttgaagattggattatttagaatcgggaaaataatttttatggtgtttttgtgtttatacgtacggtatttattttttcgatttagcgttcggtttttgggttcgggtagaaatgaggatgcgtcgagtggtgatcgtagatacgattacggtatggttatagagagaggaaggagttttcgttttttaaatttattagtaatcgttgtatgttttttatttattgcgttaaggaataattttttattgtaaggaatggtgggatatttatgttagtcggagagtattcgggagaaatttagtacgtatatttataatgttcggtcgcgcgagtttgtgaaagtagaggaggagggaaattagtaggaaatttagttttggtaacggacgagatgtcgatagcgagttatagttcggtataaaaggcgttttgttagtaaaggttttgttaggttttattttattgtattgttgtatagtttttgacgtgaagttaagattaagtgagaaagattgagatagttgttttttttttaaggttttcggttagtgagttttttaatatttattatgtaatcgatttgatagttcgttttgagttgtaagaaagaagtaggatttatttatggggagaatattgtttttattttttatgagtatttgttgagagaatgattggtgtatgtaagcggattttttataattaattgatgaattttattaaattattagttaaattaaagttagtttgtttgggaattgtaaaaaagaaagtgatttaagacggaggaatttattgtaaatttaatttgtggttagattgaaagagttttatttatatttttattttgattaggaatgaatatagattggaatgtaattggagaggtaaatttattttttaaaaatttgattggggtattttttgattgttatttagaagtaggagaaatttttttagtgaatttttatgggagaaattttaaattaaaatggagaagttaaattttttatttattttttaagtttaaagaaaataattgtgtatatataaaaataatgatgtttgaatgggtgtagtaaattttaaagtttttaataatttatgtttaaattttttcgtattttggttttttgaatatttttttttttaaagaggtagaatatgagattat

SEQ ID NO: 1977 - DNA, 2422 bp, Artificial Sequence
  chemically treated genomic DNA (Homo sapiens)
tatggtgtttttgaatttattattttgaaggataggtttattgtttatttagtgttttatttttggagtttttaaattttttattatgatgtagaataaattttggagtaattttgtttgataatagaggattgattgtaatcgtttgaaaggatagagttttataatatattttttgaaatgtttttttatgaaggaaaagttgatagggaatttgagttaaagtagataaaatagaataaaataaaattaaaattaaaaaataggtgttaaaaggatgttttaaataggttgaagtattaaattattatagagagtagttttagtttattttgaaattcgtttttatttttttattattttttatatattttgttttgttgtaaaatatagggagaattatttattattaagttgtttaattaattttttttaaggtatgtaatattttttaaagaaatttgaaagtatttgttttattgaaaaaaatgagatttattttttatattataattttgtttttagtgaaaaagttaggataatgaagaataaaatttatttttgtgaaggaaaatatttttattttatggtatttttaaatattattttgttaattttttatggaataaagttgataatattttttgaatatatatttgtatgtttttatagttttaatttgttatatttttgttttttttttttaagtaatattttgaaaaatttataaagtaatataaatatatttatagtattaggttgtaaattggaatttggaagcgttagatttgttgattttatttgttatttgattattatatttgttttttttaattgatttattaggtttgtattttagagtatattttattttgttgtaatagttattaatgaattttttgatcgtggatttttgttatatatatttgtattggtttagggagtttaatttgttggaatattttgttgaagagtttgtttttatatttagggatatttattattatttaaggttagttgtttgatttttttttagtgttttgtttatagggtttgaatatttataaatggaaatattagttaattagaaattatcgttagggttttttgatagtgttttaggtttttataatttggaatgttttgtaatatttaatatgtaagtacgtcgaattattttttagatagaatttgaatttttgtgttttttagttttttttttttttttatttttttttaatatggaatttgaaaagcgtgaaaaaagaagtttattaaataagaatttagaggagaaattgacggtaagatatgagatttagtatatatagatttataatgaaattgatagggtagtagagtaattgttatagattggaaaagttgtgttagtcggtttttgtttttatgttttgttggttaataattttaaaattaatgagttttatgggtttttttgaaaataatgtaataaagttatatataaaatgttattatataaatgagggtaaatttgatttagttaaatgatgtggtttatcgttattttaaaaattggaatttatttattttgattttttattgtgattgttttagtattggaagattgttttatttacgtatgcgaagtttagcgagtgtttaaatttatttttttttagagatattaggaatatatgttaagaaaaataagtattatagaatatattaatgttttattaagtttaatgaatttttggtataaggataaagttttttgttatagaagttatataagtaattttgttttgatattaagtaattaaatgttaatgattaatatggtgatttatatttgtttaaatataaaatagattataattttgagttaaatgtgttgtttatggtttatttgatgagtataggttattaattatgtttgtaaatttattgtggttatagagttaatattggaataggttataattaatgttaatattagtataaataataaaaagtaagataatatagtttataataagattaaatttatgggaatatattgttttagatgtatgaagttgaggtttatggattatttaagatattaaaattagaaaaatggaaaaaagaattatattgggttgaaaatttttgaagtgtattagaattttaaggttttaaagtaatatatttaataaaatatataatttttttttaaaggaattaggttattatttttagtatttattttgtatttttgttttaggtgattgtttagatatgtaatggttatagagtatttttttttttgattatttggaaaggttatgtgtttttgtagagttaattagggattttgaattagaaagggtttggtgaaaatttttgtttataattattaaatataagattatggttttgtttaatttttttgagtttt

SEQ ID NO: 1978 - DNA, 2422 bp, Artificial Sequence
  chemically treated genomic DNA (Homo sapiens)
gagatttagaaagattaaataaaattatggttttatatttggtagttgtgggtaagaatttttattaagttttttttgatttaaaatttttggttagttttataaggatatatggtttttttaaatagttagaaaggaaaatattttgtggttattatatgtttggataattatttagggtagaggtataaagtgggtattgaaaatgatgatttgatttttttaagaaaaggttgtgtattttattaaatatattattttaagattttgaaattttaatatattttaagagtttttaatttagtatggtttttttttttatttttttagttttaatattttgaatagtttataaattttaattttatatatttagaataatgtatttttatgaatttggttttattatgggttatattattttattttttgttatttatgttgatattaatattagttatgatttgttttaatgttaattttataattatagtaaatttataaatataattagtgatttatgtttattagatgagttatggatagtatatttaatttaaggttatagtttattttgtatttgagtaaatgtaagttattatattaattattgatatttaattgtttagtattaaggtaaaattatttgtataatttttatggtaaaaaattttatttttatattagaagtttattaaatttaataaaatattaatatattttataatatttattttttttggtatatatttttggtatttttgagaaaaaatggatttgaatattcgttaagtttcgtatacgtaaataaaataattttttagtgttgaggtaattataatgagaggttaaaataaatggattttagtttttaaaatgacgataaattatattatttaattaaattaaatttgtttttatttgtgtaatggtattttatatataattttattatattatttttaggaaagtttatggaatttattaattttaaagttattgattagtaaaatatggaaatagaggtcggttagtataatttttttagtttatgatagttgttttattattttgttaattttattataaatttgtgtgtgttaaattttatgttttatcgttagttttttttttaaatttttgtttaataagtttttttttttacgttttttaagttttatattgaaagagaatgagaaagagagaaagattgagagatatagaggtttagattttgtttagaaaatgattcgacgtgtttatatgttagatattgtaggatattttaagttgtgagagtttaggatattattagagagttttagcgataatttttggttagttagtgtttttatttatagatgtttaaattttataaatagagtattgaagagaagttaggtagttggttttagataatgataaatgtttttagatataaaagtaaattttttagtagaatgttttaataggttaggttttttgaattaatatagatgtatgtgataaaaatttacgattaaagaatttattaatagttgttgtaatagaataaaatatattttagaatatagatttaataaattagttaaaaagaataaatgtgatagttagatagtaaataaaattagtagatttagcgtttttaaattttaatttgtaatttagtattgtagatatgtttgtattattttgtagattttttaaaatgttgtttaaagaggaagagtaaaagtataataaattaaaattataaagatatgtaaatatatatttaaggggtgttgttaattttattttatggagagttgataaaatgatgtttaaaaatattatgaaataaaagtgtttttttttataaaaatggattttgttttttattattttggtttttttattgggagtaaagttatgatatagaagataaattttattttttttagtggaataagtatttttagatttttttagaaaatgttatatgttttaaagaaaattaattgggtaatttaatggtaaatagttttttttgtgttttgtagtaaaataaaatatgtggaaggtaatagaagaatagaaacggattttagagtaaattaagattgttttttatggtgatttaatattttagtttgtttaaaatatttttttaatatttgttttttggttttggttttgttttgttttgttttgtttattttaatttaaattttttattagttttttttttataagaaaatattttagaaaatgtgttgtggagttttgtttttttaaacgattgtagttaattttttgttgttaggtagggttgttttagaatttattttgtattatgatggaaggtttgaagattttagaagtgaaatattgagtaggtaataaatttattttttaggatgataaatttagaaatattata

SEQ ID NO: 1979 - DNA, 2662 bp, Artificial Sequence
  chemically treated genomic DNA (Homo sapiens)
tatagtatatttatttgaaaaataatggttatatatagtaatatttttgtttatagaaattttaaatttttttttattatgggttttatagttatttattattttttatttttttttatagttattaaatatttttagttttttagtattttttttgtaaaattgagaggagggaatttgttatatttatttttgtagtaggatgttgatttgtaaacgaagtgttgatgtattgttgatgttatttatttaataaaggtataatagatattagtagggtagataggtattttaagaaaatggtttgatataagagttgaaagaatttgtttagaattttagaattattaaagggttttatgtttattttattttgttagggagaggatatttttttttgtttagagtatgttttaattatttagagttaaaatggttgttttagtttagtaaatgggaaataaatttgagttttattgaaatgggttaagggttttaattttcgtttagtgtgttggttatattgggaaggaatatttgtttagttataatagttaagagtatcggtatgataaatttgggtaggttttagagtgtttgtttatagttagtaaggaggatttaaaaaagatgtagaaagttgtgtaaataattgtaattgtattgatatttttatttatatgtttagaagagatatatttgaagaaaattttttttaaaatagttttttagttgagattatatttttttagtgtgtagtttataggaagttttagttgttaagagtatgttcgatatgagtagatttttatttaatttttatgtataatgaatttaatttttattttttttagaaagatattgaaaatatgtgtcgtgattttaatgttataattatgtagttttattttttataatacggtataattattaacgaagtttaaattttatgtttggtatttaaggtgaatatttttatagaaagtaggaaatatttagatgtttgtttgtcgtggtggtggtgtttttatatattttttgtgattttaaagatataataatgtttgatatttttgttagttagtaatgtggatttaagatattttaattatattgttgattttaattttttaatagatttttacgtagtttttgagttttattgtaggttttagtgttagtttcggaggaaattagaaaagggttgaaattattgatatagttatttttttagttttttttaacgtaggtgtatagttttttgtagtgagtagatcggggtttatagggatattgtatgtttgtattgggttgttattagttttatggaaatatgtattaattgtgttattgtgtttttttgttatattgttttttttttaggtcgttttggtatcgtttatttaaattgtgtaattatttggtttaggtgtcgtagagattgattagtagtataaggttattataagtataatcgttattcggttattttagttattttttttagtattttagatattatggcgttcgagggtgggtttaacgggtttcgagtgttcgggagataatgtatatttcgtagtggattttttcggggtttcgagcgttgttcgtttattaggtggcgtcggttttttcgaataggtcgtttaataattttcgtttagtagtcgtttttattgcgcgcgcgtagatttcggcgtttattttcggtgtggtttaggcggggttcgtagaattagttatgtcggtttacggtatgtttatgtataagagcggggatttggtgtttgttaagttaaagggttatgtttattggtcggcgaggatagagtatatgatttagtttaatcgttattaggtgttttttttcgggatttacgagacggtttttttgagttttaaacgtttgttttcgtataaggagtgtaaggagaagttcggtaagtttaataagaggcgcggttttagcgcggggttgtgggaaatcgagaataattttacggtttaggttttcgattgtttattagttttagagaagggtagcggagacgggttttggtcggagttcgaggtcgtagagggcgacgaggataagtcgatttacgttggtggcggcggcgacgaattggggaagtcggacgacgataagtttattgaggaggagaaggggtcgttgaagaggagcgcgggggattcgtcggaggacgtttttaaacgatttaaggaggtagttttcgattaagaggaggaggcggaggcggagagggcggcggaagcggagagggcggcggcggcggcggcggcgacggtcgtcgacgaggagagttcgtttttcgtggcggtggagaacggtagcgtttttagcgagtcgggtttggtttgcgagtcgttttagttagaggaggaggagtttcgggaggaagaagtcgcggacgaggaggttttttaggagtggtatgtcgaggtatcgggcggcggagatcgcgatagtttgtagttattagcgtttttagaagagtttttgtttcgtttttgttgcggtttggtcgtttttggggaatttgattacggcgtgtaaattgggattgtttttttttttttttagttcgtttttttttaattcgcgtttttttgttttgtcgggttttaggatggtagg

SEQ ID NO: 1980 - DNA, 2662 bp, Artificial Sequence
  chemically treated genomic DNA (Homo sapiens)
tttgttattttggggttcggtagggtaaaggagcgcgggttggaggaggacgggttgaggagagggaaaggtagttttagtttgtacgtcgtggttagattttttaagaacggttaggtcgtagtaggaacggggtaggggtttttttggaaacgttggtaattataggttgtcgcgattttcgtcgttcggtgtttcggtatgttatttttgggaggttttttcgttcgcgatttttttttttcggagtttttttttttttggttgaggcggttcgtagattaggttcggttcgttaggggcgttgtcgttttttatcgttacgaggaacggatttttttcgtcgacggtcgtcgtcgtcgtcgtcgtcgtcgtttttttcgttttcgtcgtttttttcgttttcgttttttttttttggtcgggggttgtttttttgggtcgtttgggggcgtttttcggcgggtttttcgcgtttttttttagcggtttttttttttttttagtgggtttgtcgtcgttcggtttttttaattcgtcgtcgtcgttattagcgtgggtcggtttgttttcgtcgttttttgcggtttcgggtttcggttaaggttcgttttcgttgtttttttttgaggttaatgggtagtcggaggtttggatcgtggggttgttttcgattttttatagtttcgcgttgaagtcgcgttttttgttgggtttgtcgaatttttttttgtattttttgtacgggaataggcgtttgggatttaggaaggtcgtttcgtgggtttcgaagaaaaatatttggtagcggttgggttgggttatgtgttttattttcgtcggttagtgggtatagttttttaatttggtaaatattaggttttcgtttttgtatatgggtatgtcgtaggtcgatatagttggttttgcggatttcgtttgggttatatcggaagtagacgtcgaagtttgcgcgcgcgtagtaagggcggttgttgggcgggagttgttgagcgatttgttcgaggggatcggcgttatttaatgggcgggtaacgttcggggtttcgagaagatttattgcgaagtgtgtattatttttcgaatattcgaagttcgttggatttattttcggacgttatgatgtttagaatgttggaggaaatagttgggatggtcgggtggcggttgtgtttgtggtggttttgtgttattgattaatttttacggtatttgggttagatggttgtatagtttaaataaacggtgttagagcggtttagaaagggggtagtgtgataagaaaatatagtgatataattagtatatatttttatgaaattagtaatagtttagtgtaagtatgtagtgtttttgtaggtttcgatttgtttattataggaaattgtatatttgcgttaggaggagttaaagagatggttgtgttagtggttttaatttttttttgatttttttcgggattagtattggagtttgtagtgaggtttaagaattacgtgaaagtttattaaagggttagagttagtagtgtggttaggatgttttaagtttatattattggttaataaaaatgttaaatattattatatttttagggttataaaaagtatataggaatattattattacggtaaatagatatttaaatattttttattttttatggaaatgtttattttggatgttagatatgaagtttaaatttcgttggtgattgtatcgtattgtgaaagatgaggttatatggttgtaatattgagattacgatatatgtttttagtatttttttagaagagatgaaaattgggtttattatgtataagaattaggtagagatttatttatatcgaatatgtttttggtaattagaattttttgtgagttatatattaaaaaagtataattttagttgagaaattattttaaaaagaattttttttagatatgttttttttaaatatatgaatgaaagtgttagtgtaattgtagttgtttatataattttttgtattttttttggattttttttgttagttgtgagtaagtattttgaaatttatttaaatttattatatcggtatttttgattattataattagatagatgtttttttttagtgtaattaatatattagacgagaattagagtttttaatttattttagtaaaatttaaatttgttttttatttgttgggttggaatagttattttaattttgaatggttgagatatgttttaggtaaaaggagatattttttttttaataaggtgaaatgaatatgaagttttttgataattttaaaattttaaataagtttttttagtttttatgttaagttatttttttagaatgtttatttgttttgttaatatttattatatttttattaaataagtaatattaataatgtattaatatttcgtttataaattaatattttgttataaagatgaatatgataagttttttttttttagttttatagggaaagtgttagaaaattagaaatgtttagtggttgtagaagaaaataggaaataataggtagttatggagtttataataggaaggaatttggaatttttgtaagtagagatattgttatatgtggttattattttttaggtaagtatgttgta

SEQ ID NO: 1981 - DNA, 5352 bp, Artificial Sequence
  chemically treated genomic DNA (Homo sapiens)
aatataagaagttttgagttttttgaagtcgggtattaaagttaaagatttatttttcgtattttttatggtttttttttgtagtttagttcggttttgagttttcgaaacgtttttcgaggcgggggtttttttgttaaggggcgataggtgggttatttcgaggcgggaacgattaggtaggtgttggttggtttttttttgggtgagtagttaggggaatcgtttttttaggggatttagatgatattaaattattttattatataaatttttcgtggaggtttgtttttaggagggtaattatcggattaatttaattatgtagataggtaatatggattattttgtttttaaaataatcgaaaattaaacgtttttttcgtttattgtagaaatttttttattaaggacggggttgaattggagggattgtgttgataaattttttatttgaaaattttttagttaaggagtatttgtttaaggtcgcggttatttagatgttcggtttttattttttttttcgttgaaaagtcgtatcgatgattaacgttgtttgtcggtttggtggtttgaaaacgaatgtcgggtattgatgtaaggatatttttttttatttttgggattttggtttaagtaaaggaggtcgaatggagaattaagataattatttaagtaatttaaaaagtttaaagatatttttaagcggattttgttttagtggtttgtgatggtagtttagtggatagttttttagtggttttttggggttaattgttttaattttttattttgtttgttttagtaaagggaaagatgttaaagtagttgtggatttgtagttttttttttgtgtgtgtagagtttttaggaattattgttttagtgtagtaggagaagcgtttttttttatgttttaagtttgttttttttgttgttttttagtttttgggttaggtggagttttttttgaagttggtttttatttgttttcgtttttttattgtagtttatagttcggtttttagggttgaatttagagtttagaggatggagaagttagaaagcggggaggtaagggagagggcgtttaggtatattatagaggtgattgggttgtgacggggataattcgtataatacgagttaagtttatatttttagggagtgattttttcggattgtttttattttaatttttattttttttgttttatttgaaaaagaaaaagaaaaaagagagttttttttggtttttggtgatttatatttaggatattattttattttttagtatatatatttttatagtgttatttggtttttaattcgagtattttttggagtgttcgttatatttttttttttggtgtttttttatggtggggttaggggaggttttgttttgaatatcgttgtgacgttattttttttttttcgagttaagtatttttcggtgggttttgggaattgttgttcggtttgttggggaggggcggagtgtgggtttagggagggttttattaaatatttattatcgttgtcgtttgcggggtttttaggttgtaagtacgtgaggtgttagaaaagaagtcgaagggttttcgtgggggtttttttgttaaatgagttaagagatgtgcggaagcggatgattgaagtatttcgtggagtagtagaaaggggtattaaaaattgtaatttgaaaataaaagttttaatttgttttttaaaagattttatgtttgcgttttaatgtttaaataatattattaataataaaaatgaaataagaaaagtgtttgaaatataattaagtcgtttattggaggtttgttttcgagtaagtttataaaatataaatgtaaatatttttttttggcgaatatttagagttaaattagtggaaagttgattttgataaaattacgtttttttattttttttcgtacgttagatattaattttataacggcgatttttatatttaaaacggagagttgagaatatcgttgtaggtcgatttgtaatttatataataagttgtttatattttattgggtcgatggagggaggaggtagggaagagtaggaggcgataggttggtgggggagggggtagcggggtattattgtttgttgtaaaattcggggtcgaaggcgtttttcgtattcggaaaataaagtattcgtaatcgttgcgtttattttcgcgtatcgttagtagtgtaaaaggtagttttaagatcgaatttattatttgttgaggtgtttagggagattatttaaattttttttaggttgaagttatagtattttttaaagtttcgattaggcgggttgataagatttttagggtgtcgggttgggggttgaataggaattaagtgtttaggttttggggttttattattattttcgtttttgtttagtgtttttggtaattagtaagtgttgagttttttgttggtgtttttttaatttattagtgatttggttcgtaaattatttggaaaaggagtttttagagatttcggcgtatagtaggttaggaggtagttgtttcgggatttagagtaatttcggggtaatttttttttttttaaaggttaattttagaagaggtaggttttttttttttcgatgttaatgtttattatgaaatagtaatttttaaatatttaggtgatacggagatgcgtttgttatacgttagcgttttttatatgtaatagtcgaagttgtaatttgaatttttttgttaacgtgaggaagtcgggattcgaatcggggagataaaaggggtttcgaatatgtttttggatttaatagatggtcggaaattaggggtagcggagttgttaaatgcgttacgtacgttttttcgtagttttttgagttcgttattttttttagtttttagtgaacgatttgggatttagttttcgggagggtttttttttaagtcgttaaaatgtagaatcgtcgtgtcgggggagggaggtttggttttttttcgttttttcgttttttttttttattttttttttttttgttttattttaattatttagcgacggcgaattttaggcgtgtgtataacgagcgggggttttttcgtgcgtgtttttttagaatttttgaatcgttttttaggtgcgattttggacgtttttttagatatattcgttgtttttgcgagtcggtagtttcgcgtatgtggagatggagattggtttggggaagcgttaagtttttagatatatttatttgttttttgttattatatttgttaatgttatcgagttcgtagtttgattttttatttgagtcgaaacgggtttgacgggattagagggggcggcggcgcggcgagtcggtgggattttcgcgggcgggtaggggagcgcggggtagtagtcgggtttcggtagttttcgtcgttcgtatttttaggtcgttaagggtcggtttttcggggaggggggcgagaagtagggcggttcgtagcggggcgggtttatttttcgcgggtgaacggtcgtcggaaatttttagtagggtttcgtattttttgtttttatttcggttggggaggggttatggaggggggttagatgggcgacgaatttttttttttatcgcgagtagggtttggttgtgatcgagtttttaaaattatgttttttgtagtcgagtttaggataggagaatttttaagtggagaaaagtcggagacgttagtgattcgagtgagattggcgttggagaagggagggaaggggttgcgggaggggagaggcggcggggaggagaggttggggtaattttagcgttggcgtcggcggggttggcgaaggaatgagagcgagttagtacgaggcggggcggagacgttagggttattcgggagtcgtgggcgaaggaagggtttgtacggggtttcgggaggatttaggaagtttgcgcgaacggcgggcgtgggttcggagggttcggggtgggaggtttgtcgggcgtcggcggtaggtaggtggattgcggggggcgaatcgacggcgggtcgggcgtcggcgcgggcgtagggtcggggttcgggttagggcggtcggcgcgcgtgtggttagtttcgcggtttttcggttttcgggagcgggtcggtagggttcggttttcggtttattcggaggcggtttttattttttattggttgtcgtcgttggcggggcggggtttcgttgttcggaaaaaagtgtaattgcgtaaaaaagttttcgtttgggtgacggatgtttaaaagtttagaagtttttttaatgtttttttaagcggttggcgcgcgagagatcgagaaaaggtgacgcggggttcgggtaggcggtcggcgcgcggtttttttttttttcgttttggttatttggtcgttttcgtcggtagtttagggtagagttttttggaaggcgtaggtagtgtggcgagaagggcgtttgtttgttttttttttttgtttgttttttttcgtttgcgtttggaagttgcgtcgcgagtttttgtaaggcggtttgtcgcggtcgggttcggtttttttttttcgtagcgatttcgtttcgcggtcgcgcgggtttcgaggtagttcgaggcgtcggaggagttagttttagcgagcgtcgggagaggcggtagcgtagtcggacgtatagcgtagcgggtcggtattagttcggtcgggttcggattcggattcggcggtcggcgcggcgcggttcggttcgagcgagggtggggggcggcgggcggcgcggggcggcggcgagcgggggttatgtaggcgcgttatttcgtgtttagttttaattttttgggagtggtgttttatttcggcggcgagtagagttattatcgcgcggcggtcgcggcggtcgggggcggttatatcgttatgtcggtttttatgagcgtgtattcgtattttgcgtacgtcgagtagtattcgggcggtatggttcgcgtttacgggttttatacgtcgtagtcgtagtttaaggatatggtgaagtcgttttatagttatatcgcgtttattattatggttatttagaacgtttcggataagaagattattttgaacggtatttattagtttattatggatcgtttttttttttatcgggataataagtagggttggtagaatagtattcgttataatttttcgtttaacgagtgtttcgttaaggtgtcgcgcgacgataagaagtcgggtaagggtagttattggacgttggattcggatttttataatatgttcgagaacggtagttttttgcggcggcggcggcgttttaagaa

SEQ ID NO: 1982 - DNA, 5352 bp, Artificial Sequence
  chemically treated genomic DNA (Homo sapiens)
tttttgaagcgtcgtcgtcgtcgtaggaagttgtcgttttcgaatatgttgtaggagttcgggtttagcgtttagtagttgtttttgttcggttttttgtcgtcgcgcggtattttgacgaagtattcgttgagcgagaggttgtggcggatgttgttttgttagttttgtttgttgtttcggtagaaggggaagcggtttatgatgaattggtagatgtcgtttagggtgatttttttgttcggggcgttttggatggttatggtgatgagcgcgatgtagttatagggcggttttattatgtttttgggttgcggttgcggcgtgtagggttcgtaggcgcgggttatgtcgttcgggtattgttcggcgtgcgtagggtgcgagtatacgtttatgggggtcggtatggcggtgtagtcgttttcggtcgtcgcggtcgtcgcgcggtagtagttttgttcgtcgtcgaggtagggtattatttttagggagttggggttggatacggagtagcgcgtttgtatggttttcgttcgtcgtcgtttcgcgtcgttcgtcgttttttattttcgttcgggtcgggtcgcgtcgcgtcggtcgtcgagttcgagttcgggttcggtcgagttggtgtcggttcgttgcgttgtgcgttcggttgcgttgtcgtttttttcggcgttcgttggggttggttttttcggcgtttcgggttatttcggggttcgcgcggtcgcgaggcggggtcgttgcgaggggagaaggtcgggttcggtcgcggtagatcgttttgtaggaattcgcggcgtagtttttaggcgtaaacgggggaaagtagataaaaagaaagaataagtaggcgtttttttcgttatattgtttgcgttttttaggagattttgttttgagttgtcggcgaaggcggttaaataattagggcggggggggggggggtcgcgcgtcggtcgtttgttcgggtttcgcgttattttttttcggtttttcgcgcgttagtcgtttaaggaagtattgggaaaatttttgaatttttgagtattcgttatttaggcgaggatttttttacgtagttatattttttttcgggtagcggagtttcgtttcgttagcggcggtagttaatgggaggtgagaatcgttttcgaatgagtcggaggtcgagttttgtcggttcgttttcggaggtcggaggatcgcggggttgattatacgcgcgtcggtcgttttggttcgggtttcggttttgcgttcgcgtcggcgttcggttcgtcgtcggttcgtttttcgtagtttatttgtttgtcgtcggcgttcggtagattttttatttcgggtttttcggatttacgttcgtcgttcgcgtagattttttgggttttttcgggatttcgtgtagatttttttttcgtttacggttttcgagtggttttggcgttttcgtttcgtttcgtgttggttcgtttttattttttcgttagtttcgtcgacgttagcgttggggttgttttagtttttttttttcgtcgttttttttttttcgtagtttttttttttttttttttaacgttagttttattcgggttattgacgttttcggtttttttttatttggaggtttttttgttttgaattcggttataaaggatatgattttgagggttcggttatagttaggttttgttcgcggtggggaagaaggttcgtcgtttatttggtttttttttatgatttttttttagtcgaaatgaaggtaaggggtgcggggttttgttgggagttttcgacggtcgtttattcgcgaaggatgagttcgtttcgttgcgggtcgttttgtttttcgttttttttttcggggggtcggtttttggcggtttgagggtgcgggcggcgagggttgtcggagttcggttgttgtttcgcgtttttttgttcgttcgcgagggttttatcggttcgtcgcgtcgtcgttttttttgatttcgttaggttcgtttcggtttagatgaggggttaggttgcgggttcggtgatattagtaggtgtgatgataagaagtaaataaatatgtttaagagtttaacgtttttttaggttagtttttatttttatatgcgcggggttgtcggttcgtagagataacgggtgtgtttgggggaacgtttagggtcgtatttagagggcggtttaaggattttggggggatacgtacggaagggttttcgttcgttgtgtatacgtttgagattcgtcgtcgttgggtggttggaatgggataggaagaagagaaatgagggaaagaaacgaaggagcgggaaagagttaggtttttttttttcggtacggcgattttgtattttagcgatttgaggagagattttttcggaggttgaattttaagtcgtttattagaagttgggggaagtggcgagtttaggagattgcgaagaagcgtgcgtgacgtatttaatagtttcgttgtttttgattttcgattatttattaaatttaaggatatgttcgggattttttttgttttttcggttcgaatttcggtttttttacgttggtaggaaaatttaaattgtagtttcggttgttatatgtgaaggacgttgacgtgtagtaggcgtattttcgtgttatttgaatatttaaaaattattgttttataatggatattgatatcgaaggaaagaggatttgttttttttagaattagtttttggaggagggagggttgtttcgaggttgttttgaatttcggggtagttgttttttggtttgttgtgcgtcggggtttttggagattttttttttaggtggtttgcgggttaagttattggtgggttggagaagtattaataggaggtttagtatttgttggttgttaaggatattagataggggcgagggtggtggtgaagttttaggatttgaatatttaatttttgtttagtttttagttcggtattttgaaggttttattagttcgtttggtcgaggttttaaggagtgttgtggttttagtttggaggagatttaagtggtttttttgaatattttagtaagtggtgagttcggttttgaagttgttttttatattgttagcggtgcgcggagatgaacgtagcgattacggatgttttgtttttcgaatgcgggaaacgttttcggtttcgagttttgtaataggtaatggtgtttcgttgtttttttttttattagtttgtcgttttttgtttttttttgttttttttttttatcggtttagtgaagtgtaaatagtttgttatgtaaattgtaaatcgatttgtagcggtgtttttagtttttcgttttgggtataaaagtcgtcgttgtgaaattagtgtttggcgtgcgagaaaaaatggagggacgtagttttattaagattaattttttattggtttagttttggatattcgttaggaaaagatatttgtatttgtgttttataaatttattcggaagtaagtttttagtaagcggtttgattgtattttaagtattttttttattttatttttgttgttagtggtgttatttgaatattaagacgtaggtatgaagttttttggggaataggttaaagtttttatttttaggttatagtttttgatgtttttttttgttattttacggggtattttaattattcgttttcgtatattttttgatttatttggtagaagagtttttacgggaatttttcggttttttttttgatattttacgtatttgtagtttgaaggtttcgtaggcgatagcggtaatggatgtttggtggaattttttttgggtttatatttcgtttttttttagtaggtcgggtaataatttttagggtttatcgaggggtgtttagttcggaggagggggagtgacgttatagcgatgtttaaaataaggttttttttggttttattatagaaaagtattaggaaggggaatgtggcgagtattttaggaaatgttcggattggggattaggtgatattgtaggaatgtgtgtgttgggggatgggatggtgttttaaatatgggttattaggagttagaaggagttttttttttttttttttttttttaagtaaagtagaggaggtggagattgggatgggggtagttcggaaaaattattttttaggggtgtgagtttagttcgtgttgtgcggattgttttcgttatagtttaattatttttgtggtgtgtttagacgtttttttttttattttttcgttttttggtttttttattttttgggttttgggtttagttttgaaagtcgaattgtgggttgtagtggggaggcgagggtaggtagaaattagttttagggggggttttatttggtttaggagttgggggataatagaaaaggtaggtttagggtatgagggaaggcgttttttttgttgtattggggtagtgatttttgggggttttgtatatataggagggaggttgtaagtttatagttgttttagtatttttttttttgttggggtagatagagtggaagattaaggtaattaattttagagggttattagaaaattgtttattaggttgttattatagattattggagtaaggttcgtttggggatgtttttgagttttttagattatttagataattgttttagttttttattcggttttttttgtttagattagaattttaggggtaggggaggatatttttgtattaatgttcggtattcgtttttaaattattaggtcggtaggtaacgttagttatcggtgcgattttttagcggaggaaggagtggggatcgaatatttgggtggtcgcgattttgggtagatattttttagttgggggatttttaagtagaggatttgttagtatagtttttttaatttagtttcgtttttagtagaaaaatttttataataaacgaaaagagcgtttggttttcgattgttttaaagataaagtgatttatattgtttgtttatatggttggattaattcgatagttgtttttttgggggtagatttttacgggaagtttgtgtgatgggataatttaatgttatttaagttttttggaggggcggtttttttaattatttatttaggagaaagttagttaatatttatttgatcgttttcgtttcgggatggtttatttatcgttttttggtaggaaagttttcgtttcgaagggcgtttcgggggtttagagtcgagttaagttgtaagagggggttatggggaatgcgggaagtgaatttttaattttggtgttcggttttaaaagatttagggttttttgtgtt

SEQ ID NO: 1983 - DNA, 2428 bp, Artificial Sequence
  chemically treated genomic DNA (Homo sapiens)
tatggaatattatttagttataaaaaagaatgaaataatgttttttgtagtaatttgatggagttagaggcgttattttaagcgaagtaattcggaaatagaaaattaaaaattgtagtttttatttataagtggaaattaagttatgggtacgtaaaggtatatggagtggtataatggattttggagatttagaaagagggagagtgggaagggggtgagggataaaaaaatatatattgggtatatatatatattcggtgatgggtgtattaaaattttatatatatatgtatatatatatatatgtatatttatatgtatattttatttatgtaattaaaatttatttgtgttttaaaagttattgatatatatatatatatataatttttatatgtttttatatatatgaaaaaagatagtaaatttttgttttttaaattttaagttataggaagagaaaaatatttataaaattttaggtttggagatttgatttgtcggttgaaatttttttttgttaatgttgattttttatattggaaaatttttagattattatttgtatgagtgagaattttttttttgatttttaatttaaattatatggaaagaaggttaaaatggagttcgtgtattttgaatttatttttagtatttaggttgtagtattatagtttaatttttattagtaggaggtattatttaaatatgttgagaaatatttatttttaaggaatgatattgtttttttatttggtttaatttagtttgagaaggattgttgtttttgatgaagaaagagttttattttcggttattgttatagttgttttgttaataataaaggtatagtattttttttttgtgtatttttaatatggatgttttttagggtattttaaaatttttttttaattagaaaattgttattggttatagttttatggttttgttgatcgtgggaagtgagcgttttttttttgttgtggtttttaagtgtttttgtagtattgagaatatgatttatgggttggtttttttttttgtttttgtttgggtgttattgattttgggattttttttgaataataggtcgtggagattttttataggttgttgtgtgaattttaggaaaattttttttagaggttatagttgtcgttttttttacgttttcggttagattattttgagtttattggtggttttagtgatgtggttttttgtggttttgtttaatggaattttttatgaatgtgttatgagcgggacgagaagtttaggatttttggaattgatttgtaagggtaagtttaaagagtgttgggaagaattttataaagtattttgtggtaaaattagtatgttatttatcgttaatgaagaattgaaattttttttttaggtttagttttaggtaagaaaagataaattcgttttttttttttagtatgagttcgaagtattttttttgtgttttttttagttagggttgtttgtgttttgttagaatattttgaaattaaatggaaattgaaatatgatgtagtattgagattattttaggaaaagtttttgaaaggttgggtggtttaataaagttgttgattggattatttttttttcggttttgaaaagaaaatatttattggattgtttatatataaatatttaagtattttaaaatagtttttttgggtttgtaaataaataatgtttaatattaaattataaattgagtgttaatggtagagttgtaattagaaattattgttttttattaattatttatatttaagttgtttttttaaatatatatatgtattatttatttattaaaatgtagttgaatgaaatgagttattattttttaaagttgtatgtaatataattagtgtggagatttttttgaatgatttttggtaattgttatttttgtgtataaatattgttaagattgagaagaattttttttgtatggtaggaattagtagtttttaaatagttttttgtgaaaaagtgattgtattttttagggagattatgttttatattttttgtgttgtatagttaaaggggtttttaattattttagaagtttaagatttgggtattgttttatttaatagaaggaaattatatttttatttaattgatgtagggaagtagtttgttatttttttaggtatatgaatataaatttagatgtatagttttaggaaggattaattttttatttataggtagtaagaattgtatttttaaaagtaaaataagtggtaagagttgataagtagatttataaattgttaggaatgttatttgttttagaataaaggtatagaaatagtattattttattttttcgataaggatttgttttggtaataataaattaaggtaaaatttgtttttaaaatta

SEQ ID NO: 1984 - DNA, 2428 bp, Artificial Sequence
  chemically treated genomic DNA (Homo sapiens)
tgattttaaaaatagattttgttttgatttgttgttattaaggtaaatttttgtcgaaaaagtaaaataatgttatttttgtgtttttattttgaaatagatagtatttttgataatttgtggatttgtttattaatttttattatttgttttgtttttgggaatgtaatttttattatttataaatgggaagttagttttttttaaggttgtatatttggatttgtgtttatgtgtttggaggaatgataggttatttttttgtattaattaggtaaagatatgatttttttttgttaaataaaataatgtttaaattttgagtttttgaagtaattaagaatttttttagttgtatagtataaagagtataaaatataatttttttagagagtatagttatttttttatagaaggttatttaaaaattgttgatttttattatataaggaaaattttttttaattttgataatatttatatatagagatagtagttgttagaaattatttaagagaatttttatattaattatattatatgtaattttgaaaagtaataatttattttatttagttatattttaatagatgaataatatatgtgtgtgtttgagaaaataatttgaatgtaaataattgatagaaggtagtaatttttaattatagttttgttattaatatttaatttatgatttagtgttaggtattatttatttatagatttagagagattgttttaaagtatttaagtatttatatgtggataatttagtggatattttttttttagaatcggaaaagagataatttagttagtaattttattgagttatttagttttttaaaagttttttttgagatagttttaatgttgtattatgttttagtttttatttagttttaaaatattttgataggatatagatagttttggttgaaaggagtatagagagaatatttcgagtttatgttgagagaaaaaggcgagtttgtttttttttatttgagattgggtttgaagggagagttttagttttttattgacggtaggtagtatgttagttttgttataagatattttgtgaagttttttttagtattttttgggtttatttttgtaaattagttttaggagttttgaatttttcgtttcgtttatggtatatttatagaaagttttattgagtagagttatagaaagttatattattggagttattaatgagtttagagtgatttggtcgaggacgtagaagaaacggtagttgtggtttttgggaaagatttttttgggatttatatagtagtttgtgaagagtttttacgatttattgtttagaaagaattttaggattagtaatatttaggtaggagtaaagaggaaaattagtttataggttatatttttagtgttgtaggggtatttaaaagttataatagaaaagagacgtttattttttacggttagtagagttatgaagttgtagttaataatagttttttgattaaggaagaattttaaaatgttttgaaaagtatttatgttggagatgtatagagggaaaatgttgtgtttttgttattggtagagtagttgtggtagtggtcgagggtggagttttttttttattagaaataatagttttttttagattgaattgagttagataaggaaataatgttattttttaggaatgaatattttttaatatgtttagataatgttttttattggtggaaattgggttgtgatattgtagtttaaatgttgagaataaatttaaagtgtacgggttttattttaattttttttttatgtggtttggattgaaaattagaaaagaaatttttatttatataaataatagtttaggaattttttagtgtaaggaattaatattaatagaaagaggttttagtcgataaattaaatttttaaatttagaattttatgaatgtttttttttttttatgatttgagatttggaagatagggatttgttgtttttttttatatatataaaaatatatgaaaattatatatatatatatatattaatagtttttggagtataagtgggttttggttatatggatgaaatatatatataaatatatatatatatatatatatatatatatatgagattttagtgtatttattatcggatatgtatgtgtatttaatatgtatttttttattttttattttttttttattttttttttttttgagtttttaaagtttattatattattttatatgtttttacgtatttatagtttaatttttatttataagtgagaattatagtttttggttttttattttcgagttatttcgtttggaataacgtttttagttttattaagttgttgtaaaagatattattttatttttttttatgattgagtagtattttatg

SEQ ID NO: 1985 - DNA, 2443 bp, Artificial Sequence
  chemically treated genomic DNA (Homo sapiens)
acgtgatttgaaggtatttagtatacgtttttgtttgggtaggattagttgagttatttttcgttttattaatttttaataattgttatattgtgtgtgtaattagtaagtgagtggtatatggagtttgatttggtattttatttatatattttgtttgatattatttttattgtttgggtttttgtttttggagaagagttgtcgaaaagtattatttttttttttattattaatttttatttttatttttatttttaatatgggatgtcgaggtgtagaggtattagtattgttttgttattattttagtggatacggattcgattaggcgttttttttttttttgtttatattaaggttttttaggtcgcggtcgtttatcgggaatttttttaggggagcggcggaggggcgaggttatggtgcggggatttgtaagagggttttgattttgatagagaggggtcgatgggcggttaggtgggtttgcgggtttattttgttgaggtgagggtttcgtgttagtaggtagtcgcgttgatgggtgtggcggcgacggggggtttcgggttttatggttggcgtcgggttcggcggcggggttaggtcggggcgggtcgtacgcgcggtgtaggcggcggatgttgttggggtgacggtgttgattgtagttgtggcggcggcggtcgtattgggaaaggtttagcggttgggggcgggcgtgggtggcgagagggggtggacgcgtcgggaggggttcgagcgaagtcggtgtttttagtagggtagtttgcgagaagcgttgagttatggtaggagattattcgagtcggcgtgtgaggaggaggaggaagagcgagttttggtagcgttgttggtggcggagcgggggtggcggtcggagtttttggttttatagggtttttgtttattatgggtttatgattatcgttgtggtcgtttttttttatgtgggtatgtttaaacgtagtgtattgggtggttttgttgattttagagatttagggcgggggtagggagcggggagcgttaggttaggatttttttgttcgggaaggttggagaaagtgcgagaagatgttagaaggtgcgaatttgagcggtttaggtagagtcggcggtcgtttagatatttagggggattataggacggaaggattcgtgaggggtttttagaattgttgatagaatatttcgataggttgaggagaattagattcgttttttttgttttgttagcgttttggaagttttttttttatagatttataattttcgtcgtgttatttaggatgtcggttatgttcggggttttgaggtcggagggaattaattttgatttagaatgtcgaggtttaagggaattgggaggaagtttagagaggagagtttaggcgttatatttgttagtttttatagattttttatcggaattgtatttgaatgttaataagataagagttaaggtgttagggtgtaaaggtttaatgaatagttttgtttattttgtatattatttttttgggagttttagaaatttgatgtttaagaattattgttttttttgaataatgatgagtaagtagttttttaggttttttttttaattttaggtgattcgttcgttttcgttttttaaagtgttgggattataggtgtgagttatcgcgtcgggttatttttttattgttttattgatatttatgtttggaggtttatggattggaggaatagttagattatagttaaaaggagtgtttgtttgataaaaataaattaatagtaatagatattaaagttttttgtgttttagttttttttttagttaaataggattgttagtttttgttttatttgtttttgtatattgatattataaaggatagtgtttgagattatttgttgattttatatttttatatattagatatatatttaattatagtgtttttatttttagttatgttaattttgttttattagaaagattttttatagtaattgtattttgttcgtatttatatttagaagtttttttgatttcgtttgaattatttagaattcgttgtttttatagagaatattttttaggtattataaagttttttttgaaaaaaatttttgaagttaaatgatattttttattgttaattttatattttataaatatttaattttataatatttaagaaaaaggtgtattttatataatttatttttttgaattaattgagatatattatagttagggtgttttatgtgagaggaaatagtttaatagttggtatgggagttaatttaagttgtttaagaagaaataaaaatgttagtataatagatttttattataataaagtatttattatatgaatttagatatattatttatttgtttttgtttttgagatttaatatttat

SEQ ID NO: 1986 - DNA, 2443 bp, Artificial Sequence
  chemically treated genomic DNA (Homo sapiens)
gtagatattaaattttagaaataggaataggtaggtagtatatttaaatttatgtaataagtattttattataataagggtttgttgtattaatatttttgtttttttttaagtagtttgaattggtttttatgttagttgttaaattgtttttttttatataaaatattttaattgtaatgtgttttagttaatttaggagagtgagttgtgtaaagtatattttttttttagatgttgtaggattgagtatttatggagtatagaattaataatgaaaggtgttatttaattttaaggattttttttaaaaagaattttgtgatgtttagaaaatattttttataaaaataacgaattttagataatttaggcgaggttaaagaagtttttaaatgtaaatacggataaaatataattattgtaagaaatttttttgataaggtaaagttaatataattagaaatgaaaatattgtgattggatgtgtgtttagtatatggagatataaaattagtaaataattttaaatattattttttgtaatattagtatgtagagataaatgggatagaaattagtaattttatttaattgaaaaggaaattggggtatagaaggttttagtgtttgttgttattaatttatttttattagataggtattttttttggttatgatttgattatttttttagtttatgaatttttaagtataaatattaataaaataataaaaaaatggttcggcgcggtggtttatatttataattttagtattttggaaggcggaggcgggcggattatttgaggttgggaggaaggtttgaaagattgtttatttattattatttagagagagtagtggtttttgaatattaggtttttagaatttttagagaaataatatataagataaataggattgtttattgggtttttgtattttaatattttgatttttattttattgatatttaaatataatttcggtggaaaatttgtagaaattgataggtgtggcgtttgagtttttttttttgggtttttttttagtttttttgggtttcggtattttgggttaaggttggtttttttcggttttagggtttcgggtatggtcggtattttggatggtacggcgaaggttgtggatttgtagaaagagggtttttaagacgttaataagataggagagacgagtttgattttttttagtttgtcgaggtgttttgttaatagttttggggattttttacgagttttttcgttttgtaatttttttaggtgtttgagcgatcgtcggttttgtttgaatcgtttaggttcgtattttttggtattttttcgtattttttttagttttttcgggtagggggattttggtttgacgtttttcgttttttgttttcgttttgggtttttggggttagtagagttatttagtgtattgcgtttaggtatgtttatatggagagaggcgattatagcggtgattataagtttatggtgggtagaggttttatggagttaagggtttcggtcgttattttcgtttcgttattagtagcgttgttaggattcgttttttttttttttttttatacgtcggttcggatgattttttgttatgatttagcgtttttcgtaggttgttttgttggggatatcggtttcgttcgggtttttttcgacgcgtttattttttttcgttatttacgttcgtttttagtcgttgggttttttttagtgcggtcgtcgtcgttatagttgtagttagtatcgttattttagtagtattcgtcgtttgtatcgcgcgtgcggttcgtttcggtttgatttcgtcgtcgaattcggcgttagttatggagttcgaagtttttcgtcgtcgttatatttattagcgcggttatttgttgatacggaatttttattttaataaggtaaattcgtaggtttatttggtcgtttatcggtttttttttattagggttagggtttttttgtaggttttcgtattatggtttcgttttttcgtcgtttttttgggaaggttttcggtgagcggtcgcggtttggggggttttggtgtgggtagaaggaagaaggacgtttaatcgggttcgtatttattagagtgatggtagggtagtgttggtgtttttgtatttcggtattttatgttagggatagaggtaaaggtaaaggttagtgatagaggaaaaggtgatatttttcggtagtttttttttaaaaataagagtttagataatgaaagtagtattagataaagtgtgtgaatggagtgttaggttagattttatgtgttatttatttattggttgtatatatagtgtggtaattattggaagttgataaggcgagaagtggtttaattggttttgtttagatagaaacgtgtattgagtgtttttagattacgt

SEQ ID NO: 1987 - DNA, 2489 bp, Artificial Sequence
  chemically treated genomic DNA (Homo sapiens)
atttttagtatagttagggtaggttttattaaattgtaaagtaggaaagttgaataatttttaaaagttaaagtagtttatgattttaaagtatttagttaatttagtttttgatttgtataatttagattatgtttatattttgaagatatttttatttttattttattgataatttaaaagatagtttatttagtaaagttatatttaagtgaatttgaaaattgtttagatttatttatttaatttatgaatatttttttatttataagttaatttggtagatataatatataatagtaagtgtatatataagtaaatatatttagatatgtatatatatatataaatgaagaggtggagtttaaaatatttaaattgggtgtagtgtatattgtttgggagatggatgtattaaaattttataaattattattaaagaatttgtttatgtaattaaataatatttgtttttttaaaatttatgggaaaaaaaaattaaaaaaaatatttaaatggtattatagaattaattagtcgaatatagtatttagtatttggttgttatttaatatttgttttatattattatatttagaaaataagtagatattttttttggaagagttttgagggagttattaggaggtttgtacggtttgtttttttgttttttttttgttttgtggttgaattttaatttttttcgggtttagattttattgattcgttttcgggtaaagtaaacgatttgattagatggttacgtgtattttttttttttttgaaattagtattatagggtaaaagattatttttatttggttgttttttagatgttttatatttggatagtaaattgattttaaattatttttttttaaagatttttgagggagatattgtatttggttattgtagtttagagtaggtttggttacggttatgagtatgttgagttattatgtttatcgtggatgatattttggagtaggttggggagtttggttggttttagaagtaagttttttttattttatgtttgttgtcggttgtttttgcgtttatttgtgtgggtatcgtttttttgggttttatatttgattattattgttagagttttggggtggttgagttgagttagcgttgtggttggagttttgcggaggagttgaattatatagtgttaggtttggggttcgcgggcgaggttttttttggttagtgtaggcgttatgaagtggattggaattagagcgtttttagttgtgtagattttttggttagtttggttattaataggagttatttgtcgttgggtttttgttaggatggttgggtgtatgatacgttcggtttttttatcgttattgaggtaaaaaagtttttgtaatatgggagtttttgggatagggagaaatataaagtaaattttatgaagtttagttttatattaggaaagaggtagggggttatgtttattgtgtagttcgtgggtgtttggttgtgttttaggtacggggtatttttttttttagtttaatttattataaattttgggtttttgaggaggaagttgaggtaggagagaatagttagtataagtcgggggttaggttgttaggttgtttgaatgggagttgattgggagattaggagtttttttgtttgttttattggttttttttagaattattaatttgttttgggtttcgtttttttattaatagtattgtgggttttttttttttgtttaagagtgatgacgattgattttaatgatggtgttgaggtggtttggaattgttttggtttggaagtgagaatatttggtggaattttagttgtgttttttattagttgagtattattgggtaagttattgtttttttaagttttatttttttattagttaattagggatgatgacggttgttttataggggtgtgagttttagttgggatttgtgaaagtattgagtaaatttaaattgagttatatcgtgtagttcgatggggtttatgggatagggcgatggttttaaaagggttttgtttgagtagtttatttggttatttgagtattttgttttgagaattttttagtaaaaagtgttattatattttttttttattatgagtttttttgaaattattgtacggtaataagtgtggatgtttggtgggttggagaagttgtgggttaaagttcgttaggggttttttgttagtaacgagtagtggcgtggttttggtgtaggtattgtttttttgaaataagaggtaattgggttttttttgtttttggttttgtttatttgtttgtttttattattttcgtttaagtttttcggattttttgggtttttgttttttttttttttttttttttgagtggtattagcggtgatatatttagggttattattggaggaaagtttagggttttttttttttgggtttgagtattgttttatttgtttgtttgg

SEQ ID NO: 1988 - DNA, 2489 bp, Artificial Sequence
  chemically treated genomic DNA (Homo sapiens)
ttaggtaagtaggtagagtaatgtttaggtttagaggggagggattttaagtttttttttagtaatagttttaaatgtgttatcgttgatattatttaggaaagggaaaagaggaagaatagagatttaagaagttcggagagtttgggcgagggtagtgggggtagataagtgggtaggattagaggtagggagggtttagttattttttattttagggaagtagtgtttgtattaaaattacgttattgttcgttattaatagaaggtttttgacgggttttggtttatagtttttttaatttattaagtatttatatttgttatcgtgtaatagttttaaaagggtttatgatgggaaaaaaatgtggtgatattttttattaaaggatttttaaagtaaaatgtttaaataattaagtaaattatttaagtaaggtttttttgaggttatcgttttattttatgggttttatcggattgtacggtgtgatttagtttggatttgtttagtgtttttatagattttagttgaagtttatatttttatgaggtagtcgttattatttttggttgattgatgaggaaatgaggtttagagaggtagtgatttatttagtgatgtttagttaataaggggtatagttgggattttattaaatatttttatttttaagttagggtaattttaggttattttaatattattattgaggttaatcgttattatttttgagtagaaggagggggtttatagtattattggtggggaagcgggatttagagtaagttgatagttttgggagaagttagtggggtaggtagagaggtttttggttttttagttaatttttatttaagtaatttggtaatttggttttcgatttgtgttagttgtttttttttgttttagttttttttttaaagatttagagtttgtggtggattaaattagagaagagaatgtttcgtgtttgggatatagttagatatttacgaattgtataataaatatagttttttattttttttttgatatggaattgaattttataggatttgttttatatttttttttgttttaggaatttttatgttatagaggtttttttattttagtgacgatggaagagtcgggcgtgttatatatttagttattttggtagggatttagcggtaggtggtttttgttggtggttaggttagttagggggtttatatagttgagggcgttttggttttagtttattttatagcgtttgtattggttaaggaaggtttcgttcgcgggttttaggtttggtattgtatagtttagttttttcgtagggttttagttatagcgttggtttagtttagttattttaggattttggtagtggtggttaggtgtgaaatttaggaagacgatgtttatatagatgggcgtaaaggtagtcgatagtaggtataagatgaggaaggtttgtttttggaattagttagattttttaatttgttttagaatgttatttacggtgggtatgatggtttagtatgtttatggtcgtggttagatttgttttgggttgtagtggttaggtgtaatgttttttttagagatttttgaaaaggagtggtttgaaattagtttgttgtttaagtgtgaaatatttggaaggtaattaagtagaaataattttttattttatggtgttggttttaggaaaaggaagaatgtacgtggttatttgattaaatcgtttgttttgttcgggagcgagttagtggggtttaagttcgaagagaattgaagtttagttatagagtaagaagagggtaggagagtaggtcgtgtaaattttttagtagtttttttagggtttttttaaaaagaatatttatttgttttttagatgtgatggtatgaggtaagtattgggtgatagttaggtattagatattgtattcggttaattagttttgtgatattatttaagtattttttttagttttttttttttataggttttgagggaataggtattatttggttatatgagtaggttttttagtggtgatttgtgagattttggtgtatttattttttaagtagtatatattgtatttaatttgggtgttttaagttttatttttttatttgtgtgtgtgtatatatgtttagatgtgtttatttgtatgtatatttattgttatatgttgtgtttattaaattggtttataagtaaaagagtgtttataaattaagtaaataagtttaagtaatttttaaatttatttaagtatgattttgttaaataggttgttttttaaattattagtaaaatgaaaatagaaatgtttttaaaatatagatatggtttaaattatgtaagttagaaattaggttgattaaatgttttaaggttataaattgttttggtttttgaaaattgtttaatttttttgttttgtagtttggtagggtttgttttagttatgttggaaat

SEQ ID NO: 1989 - DNA, 2388 bp, Artificial Sequence
  chemically treated genomic DNA (Homo sapiens)
ataaatataataagttataaatatagtattgagaggtttttgtatggtttcgttttttttaggtagtattttatataattatagtttatgattataattggaaagttgttattggtattatattagaaattagtttgtagattttgtttagattttattaggttttttgtgtatttatttgtttttttgaaaatattttaatgtttttttatatgatttattttttcgatatattgtgagataaggttttttttttttcgaataagtttagagaataatgaatgtgagaggtgggaaggatgatttggtgtatttttgttttatttatggtgagtttggattttagagtagaaggattttcgttttttttttggggagttttggtgttaatttagtgtaggttgttaagttattcgggtttgattgtttttttttttgttaaaatttgttttaagtatgtaatatagttatgtttattaatgatgaggagatagttaatgaaaattaatttttttaaagatgaatagatatttagatttttttaagtataatttatttaagaaaatattattttattgagttttaaatgagttaggttttatttagaaagtgttttttagtgttaggtaaagtgttttatatttgtaattttagtatttttggagacggagataggaggattttatgagtttaggagtttaagattagtttgggtaatatggtaaaattttgtttttatagaaaatataaaaaaaaaaaaaatagttgggcgtggtggcgtgtatttgtggttttagttattttggagtttgaggtgggagaatcgtttgaatttaggaggttaaggttatagtgagttgtgtttgtattatcgtattttagtttgggtgatagagttagtttttgtttttaaaaaaaaaaaagaaagaaaggaaaagaaaatgttttcgagttgattatattttaattattgtgttaatttgagagatagtttgttatttttttataggatatgagggttgataattattttattgtatggttttggggattgatgaataaaggttaatatgtggaaaagggtaattaaagaaagaagagttatttttaggttaattagtataagttttttcgttggtatgttttaatatattaaaatagtagtaaaaataatttgtatattggtatcgaaggtatagataaatttgtcgaggatttttattacggtagagggatgttttatatgagtttttagtagattaattaagtttttgttagttttatttggaaatgatgttgtttttttggggttatgtagagaagtttatgttgatgaaatgagttgttttagaatggtagttttcgggtagtagagtttgggtttaaggaaggttgaaagaaggggtggcgtggagttgttaggtgtaaatgttaggttagtaatgtagtttagtttgtatggacgtgtttcgtttaggaagttgtgatttggttgtattttttattttaggtgagatggaaggttgaattttattttattttttggtgaggttgatgttttttggtgtttataattttttttgtaaatatttgaaaggaatttattattttaatgttggaagagacgtttatttttttttaagaggatttgagtggattttgattgtaggttttatgttgggtagagttaaggagaatttaatttgtttttaattttatttgaatgttttttttttttttttttttttttttttttttgagatagagttttgtttttttatttaggttggagtgtaatggtacgatttcggtttattgtaatttttgtttgttgggtttaagtaatttttttattttagtttttttagtatttgggacgataggagtatgttattatgttttgttaatttttggtatttttagtagagatggggttttattatgttggttaggttggttttaaatttttgatttcgtgatttatttgttttggttttttaaagtattgggattataggtatgagttatcgcgtttagtttatttgaacgtttttatgtttgttataagtgtagtagtagaatttttatatattttgcgtgcgaaagttttttgtagtttttttagtatagagaggttggggaaggttagagattgatttgtattttttagatatatagttgattattgaataatatacgtttgaattgttatatatagattttttttaataaatgtgttagaaaatgttttggagttttgtaataatttgaaaaaatttaaagataaattatttagttagaaatattaataaaaatagaaaaagttaagtatgttatgaatgtataaaatatatgtagatatttagtttattttattttttattatta

SEQ ID NO: 1990 - DNA, 2388 bp, Artificial Sequence
  chemically treated genomic DNA (Homo sapiens)
tggtagtaaagaataaaatagattaggtatttatatatattttatgtatttatgatatatttaattttttttatttttgttgatatttttagttggatggtttgtttttgagtttttttaaattgttgtaaaattttaaaatattttttaatatatttattgaaaaaaatttgtgtgtaatagtttagacgtgtgttgtttaatgattaattatatgtttaaagagtataagttagtttttaattttttttagtttttttatgttaaaggaattataggaaattttcgtacgtaagatgtgtggagattttgttgttgtatttgtagtaggtataggaacgtttaaataggttgggcgcggtggtttatgtttgtaattttagtattttgggaggttaaggtaggtggattacgaggttaggagtttgagattagtttggttagtatggtgaaattttatttttattaaaaatattaaaaattagtagggtatggtggtatgtttttgtcgttttagatattggggaggttgaggtgggagaattgtttgaatttagtaggtagaggttgtagtgagtcgagatcgtgttattgtattttagtttgggtgagagagtaagattttgttttaaaaaaaaaaaaaaaaaaaaaaaaaaaaagaatatttaaataagattggagataaattgaattttttttagttttgtttagtataaggtttgtaattaagatttatttaggtttttttaagaaggaatagacgttttttttagtattaaaatggtaaattttttttaagtatttataaagaaagttataaatattaggaaatattaattttattaggaggtgaggtagagtttaattttttattttatttgaagtggaaaatgtagttaagttataattttttaggcgaagtacgtttatgtaagttggattgtattgttggtttgatatttgtatttggtagttttacgttatttttttttttaattttttttgagtttaggttttgttgttcgggaattgttattttaggatagtttattttattaatatgaatttttttgtatagttttaagaggatagtattatttttaaatggaattagtaagaatttaattaatttattaaggatttatataaagtatttttttgtcgtggtaagggttttcggtaagtttatttgtgttttcgatgttaatgtgtagattgtttttattgttgttttagtgtattagggtatattagcgaggagatttgtattaattaatttggaggtggtttttttttttttagttgtttttttttatatgttagtttttgtttattagtttttaggattatgtaatgaggtgattattagtttttatgttttgtaaagagatagtagattattttttaagttagtatagtggttaaaatgtaattaattcgggggtatttttttttttttttttttttttttttttttggaaatagaggttggttttgttatttaggttggagtgcggtggtgtaaatatagtttattgtagttttaattttttggatttaagcgatttttttattttagattttagagtagttgggattataggtgtacgttattacgtttagttattttttttttttttgtattttttgtagagatagggttttgttatgttatttaggttggttttgaatttttgggtttatgagatttttttattttcgtttttagaagtgttgggattgtaaatatgaggtattttatttggtattaggggatattttttaagtgagatttaatttatttggggtttagtgaggtgatatttttttaaatgagttgtgtttgaaaaaatttagatatttatttatttttgaaaaaattaatttttattggttgtttttttattattaataagtatggttgtgttatatgtttaagataaattttagtagagaagaagatagttagattcggataatttagtagtttgtattgagttggtattaggattttttagaggagagacgagggtttttttgttttgaggtttagatttattatggataaaatagagatgtattaaattattttttttattttttatatttattgttttttaagtttattcggagaaaaaaaaattttattttatagtatgtcggggagataagttatgtagaaaaatattaaaatatttttaggaaagtaaatgagtgtataaaaaatttggtgaaatttgagtaaggtttgtagattagtttttgatgtggtgttaatggtaattttttagttgtaattatgaattatagttatgtaagatattgtttgagggaggcggggttatataaggattttttagtattatatttgtaatttgttgtgtttat

SEQ ID NO: 1991 - DNA, 2433 bp, Artificial Sequence
  chemically treated genomic DNA (Homo sapiens)
tgaagacgtaataaaattttttatttgaaaaatttttttgtgatttaagtaagtttatatttgttttattgttgataatttataatcgttattttaggtttttaaggagtttattgatgtatttaaaataaatttaataaaattagtgttttttaattaaatgatattaaatatatatatttgtataatttgttttgtagttttaattcgattttttgttaggattaataaatatatatatatatgtttggtataaatagagtaaattttttgtggaataaaattaatcgtgtatattattttattttttgtataaaatatacggtaggtcgggcgcggtggtttacgtttgtatttttagtattttgagaggtttacgcgggcggattacgaggttaagagatcgagattattttggttaatatggtgaaattttcgtttttattaaataaataaataaatataaatagtagttgggcgtggtggtgtacgtttgtagttttagttattcgggaggttgaggtaggagaatcgtttgaattcgggaggcggaggttgtagtgagtttagatcgcgttattgtattttagtttggcgacgtagtaagatttcgtttttgtttttttttttgtttttatatgtgtgtgtgtgtatatatatatatatatatatgataaaggaatttttttttttttttcgtttttcgtttaatttaattttcgtaatcgttggttgtttttttatttttgatttttttgtaaatttttagtagagtagtatttgggggtagattcgttattgagattgatttttttattgtagaagagaacgcgcggtttttggaggtcggatattatagcgggagtaggaatttggtaggcgatgagtagaggtacgagtaagtcgtttagttaaatttggtagttttgaggttaaaaatgattttgtaatatttttgcggaggaagttttttttagacgtttgagaaataaatttagttgggaggaggtgttttgtattttataaaatgaaggttttgcgatcggtttagagttgtgtggtttttagtgggtttttaagtttcggggtattttaggtcggtattatattattaaaaagaagcgtaaattttatttttgaagtttagtcgaaggtaggcgtcggtagggagagttaagaggtcgtttagagagtttgggtcgggagtgggagtgggataaggcgggagttaatttagttggagtagacgttagaagaagtttcgtttagttgaggtgtttcgttttaattttaggttttcggggattttaagaagggagttattcggtgttttttcgagcggtttttatagttttggagattttgttgttgtttaggggtgtagtcgtcggagttttcgggtttgttggggtttagtaggggtagtgggagtttttattttgggagaaattgttagggataaatattgtttgttgacgtaaagtttgtttcgtaaaggagttttttttgtatatgttttgtagtttaaattgatttagaaagggatatataggtttgtaaggcgttttcgggattatatagttttacgtttttttttttttttttgttatttttttatgtttttcgtttttattttgggtagtagattttagtaggcggggaaattcggggattggtgttcgtattgtcgaaaggttggaaagtagagtttcgtttatatttacgatgtttttagaacgtggtttttagaaataatttaagtgtgagtagggcgtcgaggataggataaggcgtttgttttttagttttgttattggttaaggagaattatagtagtagagtcgtattattgttgtcgtcgtttttaatttgcgttaagttcggtttaggttattggattgggtaggattagttaatttaggtttcgaggggtagtgtgttatagattgtagtttattttaatttcggtttttggagaaggggcgtcgaattttttttgggtatgggagggaaagatatttcgagttggttgggcggagtggtagttttgagagtgacgagtgatagtaaagtttcgttttagtaaggttttttattaatagcgcggtatgttttttcgaggagagcgttaggttttcgtattttgtaagttaagagagtaaagaaagcggggatagggcgcgtaatcgtaatgttcggtcgcgcgtgtgtacgtgtttgtgtttgtatgtgtgcgtgagtatgtgtatttgtttaagtgtaaatgtgtttgttggtagttggggtttaagtatttgagaatgtgtgttttttgttgttttaggagattaaaatgtttttttttagtattgagttatattgaggaaataaaattgaaataaattgttaggttttttttaagattagtcggattttatgttaaataaaagttag

SEQ ID NO: 1992 - DNA, 2433 bp, Artificial Sequence
  chemically treated genomic DNA (Homo sapiens)
ttgatttttatttaatatagaattcggttggttttgagagaggtttgatagtttattttagttttgtttttttaatgtagtttaatattgggaaaagatattttaattttttaaagtaatagaagatatatatttttaggtatttagattttaattgttaatagatatatttatatttgagtaggtgtatatgtttacgtatatatgtaaatatagatacgtgtatacgcgcgatcggatattgcgattacgcgttttgttttcgttttttttgtttttttgatttgtaaagtgcgagggtttggcgtttttttcgaaagggtatgtcgcgttgttggtaaaaggttttgttaggacgaggttttgttgttattcgttatttttaaggttgttatttcgtttagttaattcggaatgttttttttttttatgtttaagagagattcgacgttttttttttaggagtcgaggttggagtgggttgtagtttgtgatatattgtttttcgggatttgggttagttggttttgtttaatttagtagtttgagtcgaatttaacgtaagttggaggcggcggtagtagtggtgcggttttattgttatgattttttttagttagtagtaggattagggggtaaacgttttgttttgttttcggcgttttatttatatttgaattatttttaagggttacgttttagaaatatcgtggatgtagacgaggttttgttttttagtttttcggtaatgcggatattagttttcgggttttttcgtttgttggggtttgttgtttagggtgaaggcgaaagatataaagaaatggtagaggaaaagaagagggcgtgaggttgtatgatttcgagagcgttttgtaggtttgtgtatttttttttaaattagtttgagttgtaggatatatatagggagaatttttttgcggaataggttttgcgttagtaaatagtgtttgtttttggtagttttttttagggtaggggtttttattatttttgttgagttttagtaggttcgagggtttcgacgattatatttttgggtagtagtagagtttttaaagttgtaaggatcgttcggagaagtatcgggtagttttttttttggggttttcgagagtttgggattggggcggggtattttagttgaacggaattttttttggcgtttattttagttaagttagttttcgttttgttttatttttattttcggtttaaattttttaggcggttttttagttttttttgtcggcgtttgttttcggttaagttttagaaatgggatttgcgtttttttttaatgatgtaatatcggtttagggtatttcggagtttggagatttattagggattatatagttttaaatcggtcgtaaagtttttattttgtaaaatgtaaaatatttttttttaattgagtttgttttttaggcgtttaaaagaggtttttttcgtaaggatattataaaattatttttgattttaaggttgttaggtttggttgggcggtttgttcgtgtttttgtttatcgtttgttaggtttttattttcgttgtggtgttcggtttttaggaatcgcgcgtttttttttataataaaaggattagttttagtggcggatttatttttaaatgttattttattgaaagtttatagagaagttagagataaaagggtagttaacggttgcggagattgaattaaacgagggacgagggagaggaaaaaatttttttgttatatatatatatatatatatatatatatatatatatggagatagagagagagatagagacggagttttgttgcgtcgttaggttggagtatagtagcgcgatttgggtttattgtaattttcgtttttcgagtttaagcgatttttttgttttagtttttcgagtagttgggattataggcgtgtattattacgtttagttattatttgtatttatttatttatttagtagagacgggggttttattatgttggttaggatggtttcgattttttgatttcgtgattcgttcgcgtaggttttttaaagtgttgggaatataggcgtgagttatcgcgttcggtttgtcgtgtattttatataaaagatggagtaatatgtacgattaattttattttataagagatttgttttatttatattaaatatatatatatatatttgttaattttaataaaaagtcgagttgaaattataaaataaattgtataaatatatatgtttggtgttatttaattaaaaagtattgattttattaaatttgttttaaatatattaatggattttttaaaagtttgaagtaacgattgtaaattgttaatagtaggataaatataaatttatttaaattatagagaagttttttaaatggggaattttattgcgttttta

SEQ ID NO: 1993 - DNA, 2281 bp, Artificial Sequence
  chemically treated genomic DNA (Homo sapiens)
gattattatgtagtaattagaataaataagttgtatatttattgatttggaaagttgttcgtgatattaatataagtgaaaaaataaggttgtagagtaatgtatgtagaataatgttggttttgttttaaaaataatataggtgaatattgtgtatgtgtttatagtttgaatatatttgtatgaatatggaaatagatgtggaagattatttatttaatagtattaattattttaaatatataaaatggggtagaggtgggagatgattattttatatttagtgtttttttacgatgagtagtattggtttagtaatttttttaaagtaggaaaaataaagaaaaaagttgtagggtaggttagggttgaaagtatatttttgtaattattttattgttatattaattagtatttatttatggagtatttattgtttgtaaagatgagaatataagtattggatttaatagtttattagagggttaataatttgattggggagataaaatttttttataggaaaataaaagtatttttatgatgagaatagagttggttaatttatatttattttttgaaatgaatgtagtggaagtggtgtaacgagtataatttagatttggtaatttttttattttgttatatatttgtataaatttaagataaggtttttaatatttgtattattattttttaggttttttatttttgaagttgagaaaggaaatatttggatatgatgtaattagtaatatattaatgggtatgaaaggatttttttttttttttattttagtttttgtgttttatttttattttttaatttttttttagagtttggaatttattggggttatttttttaaaatattttttgaagttaagtttttagttttatagttattagggagatttttgagaattaagttagttttaatagttagtttagaattttggttaaatatgagtttttttatttaatggttaaaatgtaaaattaggtaatttttgtttatggtgttaagttgtaaattatttgtttttagtttttagcgaatgttattgggaagtattaggataaaagtcgttatttaaaaattttaattttagtttttttttggtttgggtttaaagttagaggcgattttttataggtggtatgttagtgttatttgattgttgatatattttgtgtggtggttgagaaaattggagaagaaagagttagggtagttaaaggattgttcgttaattttaagatgtgtaggatgaagaggagaataatgtaagggtaggtattttgaataatttgtgttattgatagtattagtaaaaaataattagttggtttttagttagggagttttttatttagttgttgtgtgtgtattataggtttaaagagcgtttacggtttataatattgattagtttgagttttagtttattttgttatgggttgtagattagatcgtgttttatgggttttttattttagaagaaaggttgaggagaaagaaagttatatttagtttttttgtgttatttgatatatttaatagtaaggaagggagggagggagggagggaagggaagggaaggaaggattttagtattttgggagtttaaagtataagtattgtttgaggttaggagttttagattagttgagttatataatgagattttgattttataaaaaaaaaattttttttttaattagttaggtatggtgatatatgtttttaatattagttatttaggaggttgaagtaggaggatagtttgagtttaggagtttaaagttatagtgattaagttattgtattttagtttgggagatagagtaagattttgtttttaaaaattataatattaataataaaatggaaagagtaaattttgatgttttattgttttgtgggtttgtgttgtttattttttttttatttttagttttgtattttatagtgttggtgatatatggaaaaaaaattaagatatagttttttaggaattgttaaaatttttatttaaatgtgagtgagtaatgaaaaataagatatatgaaatatgagggttgagaaagtgtgttttagggatgggagtgagagtttttcgtattgtgtgggtagattaaagtaagttgttaattaagatttttttaagattatttagtagggggaaggagagaagagggggcgattatttagtgagttgagtataagaggaatatttcgtagttttagagaatgtttagaggtagaagtgcgagtggg

SEQ ID NO: 1994 - DNA, 2281 bp, Artificial Sequence
  chemically treated genomic DNA (Homo sapiens)
tttattcgtatttttatttttaaatattttttaaagttgcgaggtattttttttgtgtttagtttattaagtgatcgtttttttttttttttttttttttgttaaataattttaaggagattttgattggtagtttgttttagtttatttatatagtacgaggagtttttatttttatttttaaaatatatttttttagtttttatattttatgtattttattttttattgtttatttatatttagataggagttttggtaatttttaaaggattgtgttttagttttttttttatatattattaatattgtgaaatataaagttgaggatgaagggaaagtagataatataggtttataaaatagtaaagtattaaaatttgttttttttattttgttattagtattatgatttttagagataaagttttattttgttttttaggttggagtgtagtggtttgattattgtaattttgaatttttgaatttaaattatttttttattttagttttttaagtagttggtattagaggtatgtattattatatttggttaattaaaaaaaaaattttttttttgtagaattagggttttattatatggtttagttggtttgaaatttttggttttaagtaatatttgtgttttggatttttaaagtattgggattttttttttttttttttttttttttttttttttttttttttttgttgttaaatatattaggtgatatagaaggattggatgtaattttttttttttttaattttttttttaaaataggaggtttatgaaatacggtttggtttgtaatttatggtaggatggattgagatttagattgattagtgttataggtcgtgggcgttttttagatttgtgatgtatatatagtagttggatggggaattttttggttgagagttagttggttattttttgttgatgttgttaataatataaattgtttagagtgtttatttttgtattgtttttttttttattttgtatattttaaaattaacgagtagttttttgattattttggtttttttttttttagtttttttaattattatatagaatatgttagtagttagatggtattggtatgttatttatggagaatcgtttttggttttaagtttagattaagagaaaattagaattggaatttttggatgacgatttttgttttgatgttttttaatagtattcgttaaagattagagatagatagtttgtaatttagtattatgagtaaaagttgtttggttttgtattttgattattgagtaaaaggatttatgtttagttaagattttgaattggttgttggggttgatttggtttttagaggtttttttaatgattgtggagttaaaggtttaattttaaagaatgttttggagaaatagttttaatgaattttaagttttgggaaggggttgggggataggggtgggatataggggttggagtggggaagggagggaatttttttatgtttattaatgtattgttaattgtattatatttagatgtttttttttttaattttagaggtagagggtttgagagatggtggtgtagatgttaaaagttttgttttaagtttatataagtatgtagtagagtgaaaagattgttaggtttgagttgtattcgttatattatttttattatatttattttaaaaaatgaatataaattagttagttttgtttttattatgaaaatatttttatttttttgtgaagaggttttatttttttagttaaattattggttttttggtagattgttaagtttaatatttgtgtttttatttttgtaaataataagtgttttatgaataaatgttgattaatataataataaggtggttataaggatatatttttagttttggtttattttataatttttttttttattttttttattttaaaaaaattgttgagttaatattgtttatcgtaaaaaggtattgaatataaaataattattttttatttttgttttattttatatatttaaaataattaatgttgttaggtagatagttttttatatttatttttatgtttatataagtatatttaagttatggatatatatatagtatttatttgtattatttttaaagtaaaattagtattattttatatatattattttgtaattttgtttttttatttatgttgatattacggataattttttaagttagtaaatatgtagtttatttattttaattgttgtataatagtt

SEQ ID NO: 1995 - DNA, 2313 bp, Artificial Sequence
  chemically treated genomic DNA (Homo sapiens)
ttattgggaggagaagggaaggtgttttgttttttagggttggggattataggtaaggttatgggtttgagggtatttttttaaattttagtagataaattatgtttaaattttatattttattgagaaagtaggtgtttgtaattagttatagaagggaggtgggtggtcgtgggtagagaagaaaaaattttttaataaaaaaataaaaattaggtaaaatagaatttgatagttattatgtaaatagaagaaatattacgaaagtgatattattagtatggttgtgggtttgttttattttttggtttttaaagtaggagataatgagagttatttattgatttatttttagtatttgataaaagaaaaaaagttaattaattaggtttattttattgatttattaatgtttttgttattaagggataattttaaaaaggatttttttattaaaagaagagaaattaatttatagatttttttgggttttaatttataattcgtataggataaaattaagtttaaaatagagagtgtatttataaggttgagaagatattttgtggtgatttttttgtataatatgaaataaggttggttggtttttttttgtaaagagtaagatagtaaatattttaggttttttgggttaagaaatataattaaggatattatgtagttatttgtataataagagtaaaattatttttttttataatttttaaaatagattaattttaaaattttatgattagtatagtttgtattttatattgtttttatgtgttatgaaataatatttttattaaatttttttgtaagtatttgaaaatggaaaaagtatttttagtttgtgggttatataaaaataggttgtggtttggatttggttttggggttattatttgttgatttttaatatagaatatttttgagttatgttagggtttttaattagttaggttatttaagtttagattgaattgggatatggttttagaattttttttaatattgtatgtttgttataatgtgggtagggagaggttgttggttttgtagtagttatttgatggttgtttaaaggatcgtgaatttagttattattagtattttttttatttttttagatttgggtgtagttggtttagttttttatttttagtttcgggaaagttttttttttagattttcgtttttttttaataagtttgtatgttgtgttaaggagtaatcgtttttgttgttacgaatttatttgtttttgtgaatttacgtgttttttatttttgttttatttagaatagagaatataattattttaatattttatgtattttttataagtttatagagttttaatggaagtttggagagataatggtagtttatatagtagaagtaatagtatttgtttagtgttattgtttaagttattattatagttaatatttttaggaaatttattttttttgttaggaggtttttatatgttatttaattttgtaataattagtagaaataggttttttttttttaatagttattattttgttttataaaaaagaaatgaagtttaagagattgagtagtttgttaattatagagtaagttaatgatagagatgaattttgaatagttaagttaggtagtgatttatgtttgtaattttagtattttgggaggttaaggtaggcggattatttgaagttaggagtttaagattagtttggttaacgtagtgaaatttcgtatgttttaaaaatataaaaattagtcgggtatggtggtaaacgtttatagttatagttattagttaggttgaggtgggaggatcgtttaaatttgggaggtgtaggttgtagtgagttgagattgttttattttattttagtttgggcggtagagtgagattttattttaaataaataaataaaaattataattaatgatttagaatgtaattaatgatttagagtttatgtatttaaatataatatagttatttttttatagtattttaagtgaatattagattttgttgttgttgttgttgttgttgttgaaagtttttttattatttttttgggaatttttattggtttgattattttataaaatgttttggtttttatttacgtttttggtttttttttttgtttatgttttttttatttttttttttagattgtttttatgaatttttaatattttgatttaattttttagagtaatttagtttttgttagtttatgtttttaaattgagttttagtagaagttttttgagggatataatgttattttatag

SEQ ID NO: 1996 - DNA, 2313 bp, Artificial Sequence
  chemically treated genomic DNA (Homo sapiens)
ttgtaaaatgatattatgttttttagaaggtttttgttagagtttagtttgggaatatgagttagtaagagttaaattattttaaagaattggattaaggtattaagagtttatgaaaataatttgggagaagaggtgagaaagatatgggtaaggagaggagttaggagcgtgggtagaagttaggatattttatgaggtggttaggttagtgagaatttttagggaggtgatagaagaatttttaataataataataataataataataaagtttgatgtttatttaaagtgttgtagagggataattgtgttgtgtttaggtgtatgggttttgggttattgattgtattttgggttattgattgtggtttttgtttgtttgtttgagatggaattttattttatcgtttaggttagagtgagatgaagtaattttagtttattgtaatttatattttttaggtttgagcgatttttttattttagtttagttagtagttatgattataggcgtttgttattatgttcgattaatttttgtatttttaagatatacggagttttattacgttaattaggttggttttgaatttttgattttaaatgattcgtttgttttggttttttaaagtgttgggattataggtataagttattgtttgatttgattgtttaaaatttatttttattattaatttgttttgtgattagtaagttgtttaattttttaagttttattttttttttgtaaaataggataataattgttaaaaagaaaaagtttatttttattgattattgtaggattaaataatatgtgaaaattttttggtaaaagaaataaattttttggaagtgttagttatgatgatgatttaaataatgatattgagtagatgttgttatttttgttgtgtaaattgttattgtttttttaaatttttattaaaattttgtaggtttataaaaaatatataaaatattaaaataattgtattttttgttttggatgaggtaaggatgaagggtacgtgaatttataagggtaagtgaattcgtagtagtagaagcgattgttttttggtataatatgtaagtttgttgaggaggagcggaaatttgggagagagattttttcgaggttggggatggaggattgagttaattgtatttagatttgaaagagtagggaaaatgttggtgataattgagtttacggttttttaagtagttattaggtggttattgtagagttaatagtttttttttatttatattatggtaggtatgtagtgttgagaaggattttgaaattatgttttagtttaatttgagtttggatgatttaattgattaaggattttgatatgatttagaagtgttttatgttgggggttagtaaatgatggttttagggttaaatttaggttataatttgtttttatgtgatttataagttaagaatgttttttttatttttaaatgtttgtaggaaaatttaatgagaatattattttatgatatatgaaaataatataaaatgtaaattgtattggttataaaattttgaaattgatttattttaaaagttgtggggaaaaatggttttgtttttgttatataagtaattatataatatttttgattgtattttttggtttagaaagtttgaaatatttattattttgttttttatagagaaaggttaattaattttgttttatgttatgtaaaggagttattataagatgtttttttaattttatgggtgtattttttattttaaatttgattttattttatacgaattgtgggttggagtttaaagaggtttatgaattgatttttttttttttgatagaaaaattttttttaaaattattttttagtgataaggatattagtaagttaataaggtaagtttgattgattgatttttttttttttattaaatattaaaaatgagttagtaagtagtttttattgttttttgttttagagattaaaggataagataggtttatagttatgttaatgatgttattttcgtagtgttttttttgtttgtatggtgattgttaagttttattttgtttaatttttatttttttattaaaaaatttttttttttttgtttacgattatttattttttttttgtgattaattgtagatatttgtttttttagtaagatgtgggatttgggtataatttatttgttagagtttggagaagtgtttttaagtttatggttttgtttgtggtttttagttttgggaagtaggatatttttttttttttttttagtgg

SEQ ID NO: 1997 - DNA, 2339 bp, Artificial Sequence
  chemically treated genomic DNA (Homo sapiens)
tcgttatttttttttttatttattttaagagttattattgggtagtggtaatttatttatggggttgttgtttagattaaatgagttaatatagataaagaataatgattggtatatgggaagtgttaagtaaagattagttattatggtttatttattttttttgaaaaaattttatttaaagatatatattggttaggcgtggtggtttatatttgtaattttagtattttgggaggtcgaggtagaaggattttttgaggttaggagttttagataagtttggttaattaatatggtgaaaatttatttttattaaaaatgtaaaaattagttgggtatgttggtgtatgtttgtagttttagttatttaagaggttgaggtaggagaattatttgaatttaggaagtggaggttatagtgagttgagattgcgttattgtattttagtttgggtgatagaatgagattgttttaaaaataaataaataagtaagatagatattattatttagtttatagagatgtaattaaattaaagaattttagaagggtaattatatatatatataaatataaatattttttaaatgaaaaattaaataataaaattagaaaaatatagttaagtatattttaatgtagttatataatttaattaaaatataagttaattattgaaatagaagatttataatatatattagagaattatttaagtttaaaattttaaattatttgataatttggaagtatataaaatggtgggataagagaaattaaaaagtttttaagttttttattttatatttttgataattagaaataaataggtttaaatataaattttagaaaaataagatgtattttatttataaagaaagagatgtatttttaataattatagtatttgttttttataaatgagataaattaatatatagtttttttttaatatagatgttttttagatgtttaatagtggtttaattttttttatttttatagtgtttttaaagtttgttggtatataaatatgaatgaatgaataatgtagaatttatttaagaaattttaaggagagagaggaggagatttatattatatagtaaataatttaataaatttgttaaacgttatgtatgtgaataggcgtttttttttttttgattttttttttttatatagaatttagtgtttttttttcgtttttcgttatagtatttatcgtttttttttttttacgtcggggagtagtcgaggtttgtgttttttagcggatttgttaaattattttttttagtatgttgtttttttttttttatagattatttgttaagaaaatatattttttatgtcgttaatttatatatatatgtgtattatatatatgtttatataatgagagattgttaggaaaattattattatatatatatgtattatatatattatatatatatatatatgtattatatatatatttgtatatatatgtatatggaaaattgttaggaaaaatagtatagtggtagtgttagtgttggttgtttttcggtggtgagattatatatttttttttataattttttgtatttttttaattttttgtgatttatatatgtttttaattattaaaagatgttgaaatttaaattatgttttacgtatattttatatttttatttaaagtttttttatggttttttatggtttgtaggatgatgtttgatgtttagtttaagagttttttttttttattttttatttttttgttatttgtagtttatgttttaataatattagagtgttttttgtgtatatttagttgatttacgtttttttgtttttgtttatatgtttatttttatttggaagataatttttttttttttggcgatttttatattatttttttttttttagagtaggtatagttgtttaggaaatatttttggttgagttttttatgggttttaattgtattttattttgaagatgaaatgatttgtgtttttgtttatttttttttttggacggtaagtttttaaagggtagaagttatattttattatttttatattatagtttttagaaggttttgttaatatgatataagttgtaaaaatcgaattaaatttaagtgatattagaagtaaaagatttttggtttatagcgaatatataaagtggataaagaagttttttttttattttatgtatgtttataatattattttgattaaatatttaaattgggattgttaagtattaagatttaaaaatatttgttttttgagagataaaatagatattattagttgaaaataatgttttt

SEQ ID NO: 1998 - DNA, 2339 bp, Artificial Sequence
  chemically treated genomic DNA (Homo sapiens)
ggggatattatttttaattagtagtatttgttttgttttttaaaagatagatatttttaggttttggtgtttggtagttttaatttgaatatttagttaaagtagtgttgtgaatatgtatagaatagagagaaagtttttttatttattttatatattcgttgtggattagaggttttttatttttagtgttatttgagtttagttcgatttttgtagtttgtattatgttggtagaattttttagaagttatgatatgaagatagtaaaatgtggtttttgttttttgggaatttatcgtttagaaaggagggtagatagaagtatagattattttatttttagggtaaaatgtagttagggtttatggaaggtttaattagaaatgttttttgggtagttgtgtttgttttgaggagagaagggtggtgtgaaggtcgttaggggaagggaaattattttttaggtggaggtagatatgtgagtaaagataaagagacgtgaattagttgggtgtgtataggaaatattttggtattattagggtatgagttataagtgatagaggggtgggaagtgaggagaggaagtttttaagttgaatattaagtattattttgtaggttatggagaattatgagaaagttttaaatggggatgtaaaatgtacgtagaatatggtttaaattttaatattttttgatgattaaaaatatatatggattatagaaaattaggaaaatatagaaaattatagaaaaaaatgtataattttattatcgaaagataattagtattaatattattattgtgttgttttttttaataattttttatatgtatgtgtgtgtaggtatatatataatgtatatgtatgtatatgtaatatatataatgtatgtatatgtggtagtgatttttttaataattttttattgtataaatatatatataatgtatatgtatatgtaaattaacgatatgaaaaatgtatttttttaatagatgatttgtggaagggagagagtagtatgttggaggggatgatttggtaagttcgttgaagaatataagtttcgattgtttttcggcgtggaagaaggaaggcgataaatattgtaacggaggacgaggaaggagtattgagttttatgtggaaagaaagggttaaaaagaggaaaacgtttatttatatgtatggcgtttaatagatttattaggttgtttgttgtgtgatgtaaatttttttttttttttttttgaaattttttgagtgaattttatattgtttatttatttatgtttatgtgttagtaagttttgggagtattgtaaaaataaaaaaggttagattattgttagatatttgggaaatatttatgttagagaaggattatatattaatttattttatttatgggaggtaaatattatgattattgaaggtatatttttttttttatggatggagtatattttatttttttaaaatttgtatttgaatttatttatttttaattgttaaaaatgtgaagtgagaaatttaaaaattttttagttttttttgttttattattttatgtatttttaggttgttaaataatttggaattttagatttagataattttttaatgtatattatagattttttattttaataattagtttatattttaattaaattgtataattgtattaaaatatatttaattatgtttttttagttttattatttggttttttatttaggaaatatttatgtttgtgtgtatatatagttgtttttttagaattttttagtttgattgtatttttatagattagataatggtatttgttttatttatttatttatttttaagatagttttattttgttatttaggttggagtgtagtggcgtaattttagtttattatgatttttattttttgggtttaagtgatttttttgttttagttttttgagtagttgggattataggtatgtattagtatgtttagttaatttttgtatttttagtagagatgggtttttattatgttggttggttaggtttgtttggaatttttgattttaggggatttttttgtttcggttttttaaagtgttggaattataggtgtgagttattacgtttggttagtatatgtttttgggtaaaatttttttagaaagagtgaataaattatgataattgatttttatttagtattttttatgtgttagttattattttttatttgtattaatttatttaatttagataataattttatgagtaagttattattatttagtagtggtttttgggatgggtggaaggaaggatgacga

SEQ ID NO: 1999 - DNA, 2463 bp, Artificial Sequence
  chemically treated genomic DNA (Homo sapiens)
gatttttttgcgagggggcgtatttataagagggattggatggagcggttggttcgtagagttttagttagttgtttgatgcggttggggttggatacgacgtttaggttaaggttgagttgcgttagggacgtggtttcggttagggttcggtagatgcggttaaagtcgcggtcgtagaggcggtagtcgcgtagtgagagtaggcgtacggcgttgtcgcgaaggtcgcggtagatgtttcgtatttcggcgtcggatagcggttttttcgaaatttggatggagttgggtagtatcgtgtttacggttgggttttcgggtacggggtcggaacggaggttggtggggtcgcgggcggggtcggggatagggtcggggtcggggtttcggtaggggtcgcgggcggagtggggtcgggggtggaggcggcggttgtggcggaggttgcggttgcggcggaggttgcggcgggggcggagaagagttatcgggattgagtcggagtcggttagaggtgcggaggcgtttagggcgcgggtcgggttgaagtggggcggcgttggggcgggggcggttcgtacggttcgtgtttgggcgttggggcgggtgcgcgtttcgggggttgggtaggcgttgttcggcgtttgtttttgtttttcgcggtcgcggcggcggcggcggtagcggtagcgagcggtttaagggtttcggtttatcggtttcggttaggaggtcgtattcgttttttttttttttgtcgttcggtttttttcgattatttcgcgggtttggtcgtacggttggtagagagagtttgaggcgggcggttggcggtagtttcggttttagttttagagagcgagcgggcggcgagtttttatggtaacggtcgcgttatcggcgttcgtttcgttttttgttcggttaaggttacgtcggttcgcgaggttcgcgtatattgggtggttcggggtaaggagttgggagcgataggtcgttttttttttgggagtggggttagttaattggtaggcggtaggcggtagggttgagtgggtagggttgacggggagcggaatggaggtacgtttcgtggagatggcgttgggtacggttattgttgtttttgtttatttttttattttttttcgtttttaaggtttatattttcgtcggaatttagggtattgtttttttttatttggaaggttttagggtttttttattcgcgtcgcgtttcgttttcgttttcgtgattcgaggcgtagcgtgcgtggtgatttcggtttatggggattttttcgtttgtttttcgttaagatggcggttttattagggaggttttaggggttacggttgggtagagttagtttgagttgttggggagaagggtattttatagggtttttagggtaggggagttttagatagatgtaaggttttggtgttatatttttttaggtacgtagggtattgttgatatttgagggtgtgttcgtgtcgcgagattggggtagttaatataaagaaggtgttagggttagggttttggagtattggtgaggacgtgaaggcggttgagttatattgtacggtgtaggcggtgttgttttaattttgttttttggttagggtggtgggggatttatttgtgtaacgtaggataaatgaagggtatttttgtttgtttttttgttaggagggatagatgttgttgatttagatttattagtgttaagatgattattttatataaaatataatatttaatatagtgaagggaggttaaaggttttatttttatttttagttatttgaattaatttattaagtggagtatattaaagaggtggtgggggtggatggtgttatgttaggagtggtggttggttttaagaggaaagatagaaaaattaaaaggagttggttttagtattattaaggtaaagttaaatttggttttaattaagagttttataggaaaattattaatataatgtttaggtgtagaagatttttgttttgatacggggtttaagtcgggatgttttgtttaattgttattgtttttttggttttttaagagagtagttgagtttagatttaagttggttgtagtgttttattaggtttatggtttttgtgtttgaggtttttttgtcgttttatgggttaggtgtgatatttaattattgttttttatgtagtttggtttgttttatttttattttgtttgggtgaggatatgaagaagggaatatatgatattattattgttgattgagtaggaaagtatataggaagcgggatgatagggaggattattggattagtcgttgtagttttagattttaattaatattttaattattaagtttatatttagtaagataatgtgggagagataaagaggaaggaaggggtaggtggggaggggtttttaaaggagttgatttattt

SEQ ID NO: 2000 - DNA, 2463 bp, Artificial Sequence
  chemically treated genomic DNA (Homo sapiens)
aaatgggttagtttttttgagaatttttttttatttatttttttttttttttttattttttttatattgttttgttaaatatagatttggtaattaaaatgttgattgaagtttggaattgtagcggttgatttagtggttttttttgttatttcgttttttatatatttttttatttagttaatagtggtaatgttatatgtttttttttttatatttttatttaggtaagataaaggtgggataggttagattatatagaaggtagtgattgaatattatatttgatttatgaagcggtagggaggttttaagtataaaagttataagtttgatggaatattgtagttagtttgagtttgggtttagttgtttttttgggaagttaaggaagtagtgataattgaataaaatatttcgatttaaatttcgtgttaaaataaggattttttgtatttgggtattgtgttgataatttttttgtggagtttttaattgaagttaaatttggttttgttttggtggtattggggttagttttttttagtttttttgtttttttttttaaaattaattattatttttaatatagtattatttatttttattatttttttaatatgttttatttaataagttaatttaggtggttaagagtgggaatagggtttttgatttttttttattatattgaatattatattttatgtaaaataattattttaatattagtaaatttgggttagtagtatttattttttttaataaagggataaatagaggtgttttttatttgttttgcgttatataagtgagttttttattattttggttagaggataaagttgagatagtatcgtttgtatcgtgtagtgtggtttagtcgtttttacgtttttattagtgttttagggttttggttttggtattttttttgtattggttgttttagtttcgcggtacggatatatttttagatgttaatagtgttttgcgtatttgagaaggtgtggtattaggattttgtatttatttgaggtttttttgttttagggattttatggggtatttttttttttagtagtttaagttggttttgtttagtcgtggtttttggggtttttttgatgaggtcgttattttggcgaggagtaagcggggaagtttttatgggtcgggattattacgtacgttgcgtttcgagttacgggggcgggagcgaggcgcggcgcggatgaaagggttttggggttttttaaataggagggaatagtgttttggatttcggcgggggtatggattttaggaacggggaaggatggaagaatgggtagaagtagtagtaatcgtgtttaacgttatttttacggggcgtgtttttatttcgtttttcgttagttttatttatttagttttgtcgtttgtcgtttgttagttggttgattttatttttaagggaagagcggtttatcgtttttagttttttgtttcgaattatttagtgtacgcgaatttcgcgggtcggcgtggttttggtcgggtagggggcggggcgagcgtcggtgacgcggtcgttgttatgggaattcgtcgttcgttcgttttttggagttggagtcggagttgtcgttagtcgttcgttttaggttttttttgttagtcgtgcggttaggttcgcggggtggtcggggggagtcgggcggtagagaaggagggagcgggtacggttttttagtcgagatcggtaagtcgaagtttttgagtcgttcgttgtcgttgtcgtcgtcgtcgtcgcgatcgcgagggataaggataagcgtcgagtagcgtttgtttaattttcggaacgcgtattcgttttaacgtttagatacggatcgtgcgggtcgttttcgttttagcgtcgttttattttagttcggttcgcgttttggacgttttcgtatttttggtcggtttcggtttagtttcggtagttttttttcgttttcgtcgtagttttcgtcgtagtcgtagttttcgttatagtcgtcgtttttattttcggttttatttcgttcgcgatttttgtcggggtttcgatttcggttttattttcggtttcgttcgcggttttattaattttcgtttcggtttcgtattcggaggtttagtcgtgggtacgatgttgtttagttttatttagatttcgggggagtcgttgttcggcgtcgaggtgcgggatatttgtcgcggttttcgcgataacgtcgtgcgtttgtttttattgcgcggttgtcgtttttgcgatcgcgattttggtcgtatttgtcgggttttggtcggggttacgtttttggcgtagtttaattttaatttgggcgtcgtgtttagttttagtcgtattaagtagttggttgaggttttgcggattaatcgttttatttagttttttttgtgagtgcgttttttcgtaagggggtt

SEQ ID NO: 2001 - DNA, 2458 bp, Artificial Sequence
  chemically treated genomic DNA (Homo sapiens)
atatgaaattgttgtttaataggtgaagacgtttatgattttgtgttatttttggtttttaggtttagtttttttttatcgtagagagaaagagagaaattttatatatatatatatatatttatatatatttttttttatatatttagatttagtatttttgtataaaggtttatttttttttttttatttttatagtttttttttttttttttatttttttatggtttttagcgttttattttttttatttagaattttttaaaggaagaatgggggcgttggtggttttgggatgggtaattgaggtttggtttagggtttgtttttttatgatagataaaattattgaagtgattttatcgttgtttttaattagaggggagttttaaaagaagttacgggatttggggttttcggagtcgtatttggttaggagggaggtgagggtgaggagattggtttcgggttatatttttttagagacggtgttagttttatttcgcggttatgagatcgaattgttttgggtttaggtttgggacgtttgggttaggtttagttattttttcgggttgttgtcgtcgggatttggagacgaataaagaattagttttaaatcgttttttttgatatgttaggtaaatatgtgtaaaaggttagttttacgttgtggagtagagatttgttttttaggtattaaaattttttttttttaatcgtgttcgagagttttcgatttttgggttttgtttaggcggttttgtatttttcggtttttttaggggtggggtggaggtgtttttttttggagtttttttatcggtttcgtattttatttatttttgggttataggatttttattttaatgtttattttttagttgatttaaaattttttgggatttgttttagaattttggttaaggttgggggtttttgtgggtagtttttttggtttgttttgttttgttgagaatttaaataaattagatgaagtttttaatttttaagtgtattttttttggttttttttagacggtggaaatagggcggtgattaattttttagagtggaagatacgtacgaagggcgtatttgtagtttttcgggatttaggcgggggtcgttgtgtttttttaaaagtgagcggcggttttagtttgttatcgtttcgtttcgttagttcggaggaaattttggttggaggcgatttcgggtttagtcggacgggtcgggtcgagtttaggaggggttggtagacgtgttttagggttagggtggggcgtagggagcgtcgtttttatttttagtatttttggggtgggggatttgagcgtgcggagagcgggaggtagagttgagagcggggttaagcgcgaagttaaggcgtcgtatagggttgggtgggaatggatagggtgagttggaagcgaagtattttagttaggttttaggagagaggatcgtcggtatttgtgtatattttagcgggcggatgatgtgggagagaggcggagggaggtgaaatgcgggagttagaatttagttttgtagtgaggttatttggggtttgtatttagtttcgatatatatatgtaggggttgtgtgattttggggaagttatcgattttgtttgaatttttgttttttggtttgtaaagtggttaattggtgggaatttaataggagaatgtgcgtaaaacgtttagtatagcgtttggttaataatgcgtttttaagaaaggttgttgagttttgtttaggacggtttatatcgttttacgtttaagatgagtttatagcgtttaagatttgtttaatttaagatgatgtaaattgtattgttttttttagatacgtagtagttaggagttggttatttgtatttttcgcgattttttttttagaattttagttttgttagatttgcgtttttttttggttttttaaatatttgttgtatcgtttagagtttttttttatttcgatttttttcgtagtttcgtattagcgagattgcgtttcgtggtatttcgggggtgttacgattggcgggggatgggggatgttttttagttttattcgtttttcgggttttagataattatttcggagagttagttgtttttagtgcgggtaggtttaaggttattaattgtatttggcgatttattttcgtttttaagaggtttcggaaagtgcggtttcgggttttttttgaaatagagattcgcggtatttcgtttttttttttgggataggagagggagagtcgcgggagtttcgtagttatttttggcgttgttattacgaagtaggtttattagttaatagggtttgggatattgagtcgtgtcgtaaatttttttgtgttttatttaatgagggaagtttgagttgcggtgaggggcgggatgatttggtgttgggttgagcggagtttttagttttagg

SEQ ID NO: 2002 - DNA, 2458 bp, Artificial Sequence
  chemically treated genomic DNA (Homo sapiens)
tttgaagttgggagtttcgtttaatttaatattaggttatttcgttttttatcgtagtttaggttttttttattgagtggggtatagaaaagtttgcgatacggtttagtgttttaggttttgttagttagtgaatttgtttcgtggtggtagcgttaggagtggttgcggaattttcgcggtttttttttttttattttagggggagaagcggggtgtcgcgggtttttgttttaaaagagattcgaggtcgtatttttcgaggttttttgggaacggaggtgggtcgttaagtgtagttagtggttttgggtttgttcgtattgagagtagttggtttttcggaatggttgtttggaattcggagagcggatgaagttgggaggtattttttatttttcgttaatcgtggtattttcgaggtgttacggggcgtagtttcgttggtgcggagttgcggaggaggtcggggtggggaaaggttttgagcggtgtagtaggtgtttgaggagttagggaaggacgtaaatttggtaggattggggttttgaggaggaaatcgcgggaggtgtagatgattagtttttggttgttgcgtgtttaagaagggtaatgtagtttatattattttaaattgaataggttttgggcgttgtgaatttattttggacgtggggcggtgtagatcgttttggataaggtttagtagttttttttgagagcgtattgttggttaggcgttgtgttaagcgttttgcgtatatttttttattgaatttttattaattagttattttataaattaggaaataggagtttagataaggtcggtaatttttttaggattatatagtttttatatgtatatatcggagttgaatgtagattttaagtgattttattgtaaagttaaattttagttttcgtattttattttttttcgttttttttttatattattcgttcgttaggatgtgtatagatgtcgacggtttttttttttaaggtttggttggggtgtttcgtttttagtttattttgtttatttttatttaattttatgcggcgttttagtttcgcgtttaatttcgtttttagttttgtttttcgtttttcgtacgtttaggttttttattttaaaagtattgagggtggagacggcgttttttacgttttattttggttttgggatacgtttgttagttttttttaggttcggttcggttcgttcggttgggttcgaggtcgtttttagttagagtttttttcgagttggcgaggcgaagcggtggtaggttgaaatcgtcgtttatttttaagagagtatagcgattttcgtttgaatttcggagagttgtaggtgcgtttttcgtgcgtgttttttattttgaaaagttagttatcgttttatttttatcgtttggaaaaagttagggaagatgtatttaggagttaaaaattttatttaatttatttaaatttttagtaaaataaaataaattaaaaaaattatttatagaaatttttagttttgattaagattttaaggtaggttttagaaagttttaaattaattaaaggatgggtattgggatgaaagttttgtagtttagggatgaataaaatgcggaatcgataaggggattttagggagaggtatttttattttatttttgggaaggtcgagaggtgtaaagtcgtttggatagggtttaggggtcggaggttttcgggtacggttagaaaggggaggttttggtgtttgggggataggtttttgttttatagcgtggagttgattttttatatatatttgtttgatatgttagagaagacgatttaaaattggttttttgttcgtttttaagtttcggcgatagtagttcgggagggtaattgggtttggtttaggcgttttaggtttagatttaggataattcgattttatagtcgcggaatgggattggtatcgtttttgggagagtgtggttcgaggttaatttttttatttttattttttttttggttaggtgcggtttcgggagttttaaatttcgtggttttttttaaagtttttttttaattagaagtagcggtgaaattattttagtgattttatttgttatgggaaagtaaattttaaattaaattttagttgtttattttagagttattaacgtttttattttttttttaaaaagttttaaatggaaaagataaagcgttggaagttatagaggagtgggagaggggaagggaattgtgaaagtaggaagaagggggtggatttttgtatagaagtgttaagtttgagtgtgtaagagagagtgtgtgtgagtgtgtgtatgtatgtgtagagtttttttttttttttttacgatgggaggagattaaatttagaagttagaagtgatatagaattatgaacgtttttatttattgagtaatagttttatgt

SEQ ID NO: 2003 - DNA, 2656 bp, Artificial Sequence
  chemically treated genomic DNA (Homo sapiens)
attatattgaatttaattttttttttaattattaaggattttagatttatcgttaattttttttttgtatttatttttattgtttagttttgggttaaaagatagcggggtttgaacgaagtgtttataaagtatagtatttggagaagttttgttgttgttttttaaaataatttttttaaaaagggatttcggatattttttttgtttttttaaaaaattttttttttatgtacgagaaatatagggaaaaaaagtaattaggttaatgaattattttggtttattggattttaattggtagagaatttaaatttaaaaattaaataaaacgaaagagttttttagttattttatgtcgtaaacgagttaaaagttttgttatttttgaaaaattaaagagtattatttgtatatggttataattgtaaaggaaataacggcgtatttaggatagggggagtttattttaagaagttgcgtttttttggattatgttttttcggggttgattttttcggggagtttggtttttaaagcgcggatttcgcgacgcgcggtttgtaggattgcggggttcggcggtcgagacgcggtatttataggggttttttcgcgcggtcgcggcggtggtggcgggaatttgggattggtcggcgaggggtttcgtatggtaatcgttttcgatcgtaagttataggttgtgggtatcgcgtagagcgtattttttatcgaattttttttattttattttaattttcgagatcgaaagtgcggagcgcggagttttgtaaatttgatttcgagttaaggtgcgcgaggcgacggcgagtgtttttcgggttttttgtagtttcggggttggaagtttcggttttcgcgtatttcgttttttgttcgttcgaaagcgaaatttggtcggcgggtaggaggggagagttcggtttcgagttttgtttggcggggtttcggtttggaggtattttcgattcgtatttggcggcgcgatttatttatttgttcgtttttaaggcgtcgttaggagtaatagtagtagcggcggtagcggtagcggtcgtagggtcgggcggtcgggagttcgtatgggcggcggggttgggttatatgtcggggggtagtagattgtttagttttacgttcgttggggttaagcgcggtcgcgcggttttagtttcgcgtttggggttttgcgtgttacgttttaggcgatttgagttttagggcgttttcgttatagtcgcgttttttaggtttttttagaaattaagggcgagcgattcgcggagtttttacgcgcgttttttcggttatttagttggatggtagcgcgagggtagttttcgcggatttatagtttttagttattcggttgttagttttgagagtttgagagtttttatttttcggggtttatgtttagattaattaggttattaggtaggtaaaatttttttttggtaatgagcgaggcgagtgtattgtaaagagattttggtatttaggtcggtttgatggttagttaaagtttaatatcggaagacggatgaaatagagcgttatttttcgatatatagttaggtatttagtcgtagattttatagttatgtattatttaagatgataggattattttttgagaaatgttttaggcgagttttttgtgtgaatattttagagtgtatttatatttatatggtatagttttttatacgtttacgttatatggtataggttgttgtttgtttttaggttataaatttgtacggtaagtgattatattgaatattgtaagtaattgtaatataatggtaaatatttgtgtatttaaatatgtttgaacgtagaaaaggtatagtaaaagtatagtatgaaagattttaaaaatggtatatttgtatagggtattttttatgaatggagtttgtaggattggaagtcgttttggttgagtttgtgagtggtgagttaatgtgaaggtttaggatattattgtgtattattataggttgtataaatattgtattatatttaggttatgttaaatttattaaaaaattatttttttaataataataaattaattttagtttattatgattttttattttttatttttaaattttttaaattttatttatttatttatttttgagatggagtattgttttgtagtttaggttggagtgtagtggtgcgatttcggtttattgtaatttttgtttttcggttttgatgattgttttgttttattttttagagtagttgggattatatgtgtgtgtttttacgttcggttaatttgtttgtatttttagtatagattgggtttcgttatgttggttaggtcggtttcgagtttttgattttcggtgatttattttttttggttttttaaagtgttgggattataggcgtgaattacgatattcgatttaaattttttgatttgtaataacgtttgatttaaaatataaatatattgtgtagtagtatgaaaatattttttttttgtattttttttataagttttttttatttttaaatttttttttttttttattttttttttattttttaaatttttttgttataaattaaggtataattatatatattagtttaggtttgtataggg

SEQ ID NO: 2004 - DNA, 2656 bp, Artificial Sequence
  chemically treated genomic DNA (Homo sapiens)
ttttgtgtaggtttaggttaatgtgtgtggttgtgttttagtttataataaaaaagtttaaaaagtaaagaaaaaataaagaaaaagaaaaatttaaaaatagaaaaagtttatagaaagaatataaagaaaaaatatttttatattgttgtataatgtgtttgtgttttaagttaaacgttattataagttaaaaagtttaggtcgggtgtcgtggtttacgtttgtaattttagtattttgggaggttaaggagggtagattatcggaggttaggagttcgagatcggtttggttaatatggcgaaatttagtttgtattaaaaatataaataaattagtcgggcgtgggggtatatatatgtaattttagttattttggagggtgagataggataattattaaaatcggaaggtagaggttgtagtgagtcgagatcgtattattgtattttagtttgggttatagagtaatgttttattttaaaaataaataaataaataaagtttaaaagatttaaaagtagaaagtaaaaaattatagtaagttaaggttaatttattattattgaagaaataattttttaataaatttagtatagtttaagtgtaatatagtgtttatatagtttatagtagtatatagtgatgttttaggtttttatattgatttattatttatagatttagttagagcgatttttagttttgtaagttttatttatggaaagtgttttatataggtgtattatttttaaaattttttatattgtatttttgttgtattttttttacgtttagatatgtttagatatataaatatttattattgtgttataattgtttgtagtatttagtatggttatttgtcgtataggtttgtagtttaggagtaaataatagtttgtattatatagcgtaggcgtgtaagaggttatattatataggtgtgagtatattttaagatgtttatataagaaattcgtttaagatattttttaggaggtaattttgttattttaaatgatgtatgattgtaagatttacggttgagtgtttaattgtatatcgagaaataacgttttattttattcgtttttcgatattgaattttaattgattattagatcggtttgaatattagaatttttttgtaatgtattcgtttcgtttattattagaaggaggttttatttgtttagtgatttggttggtttgggtatgaatttcgagaggtggaaatttttagatttttaggattgatagtcgagtggttggggattataaattcgcgagaattgttttcgcgttgttatttagttgggtagtcgggggagcgcgcgtgggggtttcgcgagtcgttcgtttttggtttttggggaagtttgggggacgcggttgtggcggaggcgttttgggatttaggtcgtttggagcgtggtacgtagagttttaggcgcggagttgaggtcgcgcggtcgcgtttggttttagcgggcgtgggattgagtagtttgttgtttttcgatatgtgatttagtttcgtcgtttatgcgggttttcggtcgttcggttttgcggtcgttgtcgttgtcgtcgttgttgttgttgtttttggcggcgttttggggacgggtaggtaggtgggtcgcgtcgttaggtgcgggtcggggatgtttttaggtcggggtttcgttaggtagagttcgaggtcgagttttttttttttgttcgtcggttaggtttcgttttcgggcgggtagaggacgaggtgcgcggaggtcggagtttttagtttcggggttgtagggagttcgggggatattcgtcgtcgtttcgcgtattttggttcggggttaagtttgtaggatttcgcgtttcgtattttcggtttcgagaattgaggtggggtggggggagttcggtggggggtgcgttttgcgcggtgtttatagtttatgatttgcggtcggggacggttattatgcggggtttttcgtcggttagttttaggttttcgttattatcgtcgcggtcgcgcggaggggtttttgtggatgtcgcgtttcggtcgtcgggtttcgtagttttgtaagtcgcgcgtcgcgagattcgcgttttaaaagttaaatttttcgaaagggttagtttcgaaggaatatgatttagaaagacgtagttttttaaagtaagttttttttgttttgggtacgtcgttgttttttttgtagttatgattatgtatagatagtgttttttgattttttagaaataataaaatttttaattcgtttacgatataaggtaattgaagagttttttcgttttgtttggtttttaagtttaaattttttattaattggaatttagtaaattagaatgatttattaatttgattgttttttttttttgtatttttcgtatatgagaaaaagattttttaaaaaaataaaaaagatattcgggatttttttttaaaaaaattattttaaaaaataataataaagtttttttaaatattgtgttttgtagatatttcgtttaggtttcgttgttttttaatttagaattgaatagtaagagtgaatgtaggaagaaagttgacggtgaatttggagtttttggtagttaaagaaaaagttaaatttaatatagt

SEQ ID NO: 2005 - DNA, 2242 bp, Artificial Sequence
  chemically treated genomic DNA (Homo sapiens)
ttatatatattatatattttatatattatatatattatatattatatatttttatatattatatattttatatattatatattatatatattatatattttatatatattatatattttatatattttatatattttatatatattttatatattttatatattatatatattttatatattatatattttatatattttatatattttatatattatatataatatatattttatattttatatatattatatattttatattttttatatatattatatattttatatttttatatatattatatattatatatattttatgtatattatatattatatatattttatatattatatattatatatattttatatattatatattatatatatttatatatattatatagtatatatatttatatatattatataatatatattttatatataatatattatatatattttatatattatatatattttatatatattttttatatattttatatatattatatatttttatatatatattttatatatattatatatatttagagagagaaagagagaattcgggtatcgtgatttatgtttgtaattttagtattttgggaaattgaggtaggaggtttatttgagttcgggagtttgagattaatttgagtagtatagtaagattttatttcggaaggagggagggaaggaaggaagggaaaaataatatttaagtgaatgaatgaatgaatgagaaatagagcgaagattcgcgtgtttaggatttttaatttttttttcgatgattagcgtcgtttggcggcgaagttcgggtgcgtattacgtgaagatagtaggtagcgcgtaagcggggttttggttggggaggcgggtttaggaggtgtttttcgtcgtagtatttatcgatattcgcgtgttggagaggggaggggagttcgggcgtcggtcgcgcgggggcggggcggtgcggttcgggtggtatagtggtgaattttgcggcggttgcgcgtcgtttacgttgtttttttagttgttgttatttttgcgggttttttttatttaaggggaacggagttgttatttttcgttgtttttatagtaatcgtagtttcgcgcggggagcgagttagtgaattaggtttggtttgcgtttggttttttgggatatgttggttgcgtggggtagaggcggaagaataggggtttggaggaagagggagaaataggtgatatgattatgcgtttatttattatgcgtttatttagtaaatggacgtttgttgtgtgtaaggttttgtgttagttggggttacggcggtgaaaaggaaaatttataaaattttgagtgtttattttgtgttaagttttacgttagggaaaggatttttttattgtcgtaagaaggttaaatgtttgattggttgtttaagagtttatatttgtgttatttgtgtagattgttagttttgtttgaggaataatagggagaggagttgtgagaatagtaatagttttagtaaagagtcgttttgtttagtttagtttgggatatatatattgtggtattaggaaaatgtttaaagagttgaaattttgtagtttatttttgttagtgttttttttattttttttaagatttttttattatgtgttatgtttaaattattgggtgtttttaatttattatgtacgaataaaaagaattgttattaattgaatattataattatggattaggtattatgtaaggtattttatgtagattatttaatatttataataatttttagaggtaaatattattttttttttagatgaggaaattgaagggtagagaaattaaagatatttattttaggttatatatataggaatttaaatttattttaaggattagaaaacgaaagagagagagagagtttaaatttagttttgttttattttataagttttataattagttatattattgtgaaagatgaatgtgtgggatattgtaatttggagagaaattttttttttttttcgagatttttgttttgaagaaatatttttattaaagttatgtaatatattaatgttttgaaagttaatagtttttaaacgtaggaataaaaaattaaatattcgtatgtttttatatataagtaggagttaaatgaggagaatttacggatataaagaagggaataatagatattggggtttatttgagg

SEQ ID NO: 2006 - DNA, 2242 bp, Artificial Sequence
  chemically treated genomic DNA (Homo sapiens)
ttttaagtaggttttagtatttgttgtttttttttttgtgttcgtgagttttttttatttaatttttatttatatgtgagaatatgcgggtatttggttttttgtttttgcgtttgaaaattgttaatttttaaagtattaatgtattatatggttttaataaaaatatttttttagaatagaaatttcgaaggaaaaaaaaagtttttttttagattgtaatgttttatatatttattttttatagtgatatgattggttatggagtttgtggaataagatagaattgggtttgaattttttttttttttttcgttttttaatttttagaatgggtttgaatttttgtgtgtgtgatttgaggtaaatgtttttgatttttttattttttagtttttttatttgaggaaagaataatatttatttttgaaggttattgtgaatattagataatttatataaagtgttttatataatgtttggtttatggttatagtgtttaattaatggtagttttttttattcgtatatgatgagttaggaatatttagtaatttggatatgatatatggtagaaaagttttaggaggaatgaaggaaatattggtagagatgagttgtaaaattttaattttttaaatatttttttggtgttataatatgtatgttttagattggattggataaagcgattttttattggggttgttattatttttataatttttttttttgttattttttagatagagttaataatttatataaatagtatagatgtgggtttttggatagttagttagatatttagtttttttgcggtagtgaaaaaattttttttttggcgtaaagtttggtatagggtaggtatttaaaattttgtaggtttttttttttatcgtcgtggttttaattagtatagggttttgtatatagtaggcgtttatttattgaatgagcgtatgatgaatgagcgtatgattatgttatttgtttttttttttttttttaaatttttgttttttcgtttttgttttacgtagttagtatattttaaggagttaggcgtaagttaggtttggtttattgattcgtttttcgcgcgaggttgcggttgttatggaaatagcgggaaataataatttcgttttttttgggtgagagaggttcgtagaggtaatagtagttggaggaatagcgtgagcggcgcgtagtcgtcgtagagtttattattgtgttattcgagtcgtatcgtttcgttttcgcgcggtcggcgttcgagttttttttttttttttagtacgcgagtgtcggtaggtattacggcggagggtattttttgggttcgtttttttaattagggtttcgtttgcgcgttgtttgttgtttttacgtgatgcgtattcgagtttcgtcgttaggcggcgttgattatcggggagggggttaggggttttagatacgcgagttttcgttttgttttttatttatttatttatttatttaaatgttatttttttttttttttttttttttttttttttcgggatggggttttgttgtgttgtttaggttggttttaaattttcgggtttaagtgagttttttgttttagttttttaaagtgttggggttataggtatgagttacggtattcggattttttttttttttttttgaatatatataatatatataaaatatatatataaaaatatataatatatataaaatatataaaaaatatatataaaatatatataatatataaaatatatataatatattatatataaaatatatattatatagtatatataaatatatatattatatagtatatataaatatatataatatataatatataaaatatatataatatataatatataaaatatatataatatataatatatataaaatatatataatatataatatatataaaaatataaaatatataatatatataaaaaatataaaatatataatatatataaaatataaaatatatattatatataatatataaaatatataaaatatataaaatatataatatataaaatatatataatatataaaatatataaaatatatataaaatatataaaatatataaaatatataatatatataaaatatataatatatataatatataatatataaaatatataatatataaaaatatatgatatataatatatatgatatataaaatatataatatatataa

SEQ ID NO: 2007 - DNA, 2371 bp, Artificial Sequence
  chemically treated genomic DNA (Homo sapiens)
atatataaatagatagttttagtgtagtggatatatacggtaatagaggttttaagatgtataaaaggttgtaggggtttaaaggacggagaaaggatattgattttttttttttaattttttaagttatttgtttatttcgttttttttttttcgagattaaatatttttatttttttttaaagatttaattttgttattatggtgtttaattttttttttatattgtgatgttggggaaagttttggggtatttttgttttttcgtgaatttttgaagttttattttaaaaaatatatatttatttttttgtttatcgtaaattttgatatttgtaaatatcgataataggaattttgaaaaaatatacgtttttagaaataagtaagtaaataaaaatacgtagaatgttagagtttttttttattttatattttttttttaaattgatgttaaggtgggtttagtgagggttagtgacggaatttgtagtttgagaaagatatggtagaagtataaggttagaggttgtttttgttgttttattaaaaataataatttttttttaaatttggattgaaattgatatttaacgttaagtgtgattttagtttaatttgttttggtagatatgtatatattttttatgcgtattattttatgtgatcgtgtttatagttttgtgagttgagaggggtgggagtgattatttttaattataagtaaggttttcgggttttaagggttggagattatttagggttcggttagtattagaattaacggtttttaattttaaattaaatgatggtttatgttatattataattttaaataaatgaattgtgatgtgttttatttttttgtgtaagtggaagatgttaatatatgtgtattatgagaaaggattttataattttttttttttgggttttgttgagacgtttttttgatttagagagaattttttaggattagtaagaaaagtatgttattattttttaaattttataatttaggaaatagtttattattttataaaattataaaagcgaattatttgagtttttttattatttgtttttttttttttaagttggttttgtataaatatgatgtacgtttattgggtgataagtttgtcgtaagtgaaacgtttataggtattataggaatgatttggtgtttcgtttattttattagaattttaattggggtgtgtaggagaggattttataaatggtaaggtaatttttggtagtttgtttgttagtattgttcgtgttatttttagaggagtttgagaagaggtagaggaaggcgaaatatggttggtgagtgtatggtattttttttattaggtttttgttagaagtttgtgttttttttgggttagtttgttaagttagagtgttcggttaggatagttgtttgttttgggggttttgaaggttagattttttattttagggtgttagttagaggcggtttttttttagtggtggttgggtttttttagtatatttttggggtagaatattattggaatgtagttttgaataatgggtagggtgtttagtgtagttggatatcgtatttttttaggtagaggataagttttgttttgtttgtgtttgcgttttttttatatattcgtcgttattcgtaaagttaaagtagataggattcgggtttcgtgttttttagtgtagttgtatttagttgttagtagtgttagtaaagaagtatattttagaattattagggagtgagagtggtaatatgtaagttgatttgaaagaaattattgtttattttaaattaatttatttaggagtattaggaatgtttttaagtaagttatatattagaagtattagataggttttgtgtaagtgatttgatgagttgaagttttttcgtagtaggagtaggtgtgttataagatgttttggtttataggagagtattagggaataggggttataaagaataataggaagtgtaggtttttttattttatgtttattgtcgaggatatgggtttttgttaattagtatttttgttaagtagtatgttaattattatttgttttgtgtgtttagtttagtaggttgatagggacgttaaatttaaataagatatgagttaaatttgtaaaatattgtgaatggcgattagggttgttggaagattggttaaagatattattgagttaaatgtaataggtaaatgttggttattttagaagttataaaaattgggataggtgattgtatattaggtttttttttttgttttttattttttgttgtaatgtatagtatggttgggatgttaagaagaggagttttggattttatatattg

SEQ ID NO: 2008 - DNA, 2371 bp, Artificial Sequence
  chemically treated genomic DNA (Homo sapiens)
tagtgtgtagggtttagagtttttttttttagtattttagttatgttgtatattatagtaaggaatgggagataggggagggggtttaatgtgtaattatttgttttagtttttgtggtttttgaagtagttagtatttgtttgttgtatttggtttagtgatgtttttggttaattttttagtagttttaatcgttatttataatattttataagtttgatttatattttgtttggatttggcgtttttgttaatttattaggttgagtatataagatagataataattagtatgttgtttagtaggggtgttgattaataaaggtttatattttcgatagtaagtatagagtgggggaatttgtattttttgttgttttttgtaatttttgttttttggtgtttttttgtggattaggatattttgtggtatatttgtttttgttacggggaggttttagtttattaagttatttatatagagtttgtttgatgtttttgatgtgtagtttatttaggagtatttttaatgtttttaagtaagttgatttgaaataaataatggttttttttaaattaatttatatgttattatttttattttttggtagttttgagatgtgtttttttgttgatattgttgatagttggatatagttatattgagaaatacgagattcgagttttgtttgttttggttttacgggtggcgacggatgtgtaaaagaaacgtaaatataaataaggtaaagtttgttttttgtttaaggagatgcgatgtttagttgtattgaatattttgtttattatttagagttatattttaatgatgttttattttaagaatatgttagagggatttaattattattgagaaagagtcgtttttggttagtattttaaaataggaagtttggtttttagagtttttaaggtaggtagttgttttggtcggatattttggtttggtaggttggtttaggggaagtataggtttttggtaaggatttgatggagaagatgttatgtatttattagttatgtttcgtttttttttgtttttttttaggtttttttgggaatggtacggatagtgttgatagataggttgttaaggattgttttattatttatagaatttttttttatatattttaattagaattttaatgaagtgggcgaggtattaggttatttttgtagtgtttgtaaacgttttatttacgatagatttgttatttaatggacgtgtattatgtttgtataagattagtttggggagaagggggtagataataaagaaatttaaatagttcgtttttataattttataaaatgatggattattttttggattgtagggtttaggaaatgatgatatgttttttttgttgattttgggaagttttttttgaattaaagaaacgttttagtagaatttagaagaagaaaattgtgaggtttttttttatgatatatatgtattagtattttttatttgtatagggaagtgagatatattatagtttatttgtttagggttgtagtgtggtataaattattatttgatttggaattagaagtcgttggttttgatgttggtcgagttttgggtggtttttaatttttgaagttcggaagttttgtttgtggttggggataattatttttattttttttaatttataaagttgtggatacgattatatgagatggtgcgtatgggaagtgtatgtatatttattagggtaggttaaattgagattatatttggcgttgaatgttagttttagtttagatttgggggaaaattgttgtttttaatgaggtagtaggaatagtttttaattttatgtttttgttatgttttttttagattgtaggtttcgttattgatttttattgggtttattttgatattagtttaaagaaagggtgtggagtggggagaagttttgatattttacgtgtttttgtttgtttgtttgtttttaagggcgtatgtttttttaaagtttttattatcgatatttataaatattaaggtttacgatggataaaggagtgagtatatattttttaaagtgaggttttaaggatttacgagagaatagaaatgttttaaggttttttttagtattatagtgtggaaggaagattgagtattatgatgataaggttgggtttttagagagaagtgagaatgtttgatttcgagaaagagaagacggaataggtaggtggtttggaaaattgaaaaagagaaattagtgtttttttttcgttttttaggtttttatagttttttgtatattttagaatttttattatcgtatgtatttattgtattggaattatttgtttatatat

SEQ ID NO: 2009 - DNA, 2419 bp, Artificial Sequence
  chemically treated genomic DNA (Homo sapiens)
ttagggttgttaggttttttttagttttgtatttgtcgcgtcgttttatttcgttaggaagttttagagatttcggggatggggtgggagcgtttttttatcgcgggtttaaaaagaaggaaggacgtttttaggggtcgtagaaggaggattagttttaagttataatttttttcggatttaaggtaggtcggttggggtttcgcgtttatacggtttttggcgggggttcgcgcgtttcgggagtttcgcggttcggggaggaaagaggagataagagataggcgaggattacggggttgatttagtcggggtagggattatcgtggaaaaattttggcgaggtggggggacgcggaaagagagcggttcgcgttttgtattttgcgtcgggtatttcgcgttagtgtttcgtttttagtgtttcgcgtttcgcgtttcgcgttttgtttttatttcgggttagttgtatcgcgttcgcgtcgtaggaatcgtggagttggaaagtgggggcgtcgcggttggggggttgttttagttgcgtttcggttagcgatcggcgggtcgggtttaaatttagttaggttgggtaggcggtggtcgcgcgattggggatcgggcgtttcgtttttttcgtttttttttttttttttttttttttttttagttttttggttttttttagtttttatcggatttgttcgttcgttgtttttttttttttttcgttttttatattattttttattttttcgttttgttttcgtttttttttttttttttgttttttgttttttttttttttttttttttttttaggggcggagtttttttttttttttttagataatgttgtggttgcgttttttttttcgttagttcgtttaggttttcgtcgttagcgattttttcgggttgggggtggggaggtggggggggagtgtagggttggggaggatgagttggttttttttatttttttgttgttgttttttttaagagggatggagatttggtttaagtttttcggtttattcggagttgtgatagttatttttagggaatagttacgttgttttattaagtttatttttagcggtttggattttttaggtagaggttgtgggattttgttttttttaatattttagtttatttttaaaagggtttgagtcggataggggttaaataggttttttcgatttggcgggtcggttagacgtgatagtaatgttaaggaggttaagtttttttgtttattttttattttttttttttttatttttggattttttggcgtttttagtatatagaggtttttgagtagttcggttgtaggttttttatttatttagagtttttttttttacgtgtttatttttaattttgtagtgtttgcggattaaaggggaagggagttttaggttaatttttaaggtatagttagattagtttatttagtttggaagttaagtattttttattaaatttattgtttggattttggaatgtgttttttttagaaataatgttataaatggtgatttgttttttaggttagttataaaagtttgttgaatttaaaatgtagttgtagggtggtgttgagaattgtgttagttattttgaaaaaggaggttattgattagttttatttgtagaaaaaatatgtatatattttttggttttttttttttgggttataaatattataaattaaataagttaaagtttttttattaagtttttttatatggatttattattttatgtgttaagttttttttttttgtaggtaatagaaataattttgggggaatgtatttgtagacgtagtggtttttcgataattttatttaattttagtgttagaattgtatggagagtttagtataagaggtaaatttagagtttaaagggtttttcgtaatttagaaagttttttttgaggggttttttttttttttttattatagattggttttttttgtattttagatatttggtgaaaggtggttatgatttttattttcggggtttggagttttgttgtttaggaaagtagttagatgttgttagaattttttattttttaatttaattttttaaaagagtagtttatttttttgtgatagtggggttagggatgagtttaggttgtatatattgggttattagaaattttgaatttaggttttatttaaaattaaatttattatttttgtttttgtttttgttttgttttgtaattttgagatggggttttattttgttatttaggttggagtgtagtggtatgattatagtttattgtagttttaattttttgggtttaagagatttttttgttttagtttttcgagtagttgggattatagttatgtgttattatggttagttaatttttgtattttttgta

SEQ ID NO: 2010 - DNA, 2419 bp, Artificial Sequence
  chemically treated genomic DNA (Homo sapiens)
tataaaagatataaaaattagttggttatagtggtatatggttgtaattttagttattcgggaggttgaggtaggaggattttttgagtttaggagattgaggttgtagtgagttatgattatgttattgtattttagtttgggtgatagagtgagattttattttaaaattataaaataaaataaaaataaaaataaaagtaatgggtttagttttaaatagggtttaggtttagggtttttggtagtttagtatgtataatttgagtttatttttagttttattgttataggaggatgagttgtttttttgggagattagattagagaataagggattttagtagtatttggttgtttttttgagtagtagagttttaagtttcggagatagaagttatggttattttttattaagtgtttggggtgtagggagggttagtttgtgatgaaggagaagaaagaattttttagggaagattttttgggttacgggaagttttttaggttttggatttgttttttatattgagttttttatgtagttttgatattgagattagatgagattatcgagaaattattgcgtttgtaaatgtatttttttaaggttatttttattatttgtaaaggaaagaagtttaatatatagagtagtgggtttatatggggaaatttaatgggagaattttaatttatttaatttatagtgtttatagtttaagaagaaagaattagaagatatatatatattttttttataaataaagttgattagtggtttttttttttagggtagttgatatagtttttagtattattttatagttgtattttgggtttaatagatttttgtggttggtttgggaagtagattattatttataatattgtttttaagggagatatattttaagatttaaataatgaatttagtaaagaatgtttggtttttaggttggatgagttggtttggttgtattttgggggttggtttgaggttttttttttttttggttcgtagatattgtagggttggggataggtacgtgagggggagaattttgagtagatagggaatttgtagtcgggttgtttaagggtttttgtgtattgggggcgttaggaggtttagggatggaaaagggggaggtgagaaatggataaagaaatttggtttttttggtattgttgttacgtttggtcggttcgttaagtcgaaggggtttgtttagtttttgttcggtttaaatttttttgggaataagttgggatgttagaaaaaataaaattttataatttttgtttggggaatttaggtcgttggaggtgggtttggtagggtagcgtgattgttttttgggagtggttgttatagtttcgggtgaatcgaggagtttgggttaagtttttattttttttggagagggtagtagtaaggaggtgaggggagttagtttattttttttaattttgtattttttttttatttttttatttttagttcggaagaatcgttggcggcgggagtttggacgagttggcggggaaggggacgtagttatagtattgtttgggagggaggggagaagtttcgtttttagaggggaggggagaagaggagggggtaggagataaggggaggaagaaaggcgaaggtaaggcgaaggggtggagagtgatatgaagagcgagagaaaagagaggatagcggacgagtagattcggtaggggttgaaaaaggttaaggggttggagggagggagaggaaggaggaggggagcgaggagggcggggcgttcggtttttagtcgcgcggttatcgtttgtttagtttggttggatttgagttcggttcgtcgatcgttggtcgaggcgtagttgaagtagttttttagtcgcggcgtttttattttttaattttacggtttttgcggcgcgggcgcgatgtagttggttcggggtgaaggtaaggcgcggggcgcggggcgcggggtattgggagcgaggtattggcgcgggatgttcggcgtaaggtgtagggcgcgggtcgtttttttttcgcgtttttttatttcgttaaagtttttttacgatggtttttatttcggttgggttagtttcgtaattttcgtttgttttttgttttttttttttttttcgagtcgcggggttttcggggcgcgcggattttcgttaggggtcgtgtaggcgcggagttttagtcggtttgttttgggttcgaagaaagttgtggtttggagttagttttttttttacgatttttgggggcgtttttttttttttttgagttcgcgatgggaaggcgtttttattttattttcggggtttttgagattttttggcgaggtggggcggcgcggtaggtgtagggttggggagggtttgatagttttgg

SEQ ID NO: 2011 - DNA, 2480 bp, Artificial Sequence
  chemically treated genomic DNA (Homo sapiens)
tagtatgaaatataaggtttagtatatattattatttaaatgttttttgtttgaataaatatatgattgttagtgaatatttgttgaatgaataaaggggttatatttaatagttaattgtagtgtttatgttatttaaatatggtggttttttaggtgtttttgttttagtttttgagagttttgttttttttttattgggatttagatatgtagttataaggagttaaattttatagaggtgtgtaaagatgataagttataggtagtagggcggtaattaatatttttttgtttggatattgagatttttatatttgttggataatagtgaatttataagggattatatatttaatggtaatatttatatataataaatatttatttaaaaaatttatatgaattaattaatttttagaacgtttttatatgggattttttattagtttttgtatttataagtatttattgaatattttttgtatattaagaattagttattttttaaaattttggtgagattaatagattttatattattagttagtgagtttttttaaaagtgttggtttatttataattagtgagttgtattttttttgtggtattggttagattttataaattgtagttttttgtttatttataatggatttagatttttggatgagatgtattatatatgtgtgaaggattagagggtattttttaataataataggaataatattgttttgtgttgttaaattgtagatttttttttttaaagatttaaagtttattatagatataatttgattgttgttgtattgtaatagtgtttttttttttttttttatttaggtagattttttttttgattaaagatggtatgaatatttttttatgttatgatttatttgataaatagtttaggatgttataaaagtaaagtaggagatgttttaaataattagtggtagaaagtttgttgttgttcgggtgttaattttgttagaaagtttagatatttgtgggttgtattgtaaatttttgtatagatgtgtgtgaggttgagttttagttatacgtttgtaatagtattaggaaatattttgttatgttatttttttgggtgattttttatgattaaaagaaaaaaaaagttatatttttgttttgtgaaattgagttcgaattttgggtagtttagtagtaattagtatatgtttgaattatagttgcgcgggatggtttgtattatatattaatggtaattattgttttaaatatggaaattaaatattttaggtttaggttgattttaatttgcgggtaggaaacgtttgatttattttaagataagtttaaaagtgtgtggagttttttttggggttataaattttgtttatatttatatgtattttttttgagatagttttttgaggttttttggtagttatttttttgaacgtgggaagagattgggatttttaggaatgtaaaaaaggagaaattaaaatgtttttagaaaattttagggtgtggttggtttagagatttaatttaatagttttaagatttaaaagatgagtattaaattatatttggtttttttttttttaggtatgagatatttatatttatttagaattagtttttaatttggaagttttttgtgtttttagtatttttagattttgtattaaattttttgtaaatttttttaataatgagtagttatgtatagtattatagttgtggttttgatgtttttattattagttgattattttggttttgtttttttgtggttttgtggttatgaaataatattttaataggtataagatgattggtgaaatttatttagtaagttttgggttttttttaatgtgtataattagtgtatattatagtttatttaaaaatgtgttaacgggtgaaattaatatgatattttagaagttgttgattatttatttatttttttgagatagggttttattttgttatttaggttgtagtgtagtggtgtgattatggtttattgtagttttgatttttttaggtttaggtgatttttttagttttttgagtagttggttttataggtatgcgttattatatgtggttaatttttgtattttttgtagagatagggttttattatgttgtttaggagggttttgaatttttgggtttaagtaatttatttgttttggttttttaaggtgttgggattataaatatgagttattgtgtttggaaagaagttatttattattattttgttagataatttgtttgtgattttttaaatatttaatagaatatgttgagttttgtttttatttttttatttattttggaggttatttgtaatgttggtggatgtttttagttatattaatagttttttattttaggtatttgtgtttttttgtttgagggtttttattggtttgagggtttttttagtttggttcggggtaggt

SEQ ID NO: 2012 - DNA, 2480 bp, Artificial Sequence
  chemically treated genomic DNA (Homo sapiens)
atttgtttcgagttaggttgagagagtttttagattaatgaaagtttttagatagagggatataaatgtttgaggtgggaagttgttggtgtgattgaaagtatttattaatattataggtgatttttaaaatagatggaggggtaagggtagggtttagtatattttgttaggtatttaggaggttatagatagattgtttagtaagataataatagataatttttttttaggtataatggtttatgtttgtaattttagtattttaggaggttaaggtaggtggattgtttgagtttaggagtttaagatttttttgggtaatatgatgagattttgtttttataaaaaatataaaaattagttatatgtggtggcgtatgtttgtggaattagttatttaagaggttgggaggattatttgagtttggggaggttaaggttgtagtgagttatgattatattattgtattgtagtttggatgatagagtgagattttgttttaaaaaaataaataaataattaataatttttgaggtattatgttaattttattcgttaatatatttttaagtgagttataatatatattaattatatatattaaggaaagtttagagtttattaggtgagttttattagttattttgtatttattaaagtgttgttttatggttatagagttataaagaaatagagttagaatgattaattgataatagaagtattaagattataattataatgttatatataattatttattattaggagagtttataaaaaatttggtataagatttgagaatgttgggaatataagaagtttttaaattaggaattgattttgggtaaatgtggatgttttatgtttgaagagagggaagttaagtatagtttgatatttattttttgagttttggaattgttggattgggtttttggattaattatattttggaattttttgaggatattttgatttttttttttttgtatttttagggattttaatttttttttacgtttaagaaggtggttgttaagagattttaagggattgttttaaaagaaatatatatgaatgtgaataggatttgtagttttagagaaaattttatatatttttaaatttattttgggatagattagacgttttttattcgtagattggaattagtttgaatttaaagtatttaatttttatatttaaagtagtagttgttattggtatataatataaattatttcgcgtagttgtgatttaggtatatattgattattattaaattatttagaattcgagtttaattttataagatagaaatatgatttttttttttttttggttatagaagattatttaaggaagtagtatgataaaatgttttttgatgttgttataggcgtatggttgaaatttaattttatatatatttgtatagaaatttatagtgtaatttataaatatttgagttttttggtaagattaatattcgagtagtagtaagttttttgttattaattatttaagatattttttgttttgtttttgtaatattttgagttgtttattaaataggttataatatgagaaagtatttatgttatttttaattaagaaaaaaatttgtttggatgaggagagaaggaaaaatattgttgtaatatagtaataattaaattatgtttataatgggttttaaatttttagaagaaaagatttatagtttagtagtataaagtagtattatttttgttgttattaaaaagtgttttttaattttttatatatatgtaatatattttatttaaggatttaagtttattataaataaataagaagttatagtttataaaatttggttaatgttataaaagagatataatttattggttataagtaagttaatatttttagaaaaatttattagttaatgatataaagtttgttggttttattaaagttttgggaaataattggtttttggtatataaaaggtgtttaataaatgtttataaatataaagattgatagaggattttatataggaacgttttagagattagttaatttatatgagttttttaaataaatgtttgttatatataaatgttattattaagtatataattttttatgaatttattgttatttagtaggtgtggaaattttagtatttaagtagagaaatattaattatcgttttgttgtttgtagtttattatttttgtatatttttgtagaatttaattttttataattatatgtttaaattttagtgaagaaggagtaaagtttttaaaaattgagataagaatatttaaaaagttattatgtttaagtagtataaatattgtaattagttgttaaatgtaatttttttgtttatttaatagatgtttattgataattatgtatttatttaagtaagaaatatttgaataataatatatgttggattttatgttttatattg

SEQ ID NO: 2013 - DNA, 2464 bp, Artificial Sequence
  chemically treated genomic DNA (Homo sapiens)
ttgtagtgagttgagatagtgttattgtattttagtttgggtgatagagtgagattttattttaaaaaaaaattaatttggaaatttatgttttagaaagtatgattttagttattttgaatatttttagtgtatagatatgttttgagtggttatatagagagggtataggggtattaaaggaagggaggaattaggagtttttatggaggttttatagaggaatttaaattatgtttttaggagttttttttataattagttgttgttttttttttttgttttaaatttagtaagatataattgataaaaattatatatatttatggtgtataagttaattattatataatatatgtatcgttttacgtatttattatttttggtggtgagaatatttaagttttatttttttagtagtttttaagtatataatatattattattattatagttagtatgttgtataataggtgtttagaatttatttattttgtataattgatattttgtattaattgattgatattttttaattttatcgtttttttttaattttttgataattattatttttttttttttcggtgtatttggtttttttagattttatatataaatgagattatgtaatatttgtttttttgtgtttggtttattttatttagtataatgtttttaggtttatttatgttgttaaaaatataagattttaatttttttaaggtttagtagtattttattgtgtatatggattgtattttttttatttatttattgagggatatttgggttgattttatgttttggtttttgtgaatagtgttgtagtgagtatgggagtgttgatatttttttgatatattgattttattttttttggatatatatttagaagtgggattgttagattatatggtatttttatttttaattttttgaggaatttttatattgttttttataatggttttattaatttatattttaatgagtaggaattagttttttttttgtatagttttagttatcgtttttattgttttattttttgttttttttttttaggatgtttgtgggtattgaagttttttttttagattggatatgagttagtattttagtattttgtgagttgagtgttaggataaggtgcgatttgatttttttagaaattttttttgttttagagatagttttttgggttagggatttttaaggattaaagtttaatttttattattttttattatattgggaattttagaatgtgtgagttttacgtttttcggtgttgatagattagaggaggattagacgcgataatatggttgttgttggaggggttgagaggtgattgattagtttaagtttgtatagttcgtggaggaagtatttcgtttttgtttttttaagtgataaagtttatgttggaatatagagttttttgttttgagtatttaaagttttgatttttttgggggaaaattttttgtagtttttttttttagtattatttgtgttagtgagtaattttttaattaggttgtgagtttttggagagttgagagtgtgttttggtttttgtatttatgaagtgttgggttatgtttttattttagggttatgattgaaaaaaaatgttagagggagaaaattgtaagatgattattatattttgtttaattgaaaaggaatgtgttaattagtttatatagttttatttatttttggaaaaaatatatttttatattatttgttttttgtttttttttaattttttttttttttttaattaaaataaggaaaaaaaaattatagaatgttatttataatatgttaattgttggttatttttagatgttgggattatgttttaaataataattttgagtaatttaaataaatatggaatgttttggaagttgtggggtaggatatagagttgagggaaagtttaagatttagaaattagaaggttagtgttaaaaatattttttagatgtgggtagtgagaaataaaggagagtttttcgtgtagggggttattagttttaagtatttttttatttttatatatttttttttaagatttagaattttaggaggagtttgattgatttagtatgggttatacgattagttttggcgagaggagggtaggattttttaaataatgggaaatttgtgttattattaaagatagggagaggagaattgcgaaggtaaaatatagatgattattacgaataaggggtattttttttttttatttgtggtttttaatgtttttgttataaataaaatataaaaaatatttaagaaatatttatgtattatatatataatatatatatttataaatgttataataaatattttaatatttgtttttttaatagtaagaagaaaagatagtagtaatattattaagaggaagttagtttattggaagggatttaga

SEQ ID NO: 2014 - DNA, 2464 bp, Artificial Sequence
  chemically treated genomic DNA (Homo sapiens)
tttgaattttttttagtgaattagtttttttttaatggtgttgttgttattttttttttttattattaaaaggataaatgttaaaatgtttattataatatttataaatatatatattatatatataatatataaatattttttaaatattttttgtattttgtttgtagtaaaaatattagaaattatagatagaaaagaaaagtattttttgttcgtgatggttatttgtattttgttttcgtagtttttttttttttatttttggtaatagtataggttttttattatttaaagaattttgtttttttttcgttaaggttggtcgtataatttatgttaggttaattagattttttttagggttttgaattttgaagggagatgtataaagatgagaaaatgtttggagttgatgattttttgtacgaagggtttttttttattttttattatttatatttgagagatgtttttaatattgattttttaatttttgggttttgggtttttttttaattttgtattttattttatagtttttagaatattttatatttatttaagttatttagaattgttgtttgaggtataattttaatatttggagataattaatagttaatatattgtggatagtattttgtggtttttttttttttattttgattaaaagagagagagaagttaaaggaaggtaggaagtaggtaatatggagatatattttttttaaaaataaatggaattgtataaattggttggtatatttttttttaattggataaaatgtggtgattattttgtaattttttttttttaatatttttttttaattatggttttggagtaaaggtataatttagtattttatagatataaagattaaaatatatttttaattttttaggagtttataatttggttaaggagttatttattaatataaataatattagaagaaagagttatagagagtttttttttagaaaaattaagattttaggtgtttagagtagggagttttgtattttagtatagattttattatttgagaaggtaggaacgaggtgttttttttacgggttgtgtaggtttaagttaattagttattttttagtttttttagtagtagttatgttgtcgcgtttggtttttttttgatttgttagtatcgggaaacgtggaatttatatattttgaagtttttagtgtaatggggagtggtgggaattgaattttggtttttaagagtttttggtttaggaggttatttttaaaataagaaagatttttgggagaattaagtcgtattttgttttgatatttaatttataaagtgttgggatgttggtttatatttagtttgaagagaaaattttagtgtttatagatattttaaagggaggaggtaagagatgggatagtgagggcgatgattgaaattgtataagagaaagattggtttttgtttattgaaatgtaagttagtaaggttattatgaagaatagtatggaggttttttaaaaaattaaaaatggaagtattatatgatttggtaattttatttttgggtatatatttaaaggaaatgaagttagtatgttaaagagatattagtatttttatgtttattatagtattatttataagagttaagatatggaattaatttaagtgttttttaataggtgaataaagaaaatgtagtttatatatataatggaatattattaagttttaaaaagattaaaattttatatttttaataatatagatgaatttgaggatattatgttaaatgaaataagttaagtatagaaagataagtattatatgattttatttatatgtggaatttaaaaaagttaaatgtatcgaagaagaggggaatggtggttgttaaggggttgggggaaggcgatggaattaggagatattagttaattggtataaagtgttagttatgtaggataaataagttttggatatttattgtatagtatattgattgtagtaataataatgtattgtatatttaaaaattgttaagagagtagagtttaaatgtttttattattaaaaatgataagtacgtgagacgatgtatatgttatataataattagtttgtatattataaatatatataatttttgttaattatattttattaaatttggggtagggggaagagatagtaattggttatagaagaagtttttggagatataatttggatttttttatagaatttttatggggatttttgatttttttttttttttggtgtttttgtgttttttttatgtgattatttaaagtatatttgtatattaagggtatttagggtggttggagttatgttttttgaggtatgagtttttaagttaatttttttttaagatggagttttattttgttatttaggttggagtgtagtggtattattttagtttattgtaa

SEQ ID NO: 2015 - DNA, 2482 bp, Artificial Sequence
  chemically treated genomic DNA (Homo sapiens)
aatggggagtgattgttaaagggtatacgggattttttttggggaataagaatgttttaaaagcgattgtgataatggttatataaatttgttattatattaaaaataatggaattgtatatattaaatgtgtaaattatatggtatgtgaattatattttagtatatgtttaatttttttttaagtgggttgtggttatgtagtatgtattttttttaggtgggtatttgttatagtttttatagttttatattgattgttttatattgggatttagttaatttttttgattttggtttttgttggtatttgatattttagttttagtttatatttatgagtatttttttttttttagtatttttattatgataagttttttttttttatttttttttttatgaaaattatttttattggttattttagagtatattttttataatattttttgatatgtagttattaagtttttgataaagaaatgtatttttttattagtaataatattgttataaaattatacgttattaaattaaattgttttataaatataatttggattttgggttttataaataaatatagtgtattatgttaatcgaagaataataggaagtattttatgattttatattatttaatagtttttttttaaatatttttgtagtatgattaggtaggagatgttataagattgggaatagagttgtaattattggtatttttaaatagtttgttgatggattgggtttgtgagaaaattaatattatattgaaatttttagggatattttaaattggtggattagatggtcgtttgattaagtttgggttatgtaaatagtggagtgtttagatttaggtttggttgttggagtttaggtagttgtttgtatttaagtttagttagaagttttgttaattaaagaattgattgaattttttttttttttttatttttgtttgttttttttttttgtatttgtgttgtttttttttttgtttaaattttttgggtttaggattgtaggtaggtaaggtagagtattttgaatgtttttttgaggattaggaatttatttttttgattatatagtgatgtgttttatagattttttttattgtgaggtaattattttatttatttaagttttataaagtttttattatttcggttagtttatatttttgaagttaagttattagtttgatgcgtttgttgtaaaatgtggtttaatagtttgttagtatatttattttttttttaatggaatttaaaggtattttatgtttgagtagtagtggatttaagagtcgatgaaaagtttcgcgagttgggcgtagttagtataaaataatgcggggaatattgtggagttttacgtagagttatttttagtagtggcgtgcgggttttttgaattttaagttacgttttttgtttttttttttttttgatagtgttttataaataatttatgttgttttatgcgtgttggttttagattgtttaggatgtattggattatttgagtagtttgcgtttatgtggttttttttttttttgaagatgattcgattttgttttgtttataaaggggagacgtggattgttgttttttgttttttaagtgtggttttgtaaagttgttttagaattaacgggttggaattgaaaattattatggagtttggtgaatgttagcgagtttttgaaaagtaaaagttgggaagcgataaattttttttatagttttattttaaatataaacgaggttatttttttgggaggtagtaaaagtgagtattttgtgtttgattaaagataattttttggttgaggttttgattatttagggatgaaatggaggtaaatggttttttttgtttaaatttagatttatttttgtattaggttaggtatttgttggattgaaaggagtgtagtttttggagagtagttttatggaattggaattggtaaaaatgggttttttgattatattttatatattattattagaatgtattattatatattagatttatattatatttaatatagatttaatatattagattataattagattatattaaattataattatatattagatttatattattatatttaaaatgttttattttattagttttgttatttgtatatttgtgttgttagtttataaattagattataatgattttttattatttaagttagaatttttatattttatttatattttagaaagtagagattaaagaaaagtattgagaagagaaggttaatttttttttatataataatatttgtggtttttaaattgaaatgatagttgatatagtgtttagagtttaaattttatttttatttatttttttagaaagagatattgaaatatataagggaaagagaggagattatatgtgaaaaattattaattattttgttagtgattatttaataatgaa

SEQ ID NO: 2016 - DNA, 2482 bp, Artificial Sequence
  chemically treated genomic DNA (Homo sapiens)
tttattgttaggtaattattggtaaagtagttggtaattttttatatatggtttttttttttttttttatgtgttttaatatttttttttagagagatagataaaaataaaatttaggttttaagtattatattagttgttattttaatttgagaattatagatattattatgtaagaagaaattagttttttttttttaatatttttttttaatttttattttttggaatataaatgaaatataagagttttgatttgaatggtaaaaaattattgtaatttggtttatgaattgataatatagatatgtaaatggtaaggttggtaaggtaaaatattttagatataataatatagatttaatatataattataatttaatataatttaattataatttaatatattagatttatattagatataatatagatttaatatgtaataatatattttaataataatatataagatataattagaaagtttatttttattaattttagttttatgaaattgttttttaagggttgtattttttttaatttaataaatatttagtttggtataaaggtaggtttggatttaggtaaagaagattatttgtttttattttatttttggataattaaaattttaattaaaaggttgtttttggttaaatatagaatgtttatttttgttgttttttaagaaaatgatttcgtttgtatttgggatggaattgtggaaagagtttgtcgttttttagtttttattttttaaaggttcgttgatatttattaagttttataatagtttttagttttaattcgttagttttgagatagttttataaagttatatttggaggatagaaaatagtaatttacgttttttttttgtggataaaatagaatcgaattatttttagaggggagaaaaattatatgaacgtagattgtttaaatgatttagtatattttagataatttgaaattaatacgtataaggtaatatgggttatttatgagatattgttagggaaaaagaaaagtaaaaaacgtaatttaaagtttaagaaattcgtacgttattgttgggggtagttttgcgtaggattttataatgtttttcgtattgttttgtgttgattgcgtttagttcgcggggttttttatcggtttttaaatttattgttgtttaagtatgaaatatttttggattttattaaaaaaaaaataaatgtgttaataagttgttaaattatattttataataaacgtattaaattgatgatttagttttaaaaatatgaattaatcgaaataataaaggttttgtagaatttggataaatgaagtgattgttttatagtgagggagatttgtggggtatattattgtgtaattaaaaaaataagtttttggtttttagagaaatatttaaaatgttttgttttgtttatttatagttttgagtttaaagggtttgaatagggggaaaaataatataggtataaaaaaaagaagtaggtaggggtgggagaaagaaagaaatttagttagttttttgattaataagatttttagttggatttaagtataaatagttgtttagattttaatagttaagtttaaatttaaatattttattgtttatataatttaaatttaattaagcgattatttaatttattaatttaaagtatttttaagagttttagtgtaatgttggtttttttataagtttagtttattaataagttgtttaaaaatgttagtgattgtagttttgtttttagttttgtagtattttttgtttggttatgttatagggatgtttaggggagaattgttagataatgtggggttataaagtattttttgttatttttcggttggtatagtgtattgtgtttgtttatgaaatttagaatttaggttgtatttataagatagtttggtttgataacgtataattttatagtaatattgttattaataaggaaatatatttttttgttagaaatttgataattatatgttaaaaaatattataggagatgtgttttaggatgattagtaaaggtaatttttatgaggaaaaggataagaaaagggaatttattatgataaaggtattagaaaaaggaaaatgtttatgaatatgaattgaggttaaaatgttaaatgttaatagaggttaaaattaaagaagttaattgggttttagtgtagggtagttaatatggaattatggagattatggtaggtatttatttaaggaaggtatatgttatataattataatttatttaaaaaaaaattaaatatgtgttgagatataatttatatattatgtaatttatatatttaatatgtgtaattttattatttttagtatagtgatagatttgtgtaattattattataatcgtttttagaatatttttattttttaaaagaaatttcgtgtgttttttagtagttattttttatt

SEQ ID NO: 2017 - DNA, 2345 bp, Artificial Sequence
  chemically treated genomic DNA (Homo sapiens)
agttattgggtttattaaggtatttttatagttggtagtttatttttttttttattatttttttttattatattaatatttttttttttgtttatttttatggggttttttatgtttttttgttagttttaaagtatgtgtgaagagtagatatatttatgtaaatggtttatatttattgtgaaaatttatgaaatatttatgaattattaatgtcgtttttagggttataataaatttttttttttttttttttttttgtgtgtgtagtgtgtgtgtttttttttttttttgaagtgtaattttttaatatggtataatttttttagattgattttgttatttatttaggagggaatgttaaattttatttattttgttttagtttgtaaattttttagtgttttttttttttaaattggattgttagattatttgagggtatttattttttttgtttagagtatagtatttggtgggttgtaaaatagaagagtttttttagatttgtttgataaatgagaggaaaggggtaatggtggtaggagtttgtatagataaaaaggttttttattttgggttaaaaggtgttatttggtattatttttattttttgtttttgtttaggaaagaaatttgataaagtaggagatagtttttgttttgttttttttatttataatttttttttttgagaattgttattttgtttttaagatgggttatatattagtttttatttttatttttttagtttttgtttatgttatttagataattatgatggtttttttttagttattattttgtagattagttttgtattattggataaatggaattttatagttttcgtttggaataatttagttttcggaattttttatttaatatgatgtttgtggaatttattatgtagttgtatatagtaatattttatttatttttttgttgaatattattttattatttttgttagtttgaatggattttttttttatagttaagtaggttatgattaagggagataatgaagtatggaattgttttttttagagaaattataggtatggaataagaattttttgaggaggttttttttgttttttttttattaagttgcgatattatttttatatttagagaattttagagtaatatcgagtttcgttgagtgggtttagagttttatatggtagttgttttagtttttggtacgaggttaaaggatgatagtttttatttttttttatgtttttttgtttaattttagggaatatttttttattttgtgattgtttatatttgaaaattttatttatattttataattttttattagtttaatgttatgtggtgttaattttttgtatgttgtagtgttgagttgtaaatttgttttttttttgtagtaatttaaagtgttcgtaaagttttgaggtagataatgttattttgttatgtatgtttatataatattagtaaattatttattgtgtttttgtttattttttagatatggtggttgttttgtagaattaaaatttttgttatttttttttataattagttaataaatttaagttgagttaaggagttaggtgaagttattgtgatttgggtaaggtttttatcgatagatatgtgtttttagatataagatgtgtttttagatatataattttgtttggttagagtagaatagaatgggtggtgtatatttttattatgtaagtatattttgttttttttattggtaataatattttaaggagcgtaaggaaatttaggaaggaatattttataatgttaagaatatttattaagtaaattattttttagaataaatttgagagatggattgttatattaaagttaatagaaattgaagtatgataatgttaatgtatattttttttgatatattgtagattcgtagttttaaaagtttgtttttttattttgttagttgaattttttttattttgttgttattttttttatgggatgttttaaaattttatagatttttgtttggtaatggggaaaaatgagggtgtttattattaagaaagttaattaaagaagtaattgatggattatttagtttatagattaaataaaatggacgttattttatgtttttaaatatttaggtattggaattagaaaatgaatttttaattagatttttttgttttttttgtagggaaaatgagatgtaaagtagagttagagaaaaatagtaaatggttatttgtttgttgggagataaaaattttatttagaggttaagttatatttaaattggttgattttatggagattgattttgttttgtggga

SEQ ID NO: 2018 - DNA, 2345 bp, Artificial Sequence
  chemically treated genomic DNA (Homo sapiens)
ttttataggatagagttagtttttatgggattaattagtttgaatgtgatttgatttttgagtaagatttttattttttagtagataaatggttatttgttatttttttttgattttgttttgtattttattttttttgtaggaaaagtagggaagtttgattgggagtttattttttgattttagtgtttagatatttgaagatatgaagtaacgtttattttgtttggtttatgggttggataatttattagttatttttttaattggtttttttagtggtaaatatttttatttttttttattgttaggtaagagtttgtaggattttgaggtattttatgagaagagtggtagtaagataaaagagatttagttagtaaaataaaaaagtaggtttttaaaattacggatttatagtatattagggaaaatatgtattgatattattatgttttagtttttattggttttggtatgataatttattttttagatttattttaaagaataatttatttagtaggtatttttgatattatgaaatgtttttttttgaatttttttgcgttttttaagatattattattaatgggaaaaatagggtgtatttatataatgaaagtgtgtattatttattttattttattttggttaaatagaattgtatgtttgaaagtatattttgtgtttgaaagtatatgtttatcgatgggaattttgtttaaattatagtggttttatttggttttttagtttaatttgaatttattaattaattatgaaaaaagataatagaaattttgattttataaagtaattattatgtttggaagatagataaagatataatgaatgatttgttgatattatatgaatatatatgataaaataatattgtttgttttaagattttacgggtattttggattattgtaagaaaagggtaggtttgtagtttaatattgtagtatgtaaagggttaatattatatggtattgggttgatggaagattgtagagtgtgagtaagatttttagatatgagtaattatagggtaaagaaatattttttaaggttgggtaaaagaatatgaaagaagataagaattgttattttttggtttcgtgttaggaattgagatagttgttatatggaattttgaatttatttagcgaaattcggtgttgttttgaagttttttgaatatgaaaataatgtcgtagtttgatgaagaaaggatagaaaaggtttttttagggaatttttattttatgtttgtggtttttttggaaaagataattttatgttttattattttttttagttatggtttatttgattgtaagaaagaaatttatttaaattggtaaaagtaatggaataatatttagtaaaagaataaataaaatattgttgtatgtaattatatggtgaattttataagtattatgttaagtaagagatttcgaagattaaattattttaaacgaaaattataggattttatttatttaataatgtaaaattaatttatagggtaataattaaggagaggttattatagttgtttgggtggtatggataagagttggagaaatagaaatagagattagtatatggtttattttgagaataagatggtagtttttaaaaaagggggttgtgagtgaggaaggtaaggtaaggattgttttttgttttgttagattttttttttgagtaaaagtaggaagtggaggtggtgttaagtagtattttttggtttaaggtgaagagtttttttatttgtataagtttttgttattattgtttttttttttttatttgttaaataagtttgaaggagtttttttgttttatagtttattaaatgttgtgttttgaataaagggagtgggtatttttagataatttaataatttagtttgaaaaaagagaatattagaaagtttataaattgaagtaaaataagtagaatttaatatttttttttgagtgagtagtagaattagtttgagaaagttatattatattgaagggttatattttagagagagagaaagatatatatattatatatatagagagagagagaaaaagagagatttattgtggttttagaaacgatattaataatttataaatattttataagtttttatagtaaatataaattatttatatagatgtatttgttttttatatatgttttagaattggtaaggaagtataaaagattttatgaaggtaaataaaggaaaaaatattggtatgatgaaggagagtggtagaagaaagagtaagttattagttatagaagtattttggtggatttagtgatt

(The sequence listing continues in the following parts.)
